United States Patent Application Publication US 2013/0034624 A1 - sequence listing, part 21

SEQ ID NO: 59703 - DNA, 859 bp, Bovine  19866881744220
  misc_feature (1)..(1): n is a, c, g, or t
natgagcgagcaagtgagtgaaagttgctcagttgtgtcagactctttgcgacccccatgcaaagtccatggaattctgtgggtcagaatactggaatgggttgctgtaatcttctccagggcatcttcccaacccagggatcaaacccaggtctcctgcactgcaggcggattcttcaccagctgagccaccctggaagcccaagaatactggagtgggtagtctaccccttctccagcggaatcttcccgacccaggaatcgaaccgagatctcctgcattacaggtggatccttaaccagctgagttacctgggaagctccttaaatgagtaggttatctctgttaattctccaaagagagcagagcacccctctaaaaatttaggttcccagaaaagacaaataatcatgtctcccaaaatttacattattaattacacagtaattgcaatgggaaaatctgtttattttttattcaaattacatcaactgttttccagaagtaaattaaacttcagtttccccactcagcttttaaaaacaaaatccttccaaaacaagtgagggagatatttcagataaacatatcctcattatgtatctcctccaggccctgtacctaatggggatatattctgatacacgtatacactgtacatactatttctgtgtaagaagttgattacagatatatcaaaaataacttatccagttatatggatataactcagtaacatgtacatgtaattgcatataagattacgttcggatattcatatggggcttccccggtggctgagacagtgaagaatccgcctgcaatgctgaagacccgggttcaatccctgagtcgtga

SEQ ID NO: 59704 - DNA, 2316 bp, Bovine  19866880348180
  misc_feature (1)..(1): n is a, c, g, or t
naaaaaaaaatctctgctcaaatatcattctaatgataagtgtgacatttacttgtagaaatgtgcttctaatctccttatgggggttagaagcatatacagaacaaggaaagctgtgggctggctgagctcccaagacaagagctgaggtgcggagactgagctcagagagttgagacatcagagaggcaagaaggaaccagccaaggagactgagaaggagcagccaggggcagcaactaggagatggtggtgtcagggaaactcagtgaaaggagggttttaggaagagagcagtggttaactgaatcaaaaggtgctgagagatcaagtgagaagaggattagccagtgggcttggcaatgaggaggtcactgatgatcatgggaagagccacataccaagcctctggtccctatttcctgagacaggggcacctgctttaatagccagaaggagactgtggcatggacagggcgggtgctacgcgtgctgacatccagggctcctctggctcaggcgaacttactttctggggtagatgaccatcttggagtcaaggtcagatctgccagcccctcttttaccattgaggagcctgctccccaggctggggcctttgattcccctctttggtggggctcagagagcacgctttccagggagcaccagcttgagttactggtgtttccagttgggaagggacttggggcactttaatcctcatcccttattcacagaagtggaaaccaacccagggagagccagggctgattagaagcagagcttctggggcagaaacccacttctgcaaggggcaataaaccagcgcagttaagacagggcactttaaactcaggtcgtcctggtttgagccacctcctgacctcatggacacagcaagttacttaatatactgagtcccaattgtgccatctgcaaaatgtcttgctgcatgctgaaatgagatagtacatgttgcttggtggttattctgactatgaaatcagagtccttagggactttagttagagaacatgcactgtttctaggagccagccagaataggaggctttcttgaatttggccccaaaaggtttggccctaagatggttgaacttcccgtggtctctagatacttcctttggtctggcctagaaggctaaggctgggaagggtttctgacaacagggaaaaggagctctgcttgagcccttaggtcacaccaggcagcttcttgcctctcttttttgctggtcaggtccactatgggtgggtgaggacatagcctgtgtctcactcggctcctctgctctctctgcagatcagcaacgccgtcctcatcatcttcgtcagctactttggcagccgggtgcaccgtccaaggctgattggcattgggggtcttctgctagctttgggggcctttatcctcaccctcccacacttcctctcagagccttaccaatacaccaagaccatcatgggtaagtggcctcccattactgcttcaagggaatgagggtacatagttctgtgtgttctgactgtcagatacaatctggggaggaaagccaaggaaactttctggtgggataggacagcagagctcagagtggtatccattgcccagaagcccccctgccaacttagtgagacaccccctcaatcctcctgtgcttttggtgcacatttaagaatgttttgctacattccagtcaggaaagacttctaccctgtgtttttataagtttcatagtttcacatttacgttttgagttagttttttataaggttgtttttcttctttttgcatatggatgttaaatcctttaagcatcgtttgtcaaaaagactctcttttctccattaaatattttttgcatcgttataaaaaatcagttggacatttttttaaaataaaataagagacacatttttaatttattattcgctgtgctgggtcttccttgttgcatgggctttctctagttgcagtcagcagcgggggctcctctttagttgtggtgtgcaggcttctcattgcggtagcttttcttgttgcagagcataggctctagggtgtgcaggcttcagtagctgtggcccggaggctcagcagttgcggcttccaagctctagagcgcaggcttaatagttgtggtgcatgggcttagttgttccatggcaagcgggatcttcccggacgagggttcagactcttgtctccggtactggcaggcagattctttaccactgagccaccagggaagccctcagttggacatatgtgtaagggtccatttctagacttgt

SEQ ID NO: 59705 - DNA, 733 bp, Bovine  19866880794576
  misc_feature (1)..(1): n is a, c, g, or t
nctgcataatatctaatatcttaacaacactgtttctatatttgtccaattttctgttatttggggtggaagaaaatctggttcattaatccatcttggtcatgattagaagttgtaaatgttcaccttttgatagcataagattgaaatgtcttgttagtcatccaggtggagatataaagttcatgattttaagagtcaaagactttgtgggaaaccaacatgtttactccatttagttccttggaacttgctgcaaataccttgactgctgacagataagagttgattccaggatgttctgtacatggagagaggtggggtacaggctcaacactcactgcacagccactgccactgtgatgattgttttaaatcttgaacaggcagagttgatttttgtccaggcttgtcgtagcttacaaaatttaattccttcaaacactgggttgggttggtaatctacttgctttccatttcatttattaatcataaccaaggttttttcctggtcatagttctcaaatcctgaagtgttttcttacccttttcctttgcctttctctcagtgtaaaggcagctaatttgagcttgaacaaaaaagatcaaaatttaaaatttgcactgagtacttagttcaactgctacactttactgagcctttattgtttaaagctttaaaaattcctatatcttactatttggagacttcaaaatacttggtcttttcctt

SEQ ID NO: 59706 - DNA, 1214 bp, Bovine  19866880905507
  misc_feature (1)..(1): n is a, c, g, or t
natccctgggttgggaagatcccctggagaagggcatagcaacccactccagtattcttgcctggagaatcccatggacagaggatcctggcgggccgcagtttatggggtctcatagagtcagatatgactgagcgactaagcacagcatgtagtatagttttgagagctctcagggagggaaaagtgttaaaacattgtacagcatatgatttcaactgatatatggggtcagtatttcttcattgaaaatattatatctcatgtcacgcttttgtctcttgaaaactttgcatttgaaatatggaaatgctagtgcaaagtttctgagaaaatcctttcttgtcttctggtttaaatgtacttcattgacaacactgtgggctttttaaaccttttgcctgcctgagccctattggaaacagcattggaaagctttcagtgatgaaggtcacccagctcttacacagagttcccagtgggcattatttccatgaggtgtgaggtatataattagcagagagtcagcaaataagattttaaggaatgtgattatggaagcagaagagtcatttcaggcaagtttgtaatatgtgtttcaggaaaggagcagaagtcaaccagtgagggcctggaccacagccctgattccagctgccttaataccctcgttagaaactcagatttcaagctcccaagctccaggcctcatgtgcatttccttgtcaacaggtgccgtgctaagtgtctggcttgacctaccactcaattcttgtaggtcttatcttcattttacagataagaaaactgaggccaagagagttaatcgtgctaaagtgtaattctcaaaaagataaaatcagaactcatgggcaaatataaaaaggaaaggaaagggaaagggttagttgttcagttatgtctgactctttgcgaccccatggactgtagcctgccaggctcctctgtccacgggattgtccagataagaatattagagtggactgcatgcccttcttcaggggatcttcacgacccaggggtcaaacctgggtctcccacagtggaggcagattccttatcatctgagccaccagggaagcactaatataaaaagggcaaggtataaaatattttattgaatttattagttaaggagaggaaaagatgtgatgaattcaaagagcttgtaagaagctagtgtatttgttggt

SEQ ID NO: 59707 - DNA, 935 bp, Bovine  19866881009387
  misc_feature (1)..(1): n is a, c, g, or t
ngtcattaaagttgactgtgaggcatgtgtgctctgaagaaaagggtcagtgcataggacaggggaccaaccattccaggatccataaaggggttctggggaagggagtggggagctggggccgaaggaagagcaggagtcaccaggggaagatggaggagaggttatttcaggcagaggagggagggggcagagctgtgagggccagaggaggcctgtgtgcctcaagaggggacacctcaggtagctgaggatgtccagagggcaggtgggaccggaagcggtgtgtcttgtccaccagcagagacacacgcccttccctagagcggctcagggactgggagcaggcaggggccctgggcctcatagcaccttgcggagggaggctcccaggtcagttcctgctcagcagaggccaagtagctccaagagctctgcccagcagagagggggccgctagtccccactgcctgtccactgtcggctccaagcagaccaggaggcccgggccttccttctgctgtgagttttctgatggaggcggaaaggccaaaccctggaatgtgctgacctctgccccctgcaaggtccaggagctaagtcccattcttcccagtgccaaagccctgctaaagccaagggtgggtgtggcccagcatggggcaggccaagcaggagaaacatttcccctaggatggttcccagaagggtctccttcagcatccccagcctccttccctaatgaggagaggaaggcccctgaggccagggtcagcacagcataccccggccagtactggctcagcgcttcctgggcagggccctgccacaacccttgaaactggcggccctggagctcctttcaggaaacttcacagttggttttggaatccacccccgtcacataggaacagagctctgtggcctgtgttggg

SEQ ID NO: 59708 - DNA, 1917 bp, Bovine  19866881319861
  misc_feature (1)..(1): n is a, c, g, or t
nggcctctgttctctgggaagagagagaggatgttgtcttgaccaggtgctagttcccttgatgagtaaagtgagatcatgcattcatccaacaaatacttgtgtcctgtgctttctcttcagcttcggttaacttgagccctggagacccccgatggataggagcctggtggttgggcctgctcatttcctctgcctgtttggttgtcacttctttccccttcttcttctttcctcgagcaatacccacaaaaatggaggtaagcttctgagaacccacaattctacctattataagagtttcctaaaaggaggtactgtgtcagtcatttagtcctgtctaactttttgagaccccatggactacagcctgccaggctcctctatccatggaattttacagcaagaatactggagtggtttgccatttccttctccaggggatcttcctgactcagggatcaaacctgggtctcccacactgcaggtagattctttaccatctgagccaccaggaggtatggaggggtagataataaagctgagaagtttcagtaagttaattctgggtgaaatctaatcaagtttcttgatgcaggacttctcagaggctttgaaaggtgagcgtgcttgtgaatttcccaaagatgtgatttcatgtgttccctcaccatggtagcatctcagggattaggagggctccagggaatatagtctgggggaagttctgagttatgtaaagtgagataaagaattaagagtcaataaaaactgaatatgtgacctggagcagttgacttttgcatgtaatagggctggtcatgtctaatcctaaaggactgagtaaaaaagacattcctagtgctgaagagtgtgagattgggctgagagtggagcatactttgagcagactgacctgcatgcatcttccagtcatatctgttggggaaagaaatcaggaaaggatgagattggaaagcagtggggagaagtctgagtgggggccttgacattagcctgaaggatctgaaacttgttctgatctcgtgaagttctaagtgactggagcccacttgggtgataactacatggggttgtggccggggagtcgggaaggaatgaaggctggagacgtgatgcagccagtgtggagatgatacagctgaggaccagggccctggctgccaggcacctggaacagggcagtacagatgtcctcggaggggttgctcagaaggacttagccgtgagcagctgaagtttgtgccaaggcttagagccagaggctgagctggatgttctgcaataaggtgtgtgagactgggtgaaatctaggcctggccggggcgggggtggggcagggatagacggcctcaacttgtcttgaagaagaatttcaaagtgtggcagcacatcatcaggatgctggagtcggacaaacctgagtctgaatctagctctgctacttctaaactagctgagagatcctaggcaagttttcttgctcctaagtttcctctactttaaagtactggagatagagacttctctgggggtcccatggctaagaatctgtgctctcagtgattcctggtctaggaactaagattcgacatgccgcagctaagacctggcacagctgaataagtaaataaaaataaatacaaaagtaccagagataagagcatctatctgaggaggaggttgtgaggaatgggacagtgtatgcagaatgctgggcacagggcccaccatggaggaagcatgacataagtgggagcgcctgcacctggtgatgagtctgctgggggatcccaacagtgtctgagctcgggggccttgcatctgtttagtggttcagagctgggcctcgggctgcagctgacaagttcagaagtggaaggcgagttcactgag

SEQ ID NO: 59709 - DNA, 1118 bp, Bovine  19866881345104
  misc_feature (1)..(1): n is a, c, g, or t
nattctttacccgctgagcccctgggaagcccttattaagcctttcattacctggccctttactgcactgtaaccacaggaggttagcaaggctctggtggtgcttcctgcttgatgtgctagtcagaggccaaaggctagaagggtgaagtcacagccaagagccacacaggaggtcaggggtcatgccctgaccaccctgctacatccacatggtcaagttcaccagtgaattggcccccatcattcccttgggtacttgatgggactgcatcagtattttgcaacctcagctgccaaaaacacacgtgctggatgctggcaccctctgccagagattctgcccccactgctcgaaggtggggcctgggcatctgtatttcttaaagctctcctggggagcttaaagtataggggcttgagaatcactgggccccacagtccttatccaggtgaatgtcttcaagcccttggagaagaaaaacacccagcggcatcttgcctagctcccagctcaatccgtgctctttcctctcttgtccttgatgatgtcagagcctctgggagacagtcaggctttcagcccctctgacagggaggaagcagcccccaacctccacccactcctgcccagaattataggggcccaagaaatctgccaagaacattctggattgccaaccaggaaaaatgtccttaaaatcctttctcctgggcaagaacccgctggctcctgcccttatccggtctggtggcgcacctccctggatgaacgggggaaggcccggctgcggcagccctggggactcaccgatgaggaagttggcataagctgcggaggcgccgtactgcttctccaggaacttgttgaggaaggtagagaggccggcgatgacggaggagaaggtgcactgagccaggaccaccagcatgaagagtgggttcatcaggagcctcaggaagatgcgggggaaccctgtggacagactgctctcagggctgcgcctccaggcagtggtcactgggctccgcaagcctgacctctgcccttcctgcccccccggcagtttcccctctcttcctccggacagaaatccaggccccaggctgctcagtgg

SEQ ID NO: 59710 - DNA, 1054 bp, Bovine  19866881369255
  misc_feature (1)..(1): n is a, c, g, or t
ncccccaggtcctgcaatattagttagaggagcaaagatttgaaccccttgtcactgtatgaaccagccttggtagtcaactctttgtaatgattcagtaatgttaacttgttttttattcataaagaatgttggaatctatcaggtctgtgcagataattatctctcatagccaaggcatctctgaagcacaagggttctctggatggcaaaaccatctgaatcaatcaataaacatcaatctgaagtaatagcaccttttatttctacattagtggagactgctgagaccacagacctcaggaacatgaacatggccgtgagaatgacattgagcatcttttcacgtgcctgttggtcctctatatgtcttttttggaaaaatacctgatacttccgcccatttttaaatcagtctttttttgttttgatattgagttgtatgcgttcattatctattttggatagtaatcccttgattacaaggaagcaatgtatggcccagggaatatagccaatgtgttataataactatttatagagtataatctataaaactattgaaccactgtaatatacctgaagctattattttaagtaataaccatactccaatttaaaaaatggcacttaaatggcacctaaatttttacttctgtatctatagtgaaacatttgagaaacagaaaggtttaggcagggagcatattctataaactgctttgcaaggtagtgacttgaagtttagggaatgtctcttggaataagaaatagataaatagatgctgatatttgggcattctcctgccaaccttctttcttgttttacatttgaagtaggctaataatagggggtttccaaactgggttctcagaaaaggggctctcatgtaatcactgaacacgtcatgtcaccaggatgagtcatgaatgccaggaaaatagcatgaaggttagaggttgggagtcaggaggctgaccctaagttaggaaaaacagaaaagtcacttcacttttctgtacattagctgtttcttcctatatgtggatcgca

SEQ ID NO: 59711 - DNA, 1442 bp, Bovine  19866880421553
  misc_feature (1)..(1): n is a, c, g, or t
naacatagggcagtgatatgaactctctggcgttttattgagatggtttgtaatggaataatatataaagactaaggataaataaatttaattatttgaacataaaaggctgcaggtcccaaacaacaaagactaaagtgaagagtcaagctaaattgggacaactatttataataaatgtgaggaaggttaattgttttagtatttcaatagtactttcaaattgagaaccacagcattaagaaaatcctcgaagataacagtgtgacactaacagaacttagcagcatgcaaattaaaacaagagggaggtctcagtttttgctttttgtcaaatgaagaaatttttgaaaaaagaatgatagactgcccaatgctaacaaaaatatggtatgaaaggggttttcatgcatcgatggtgggagcataaattaatataatctttgtagacacaactgtgttttgagtttgcaaattgcccacaattagtgacccaggaatctctcatcttggaattttacctgaggaagaaatctgaagtacagaatgaaatggtctttcctgatgcttaaatgagatgatttatttttaaacactggtacatataagcacaaaatgaatattattgttattgttattggcacaaatataggccacaaaatatgttccaaattcacttccagtagcattcatttagaatattgtggtacaaataataacaaaattcaaatttgttgcaccacattatattattttaaaagaggtctcaggagataatttgacaatcatgacaagaaatacctgtcttgagacattttgcatctagaaggatcctcttacacaatcataagtaatattacacttaatcgttagtgaagagtgatgcagtttggagagaaatttgaaataaaaaaaaatccagtctaacatctagtcagagaacggagaatagtacagctgactctcaaacaagtatgtgctcttatctgaaattatcttaaaatgggagaattaaggtaagatttgaggcaatttttcttatggccaggaggttgtaaccctagctggaagcaggagagtagaaagcaaaattataagtgaatgatggaaaatgacttaaattatacttctggaaactgcatgtggtccaaaatttgggacaagtcattttttcttttttttttttctgtttgaaagaactttctcaggcttgaaactgcataatgaatcagactcactcaaatcaggcagcaaatagggattgacatttggtaaaatatacacagttgcagtttcagtgttcaagactaatttttcttttgaaatgcatttgtcccaaagaactgtgatgtgcacagcatgttatagccgataaagtgtaagaaaaattgacctgttagatgggctcccacctacacacttacagaaaggcacacacctgc

SEQ ID NO: 59712 - DNA, 3146 bp, Bovine  19866880503618
  misc_feature (1)..(1): n is a, c, g, or t
ntaagtgtaaagtcagtactatacttctctccttttgcagatgataaaacagaagcctacgggtttcagtaaactgcaacttctcatgggtcaatccagggtggagtcaaaactctattccaggtgtgttgacctgaatgtccatgttgctaatcacaataaatggattaagagagaccattactgcagaaagtcaagagtggaaaagggatggaggtgggggatgagagttggggaactgatgcttccctatcctgaacttgggcctccctatggctcagacggtaaagaatctgcctgcaatgctggagacccaggttcaatccctgggttgggaagaccccctggaaaagggagtgatggcaacccagtccaatattcttgcctggagaatctcatggacagaggagcctggagtccatggggtcgcacggtctaatacgaccaagtgactgagcatggcagaggcatcccccgcctcagcttctatgttctccaaaccacagatacatgtatctggatcttcaggaggttttcatgcagcgcctctcaacagatttgaagaataggatgagaattagtaaacagttcaccatcccaacacacacatccatgctcctgtgcacacacatacctcttggggaggggacgggcacagcacaccaactctgaagaaatcctttatcttccacttaccttatctctccactttaatctctttatcactttggatgcagatcggacacattacagctgtctcctttgtaagtcaggcctctctgaagtcttcctcactttgctgtgtagaaactgtcttcctggagatttggccaaacctgagatcacacgaactctatgttaacacaggttgctcgaaaggaaaaggaactttgaactctttcattcaacaagaaatctatcttctttatcttgtccctcttcaaaagcttccctttttccactgctggttgcataacagcagatctgtgatgagggtaatgacttgcattgtatagctatgcaaatgaattccaagtgctccgtcagacgatgaaaggaaaaatgatgactattttattcggctcgttctagagtaaacaccggtaaactcactacaggatacaccttcactgaatatctatgaatgaaggaagagtctctgattactggttttgtctttatttctatttgataaattacatttaattatggcataaaaattagccatgtaataaggtataatttctgagaacagcataaattctaatgattgtaaataaagagaccgcatgacaactctgcaaactcatcagaatggtttggtttatatttctttaaaagattagtgtgcataatatggaactttcttcaaagtgttaattctagaattctttatgaaaaagcaattgaagaaatcagtattacatggaaatgcattttataatagatacaatctacccactaaatgaagctgtggaaattaaaaaaaaattacccaccaaattcttctctaattgagcaactgctaattaaatcaagtgctcaactagttaatcacagttaagcagtgcatttcgaagcctctcccagttgacatttagccaagaactgcctgtgtctcttcctgcagcctcccacaccgtccactggttcccgcatttcacgttcagttagcagggtgagatatctgaaaccactttcacaaggtccatgcgtccaaggacagttcagcacgtctttttgatcaaaatacaagaaaaagacagtgactactattcataactgacttccatactctgttgtgtaaaatgtcaacaaagagcaggcagaattatcaacagtaactgcaatgactccaaatgctgctccacaccacagcggagaccaggagtcaggaaaaggaagggtatcttgatgactttcaccccaccattcgcctattcttttccaaacaacccctgacctgtgaagaagtgaaggaagcctttgtgccatatcacagtaacacgcgagggccaatgacaaacttctgaacgtgccagaaatcacgtcttctttagcaagtcttactgtgaaagttcgaacattgttctctttgacccctttccagttataaatccctccttgcgtgctaactctaaaaagcgtctagactgtattttctcccttcaattctattgttccataatgatcagagagtcctactgaaaatcatacttaaaccccatttgctactgccgtcagcacttcttgcctcactcactgcaggtttgggatcatggtctcaatctccattccagcgcttttgtgtcttgcctgatgcctgctcagttgcttcagtcgtatccgcctctttgtgaccccatggactgcagcccgccaggctcctctgcccatgggattctccaggcaagaacactggagtgggtggccgtgccctcctccaggggatcttcccgacacagtggtcgcagccacgtctcctgcattgcaggcggattcttcactgctgagccaccggggaagcctgaggtcttagacgattccgagtcaacgttgaggacccaaaccacacagcagttttgccacaagggagtcagctgacaactcgttcaggcacactctggataccatcacccgcagaatttccctggctttgcaatactaaactcagacctcatcatccctgaacttgccttccaatcctttcaggaaacaaggtggatggtctgcccacctcgtgtgagctgtggagttgatgcaaacacacacatgtgaggggactaaaaccatcataagctaaactggggcttcagtccggctcaggaatcctacgaggtttctcttatttctcttgttgactctcttacctcctgttatttctctttctctttctctcaagagtttatctatatatttcacagaaaatataaaagtctttagaaaataatcaactcaactttgccccatcatattcatgattccctggtggctcagacagtatagaatctgcctgcaatgcaggagaccaggatttgatccctgggtcaggaaaaacccctggaggagggcacggcaacccactccagtgttcttgcctggagaaacccaggacagaggagcctggagggctacagtccgtgggg

SEQ ID NO: 59713 - DNA, 930 bp, Bovine  19866880541064
  misc_feature (1)..(1): n is a, c, g, or t
nattcaatttatgggaaaatccccttggttttaatactatattattaaactcaattattggctaataaggttatttgaaggaaaaaaaccaatctttcagagatgaaaatgcttaacataagacgattctctgtgtgtagtttgccatctggtgttgatttgtggaaataagaaaggctagtacaataattttcaaatcatgctcactaggtggctaagggatgactcaaagcaacatttcaattctaagacatcaaattatatcatgaaactctgaggtttgtggagctgggagagtgtgtgggtggatgaggtggctacttctaacaaattgttacttctggaagcagtacagtgtaggaaacagttcccagttctggccactctgagaatcacctaggaaattttttttaaatgcggatggccaggtcactctccaggtctgtaaatcagattcactcagtgagacccacggtgatcctaacatgcagccagggagatgaccactgggtagtgggatttaatgatgatcccgagttcagcctgagggctgacctctccctgagaactaccagatttcttacgcagtcagttatccccagtcattggaaaagaccctgatgctgggaaagattgaaggcaggaagagaaggggatggcagaggatgaaatggttggatggcatcaccgacttgatggacatgagtctgagcaagctccaggagatagtgaaggacagggaagcctggtgtgctgcagtccttggagttgcaaagagtcagacacgactttagtaactgaacaacaaatcattcctaatttctgttctatttgtattgctgattgggttcaaaatgcttaattccctagcaaatttcacttgtcctgcttgggtgagaggtcatctcggaattcatcagggggcagaac

SEQ ID NO: 59714 - DNA, 1365 bp, Bovine  19866880549923
  misc_feature (1)..(1): n is a, c, g, or t
nctgcatctgaaatttttgctcaaatttatacaactatattgaatgataaaacagtaaggactaatatatttaatgatctaagatataatgtctcaaaaaatgaaatttggaaacattttagtatatggaaacttaagaccaacattttgaggggaacaaaaaacaaaaactgactgggagttaaagatttaaaaggctcttcattgggccaactgtttttatttgatattagatgaaatgtctaccaaataccctaaaacagattaatgatagaagtcagttaactcattttttcctttccacgtgtgggaatattggaatttctatagctggtaatactatgttccatatgtttaaatattaaacacatacaccagtgtaacctctaggccacaagatgaagtgaaccaaatttatatttctctttctaggtttttttaaaaaatatatcttcctctttgccttgggaaaattcatttcaggaaaagttatgagtacctttgaaaagtcattatgttaccttttccagaagaaggtccatgttttggtcatctctacttaaggaatacaaattaactgaacatgagtaatcatagaggtcatgcgatactgcaaagagtgagacactgtttatttctgctccttacttagtgatgcaaatttaagcaagatatataccttctttgacccatgatttcctagtatatactgagatcatgatatcattctgtttcttggtgtgttttttttttttttttttggctgcatgtgggatcttagttccctgaccagggattgaacccctgcccaggaagcacagagtcttaaccactggaccacctggaaagtcctagaccaccactcttttagggtaacagaaaagattaaccaggggaaagacccagaattgtcaaagcaatggtgaggaaaaggacaaagctgaaggcgtagccctcctggactccaaagtacaatggttgactggaaaatttttcagtgaaagattctggagaaaggctctttaagggacaccattcaaatgcccaggatccataattgttccagagatctgacgcagctggtcatttcacgaatcatttaagtgagaatggttggtagcttcatagagctattcctgccaactcaattcctaagcaagaatacttccctgactttatgcacaagcctcttctgtcctccactcagtagtcatatgatggatacgactggctatgaaagactccccactccgtatcacacattttcaatacgtatttggccaagttgcttcagctgtgtccaactctttgtgaccctctggactgtagcccacccacttccctctgtcattgggattctccagg

SEQ ID NO: 59715 - DNA, 876 bp, Bovine  19866880594498
  misc_feature (1)..(1): n is a, c, g, or t
ntcacctggagtaggaagttgcaacccactccagtgttcttgcctggagaatcccatggacagaggagcctggtgggctacagtctatgggttcgcaaagagtcagacacgaccgagcaactaacactgtggtctgatatttataagcacttttatggggttaagcatttgtattggctgttaagtctaggaaatagatgatatcatagaggggatgggtatgtaatggggaatgtggagatcctgggaaagaaaccagatgtactccaacatttattggtcaggaagaaaaggcagactagcaaattagaaattcatgaagttgaaggtaggaaaactaaagttggctttcactgaaagcaagagctgagagtcttttttaagacctttaaataaggtctttgtcaagtgctactgaaggtttttggagatggaaagagaaaatgattagaaagaccaaataaacttaccgattgtttatgtgctggtacttctggtggtaaaaggataatactgttgagcgagttgtcttatttactgatttgtttacttatttatttgtattatctgtataatttgggtgtaggcaaaaagaaaatagtggtgtttagctgggtagatgcttacagagtaaaacagcaaagggccctggattttgataagacagagcctgaaatgatgaaacagataatttagattaagtagggtattaaaaaaaggatacaattacattttgcggcagagctatcttctaaactgcaaatacagacgagtttgaaactaacagcaggacttcagattaaacattgcagaccaaacacacctgtttgctgagtgctccttgagataccacaaaaacaagagtaacatgaattt

SEQ ID NO: 59716 - DNA, 935 bp, Bovine  19866880658217
  misc_feature (1)..(1): n is a, c, g, or t
naaggggcgtgttgcttggccctctcctgcggtttgctcacacatacagtagatatgtgtcctgttcagtctactgtgagttaattagactttggccttctattttcttttttggttttaaggttttacttttgccgtggaccattttcaaagtctttattgaatttttttaccatgttgtttctgttttatgttttggttttctggccatgaggcatgtgggatcttagctcctcaagcagggatcgaacccacaccccctgcactggaaggttaagagttaaccgctggactaccagggaagtctcctgagctcctattttttggtttagcttctattagcaacatagctgacgttccaatcccctccttctccttcttccttctttctctctagatttcaaactgatgaggataacaaaagactcctaattactcatcctttaatatccaaatgattaccattttacttgtcataatgtaatataaaagtgcaaatatgaaattcaaatatagacagataattaaaatacaagataaaagtgtagatatgatatagagtaggtgaaagaaaggataggctcgctaatgttcttattaacaagaaggtgagtggagacacactgtaattaatgccatttaaatgtttagatatactttaaccaatatttacgttttctgatctttttgtagtcccattcttagaggtactttgtacatccaaattctgtacctgtcagagttcctgaatcagcctaattctgtgctgtccctggggctgacataattgtaattcactcagttctgccaagttagttaccactcaatcttcctctgcttcctctgttttgcaaatattgtagcttgcctcttgccccaggttctccttgccagatagacttcacacctttatgaaaattcatgttactcttgtt

SEQ ID NO: 59717 - DNA, 2857 bp, Bovine  19866880840456
  misc_feature (1)..(1): n is a, c, g, or t
nacaaagatgcataggtacaacaatgtttgctaaagttttttaacaatgaaaagtggaagtatttgctaagatatggtgcatatgtaaatggaatacttggaagcaatttttttaaatgaggtatagttacattccttggcatgaagagatgactatgatatattactaagtgaagatgaaagctatgggagaccaagtgtatatgaagccttaacatatcatccaatgtctttataaaaattcatactcagattccatgtgtttgtacatggctagactgaaagaatactcatcgaatcactaaaaggaatgatctagagagtagaacaattcctttctcctctatatctatattgcttgaatttttacatcaagcctatgttatttttttaaaaaatattaagctatttccatttggggaggaaaatttacccccgtgagaggaaagaaggattaacatggtatcatgataatggcatcacgttcttgaggaaaaaaactttcttgttctgaaccatggatatcaagaaaactctttttgaatgtcattattcctatggtctcatgactggactttcactcttgaatcattgtttggagaaagctcaatgttttgagagttctaaaccaaagatgattgaaagtaagactattttgcattagagaacattttctaattcttctcagtccgggactcatatcccaagaatgtggtttatcttctggtgatttattattattatcatcattactactcctgtcagtactaactgtcatatgtcgttaggtgtatgtgaggcaacaagtataagtatatgctgggaaacatacaaagtatctgacatttaagattgctaatttaaacaccaccgtaatatagtttctcagttttacagatgagaaagctgagtgtcctagaaattaactagcttgcaaaaggtcacaagctagtgaatagtagaaacagaatttcaacatgtctccagagctcatgattccttcttttatataacactgcctataaggcaaccagaaaaatatcacaaatatattagtgttcattgaataaaaaattcagcataatgacaaaattttaatgaatggctgtatccttacaacataaaaatcattatcaagaatctggtggaaggggtaataatacccagatttggagaatcttggcaaaccactgaataatacaggaatgcacatttcacccagtgagagaggattttcgtcaagagggaagttaacacccacgcggcaaacatagtttgcagatgcctgacatttgtgctttctttctcgatcagagttcactggagggaagtcatggccacagcaaaagggccccacagaaagaatactcagtgtttcctcgtaatcaaaatcgtccttggatgggctgctcctgttttgtctctctatcagcatctagtcatagtcgatacctgttgtggcatctgctgtctgatattttcattctagtatgtgatcctcattttgtctgcaacctcagggtacccacgtgttcatcccaagcatgctctctcactatcccttcctctcctctccttttcttcatttttttcttctttttctattcctcctccctgacctctttttccttcttctctctcttaaactattttgtttcccaagtgcctattatgaacccaaaactatgtcaaccatcagccagaaacactctggatgcctatcccttcacagtcctcacctgccttccctgcttgttttattcattcttgtgccacagtatcaaacacaaagactggtacttattaaacgtttaatgaatacatagctgaatatcttcttcacctttagctttatatatctaatttaaaactatatgtgtacaattttaaagcctatagaatgtaactggggtgagagatggtgaaaagcaaggatatgaatagaagtttggaaaagatagggtgtgttcattatttgtggattgagaagagttcttacaagcacaagtaacagttagcatgctactaaacttcagggcaccaagctagttcttttgtatggtttatccccaacatatataccttaatatgatgaaagcccatctgattgatttcctcttaattcaacaatgaactctacagcagggattcccaaccctcttgtcaggaactgggccatatagcaggaggcgagtggcagatgagagcaagcgaagcttcatctgtatttacagccactccccaccgctcgcattaccgcattcctgctcaagctccacctcctgtcagatcagcggtggcactagattgtcataggagctcgaaccctactgtgaaccgcgcatgcaagggatctaggttgcatgctccttagtttcaggaaaacaaacacaagctcccactgattctgcattatggtgggttgtatattattatatatgtaaatattatattattcattatacatatcacagtgtaattataatagaaataaagtgcacagtaaatgttatgcatttgaatcatcctgaaaccatttccccaaccctgcctccagtccatgattgtcttccatgagactggtctctggtgccaaaaattttggagactggtgatctacagaactaccaagtcatacagagtaaaatccctagccctaaagagctcatagctagaagagaaaaatcttgacagtgtgcatgtgtgtttctgtctttctggacattttcttggtgatgtcttctggttcatttgcacatttctttctggtttttctagttaatattttcacttttgcctacggtcagttctccataatggtgcttgctttatacacaaagaaaatgcaggacgcact

SEQ ID NO: 59718 - DNA, 1808 bp, Bovine  19866880918285
  misc_feature (1)..(1): n is a, c, g, or t
ntcaaatctttgctctagattttgccaccagggaagtcctctaaattttacatccattgacaattcttatctgaaccagctttgactgaaatggttggaaaaatgtcagtttttccaatcccagcattttttccacatttaccagtcagactgtgacattctactgtaaggaagacactttcttctcctctctctcaccctctttttttttttttttcagtgtattcatggattattctctttctcccaatgttttattaatttatattttttcaacttgtccccattttggtcagttgagagtaccctcaagctgactctgatattttggtgacatatctctattattttttggaaaacttccttaatttctggcataaaaagatattttacacttatgttgtacctactctgctctcacatcttaattagccatttctctaaggaaccatcattccttttagtggagaatatattagacaccaagatctgagcgctgggcatactcattcctacagagttgtctttgcttctgagttctttaggtagaaaaatctaagaaaaatatgcatgtgcatacatacccatacatatgaatttacatttattccaatctatttgtacctggttctgtcttgtctcccctctgtcatatttgcatgttccttcttccagaaggaaaattctagctgctaacaacatcaacacatcttctcatttgctcaatcatgtaatatatctgaaatagttttattacttgggcagaatgttaccctattcttgcctgccaaaaataagttggactcagtaatttcatgcctagttaatattcaaaagaaaaggaactcatatttccacaaacagccttttacaagaatgtttatagcagctttattcatagaagccaaaacctggaaatagcttattgtcttaagagacgaacaggtaactaagctgtgatatatttatacaatggaatattactccatgataagaaggaacaaattattgctgcatgcaacaatatgaatgaatttttaaatcattatgctgactttaaaaaagcaaatagaaaagaacacataatgcatgattccatttgtatcaagtttgattacaggcaaaactaatctatggtgatagaaactaaatcagtacttgcttctgttggagctgggacaggacaggacaatcactgggaagaagcatgagaaaacattctgggattagggaaatgtgctatatctcagtcaggatgtgaattatatgagtgcacacattcatcacaatggtttgaactctatctttaatatctgttcatttcactgtctgtaaattagccaccttgtctatgaccacaccactctgaacacacctggtcttgtctgtaaattaacgctcaatttttaaattggttggagtagtggctgctatttttagctgaagctagaactcctcattttaaaacagatcctttagtttgcctcacttccgatcttctaacccccatcactctcctggtctttgaatgcacttgagcttgctacccggatcaatttactcacttcctttgactatcttattatttccttttactatcattgcaaatatttaaaatacagcataagttagaatgtgacagataattaaatgacattatccattctttaggtctggccaatatacatactttaatctttaatatagtaaacatgcacacaaattgaaaatgtttaaataatactgaaatttagattaatgctcagtgtaagactttgcttatctgatctattaagacaagagcaaaa

SEQ ID NO: 59719 - DNA, 1310 bp, Bovine  19866880929042
  misc_feature (1)..(1): n is a, c, g, or t
naaattcataagtcattgagatggagataattggaaacaacagttaatacatgtgtagccttctctatatgccgtggcacttttacatagattaacccatataatcatcatacctaccccttaggtacatattatgcttttctgcattttatgcagaaggaaataaagctcagaaaaaaagagactgcccaacatcacatagctagtagatctgggcactagctatctgggcaccaagaattaaattcagacagcatgacttcaaaatccatgctctgacctctgtgagagtcagcctctcgatgttaaatgtcccaaaactggaggctggtcaaaaacagtaggataaatgtatgcgtgcctgctaagttgcttcagtctgtccgactctttgtgaccctgtggactgtagcccgcgaggctcctctgtccacgggattctccagacaagagtactggagtgcactgccatttcctcctccaggggatcttcccaacccagggatcgaacccgcgtctcttgtctcctgcattggcaggcaagttctttaccagtagcaccacctgggaaggataaatacatatgtctttgaaaaatggaaaccgcttatatataatgttaaatgaaaaaggaatagactgaactgtgtaagtgcgatataacctcagttgtgttgtttttaccccctataagtgaatatgtatagaaagaacagattaaaaattaataaaaagcagctgaccagaaatatacccaatatgttaagtatggtttgaggtaagattatatatgaatttgatttttatatgaatttggtttttaaatacatttcaaattttctgaagcaacaggtactacttccattaaaaaataaataaggctgattgtttggtatgaatggtgaccattgatagaatagttacaatttttctaaaaatagtattttttaaatgagacattcagacacaaaacgttcccttgccttaacctttttcaaaatatacgaaatcaactgagaaacaattataaccaaagctaaaatatccttccttccgaatccaactcccatcacacccttccctcctgctcccaaacatacatgataacacaggctaacaaaaatttatgtttgataaatatataaaatcgatatttactggaatatcccagaaagtcacatagttacccatttcaaatagtataaaaaacttattttagtcttttactattcaattcatatacaaagatcagcaccagtccgtccagttacagatcatggtgattttaggcttcattgcaatctttttcc

SEQ ID NO: 59720 - DNA, 1255 bp, Bovine  19866880947143
  misc_feature (1)..(1): n is a, c, g, or t
natgcttcagtacatatttgtggagtgactgaaaatgaccagatgagcaatatatattttatataaataagaaggccagggagaattcattaaggcctggccctggacaaatacatgagtgttagaattctctaatatttcactggctgtttcccatctaacctgtgactttgaagagagacattttgtttttattccatttatggaatgctcgtggtggtgattactcagattgtgttttttgagaacaatagcagggagccataaattgaaggtactggataatcaagtgagttttatgtgagtcacaggacttgcattaaagtttctcatataaaacagcacaattatgagactactcagttaaaaacaaaagagaaccataagcaattatgcgtggcatgcatcaattaagcgctgtctaggattaaatcttccaggcttcgtctttttaggccttctccagaaatcatccattcctgggagagagaggagctgtcataacgcagttgcatatttcacaaacagttttgtctatagtccctgggtatgatggttccgaaaaggtttttttgccacctgatggatgaacaatggacatgtttatacatcttgaatgagcaaagaacaaatcgacctttctaaccgggatgccctgtaccttatctgagcagtgaaactgctgctcttctctgctgtttgaagttatttttttagtgggtgactgaaagccttcctcctctggcaatgtgataaagtcgcatagggctagttgaattttggttcaagtgggtagttcttacatttcagctccaaatgctcagtgcatgtacaggaagggctcttcctggatccctcgacagaacacatacagcacgttctgcaaccattgctggaggaacatcaccattaggcaaagagacaaaacccctacaagtttttccccctcaacggggtacagcagattcctttgttttcaaaaggatgttccccaggtttcatcagctgcctaaaaccgcatgtaggagcttggaagattgagttgcacattttacacaggttaaattacaggattctaaaagtgtccttctttgcggaaactggaggcatggttgatttgcaacatttgttgtatgtctttggggaaaaaaaatacagctgtttctttcctagattggttattaggaaacaaagcctgtccaactacttggtgggcggtagcatcatcatttcatagaaacagttcacagagaga

SEQ ID NO: 59721 - DNA, 970 bp, Bovine  19866881030268
  misc_feature (1)..(1): n is a, c, g, or t
ntcctgcacaaagtggtgggcagcgctctctctgtgccttttatgagagcagaataacaggccacgtggtttgttaacatttcagcaagactcctgttgcttgagtgtgacacatgcccagctgcactgcatgggcaataaggttcgcatttactttcagcgttccccagattattcactttttcatatattctttcaccaaagactacttaatgatagatattgtcagtttaagcaagacacagatcctgctcttaggtaggtcacagtccagctctgtgactttgggaaagtttcttaacttctctgaggctgaaatccctttatgatgtaataggaagactatatccttgacatcactggattatcatgaaaattaaatgggaatatatatgtaaaactagtacagtacctggtacaaaattaatgcttaataatttactttcttcctcctcttgccaattctcaaagcaacagaggcaatttaggtaacacttgtcaccatctgtcatgtgctaattctatgccaactgagtgcaaaaggtcttattcagtatatcactagtttgtaaaacatggctttgaattagatattaattaattgatatatgtagtcattaataaatctgaaagtggctcaaaaagatgaagcaactttctgaggtcatacaattgctaattagaatgaagaatttgaaatcaagtttccttggtggctcagatggtaaagaatcttcctgcaacgtaggagatgtgggttccatccctgggtcaggaagatcccctggagaagggatggcaacccactccagggttcttgcctgggaaacctcatggacagaggagccggtcagactacagtccatggggctgcagagacttggcaaaaccgagtgactaacactcttagttcaatacctacatccttcatttcttaccctgtatttctgctatacaagtgcttccttca

SEQ ID NO: 59722 - DNA, 1260 bp, Bovine  19866881031406
  misc_feature (1)..(1): n is a, c, g, or t
nataacagtattattgagctatttccttgcaatacttaacaatactccgtggtttttattcaacgtctcaatccttaaaataacttgtgagttaagtattattatccccactttacaaacaaggccactaatgcctagggagagcaaataacttctccctggtcacatagctattacattacagagctaggattcatactcatatttctctttttgaaatgcctcaaatccttaaactagccctttatcgttctttgaaagtttcattcttcctatttctatttgtggtacctggaatggaattacttgcttggctgtctcgtggcggccggatacggtgcacacaggcgtgggggaatcaagttttactcctgttatctactcgctgacttttctcgtaagatggtttcagttcctactgtgttatggttcctcggaagtttaaacaacaggtcatgaagcaaatgaaatgatgagtagcggtatttattcacccagctcttttgagttcagtaaaaaataataaattggctttctattttaatgttaaccgagacgcaagagagccctcatgcagtccagagaggaggggaagaaatatggacagtggcaagtacagttaattgaacattttatagaacattgagagagttcaaggaaagtgcatttcccattttttatcttcccgtgtttaatgaaaatccacctattatgactgcatagaaaaagaagaaataaaagagaattatcatttttatttctacttagcagctcatccaagcatttgagtttgccgggtctagaggcaaaacgtggggagttggttgaaagagacaggagagaacaaagatatccacctccaacccctcctcacccgagttagaaccagccttaacagagacgtccacctccaacccctcacccgaattagaacccgcctttccctggctgcgcagtttagcttttacagtggattctgaaggaggcgaagattcctttccattcccagggctcctcctgtctggggcttcaccttccatctctccagtgggtgccctgctccgctctcccttgggtgtctgtatccagatgaactaaaacgtgtgctcgatcggtttggtggaacgcggtactggggtccagtaccacttatactccactgacgatcaggatcaatagtgagaaggatggagccccagcgtgaaacgttaggaaaggggattactcatcagaagctgggcttttgaaaagcacgttcag

SEQ ID NO: 59723 - DNA, 1457 bp, Bovine  19866881088242
  misc_feature (1)..(1): n is a, c, g, or t
nttgaagtttacatttctgtgatttttttttattaatgtctttatcctttactagagtaaaggataaaatgtcatgaaagccattttggtgctaatgttactgctcatacttagtaataaaggtgaataaaataaaagaaagaggtgaaatggaggtgacttaggagcattggttgattgaataagcaagtttgctcagaatgaataatgcagtgcagtgcccatagatacatcactgcccataactgttatcactacgagaattgtaggcatcatttccattaggaagacaaagctcttgtctgtatccattacagaagtatcacaacaccaatctccaatttgagtgaaaaccccttttctgtgaattctctttatataaaattatgatgaacatttaaaattttactgctatttctagaatctaaatactacagtctcaaaggtatgtgtaagaagtgtttctaagatcgtgcaagtgttaaatatacacataaagtttgtaatacctagagctctagtcaacacttgcgtactacgatcccatgtactcaggctaggtttctttatgctaggcacggtttttaagtgctttacagatgttaacttatttaattttcaaaacaacattatagggtaggtagtattattatccctattttttagatgaagaagcagaggtacagacatgttcaataattgtctaatgttcaacaatagaatcaagattcaaactcaggttctctggctttagagagctgagcatttgcttagattctccttgtgtggcctcgatcatctagccaggtacttgaaagccataagaacttgaggggaaaagtttggtgtttctttttggttttttaatgtgtagtacactctaggttttaaaaatctacatctcctttttcacctcagcaaagaagcaggtgctaaaagtgagtactcacatgaaggcaggagagataccttgctaacactctcaagaacgtgtttctctcacctcatacttaacctgtagaaaggcagtgttaattgcaaaacatttgtgggagttgtgaaatcaccagaacttaagaatttcaatgtgactcgctagattgaatgagagaagccagaaaattaaagatactcaatttggtaaatggtctgtcaggatttgattttaaaaaatccttttaagcagagtgtagctttttgtaggtttggcagagtgtcaaaacttatgaaatatttggaggtctcagttctgcagtggtctcaaaatagattctctttaatgagagttaaacgttaaaaggcagaactgaatacagcctgccttaatgtttcacaaaattgccagattgccagatgatacttaattggaagctcagaaaataatgatgagcaacctaatcaggaaaaatctatttggtctaaatctcctagagaaggaggtgaacagacagtaaaca

SEQ ID NO: 59724 - DNA, 1221 bp, Bovine  19866881129726
  misc_feature (1)..(1): n is a, c, g, or t
ncacaaaatataagcccatacatgggtaactttttctttaacatacctcaacaggaaaagttgtcttctaagtgacccagagagaccagacgtctggagttgtgctttgtaatagtgatgagcctttgaagcattaatattttggctacattgatacaagtgaaaatattatgaagctaattccatatttttttaaatttaaacaacatacctttttatttacaataaagccaattgaaagagctacaaaaggaaatctttcaaacaaaacacaaatttaccaagatagaacttattttcagcaaacacatttttccataatataactttacaaagtttttcatatgaattgtttcatgcctcctcccctagaacgtgtacaggatgcaaccctttccctaaatggtggggggcagggtggatagaatgtacagatgcatacatacaggatgcttcataggcacgagacatctctgcaaggattcacagaaactcataacaatggtcacctctagagatgggtcctgagaagctggggttagaagtgagaagcccacttggtactgcatgccattttataccttttaaatgtcgaattccatgaatacagttttaactttaacaaaaatgggatcatactctacactgtattataatctctatgttatatgatgttacaagcatctttcctcattaacactccatcatgtatagattctacatcttagctttatggctttaacaattctgttagtaaagataaaataactatgtgtcatcccaccaaacttggctaatcatttgaattctccctggcaattccatcaggcttccttcgatatatcctgaattatgtacttactttatgccaggccctggtggctcagatggtgaagaatctgactgcagtgcaggagacctgggttcagttcttgggttagggaagatcccctggagaagataatggctgtctactccagtattattgcctgggagaattccatggacagaggagcctggtgggctatagtccatggagacgcagagttagacacaactgagcaactaacacttttacctttcactttgtgccaggcactatattatatatatatacataatatatataataaatgtacgactcattgagtcctatcaacaattctatgaggcaggtaccatgaatatgcctattttataaaatttaaaacacaaaactga

SEQ ID NO: 59725 - DNA, 1431 bp, Bovine  19866881227323
  misc_feature (1)..(1): n is a, c, g, or t
nagaagtattatttttgtaacatgacctgactactttgacagtgttaatattacctctcaattcatttatcggttacaaaactctagttctgttattatcccttgcagaggttacacgctgacccaggtaagagcctggaaaatatttctttaaccagggaataaaatcaaatgactttttcctctcatttatatctgtgacaaagaggctgtccacttcatttcaccatctttagtgaaattatcttttttttcttcagcagctcagtaggaaaaataatataatgctgaaaggtgaaatatgagtctgaagatttagaagtaatagcgacgtgagtgagaagaattgcttgtcattcatcctgggctccgtgcagctgcaaagtccctgtccaacagatgcagctgttcagactcgcgttgccttgtaatttttccagaagcacttcccttacaaagtgtcgtcgactattatgatcatctatctcatgtaaaaacagagtgctatttaattgcaaccaagttcctcttcatagctgtcttctcacaatagcaacatgaagtaaaggggagtttgtgttcttattatagtttcatctacagattttactggctatgctttgtcatcttgttgtagcttggtggttccagccagtgtagactcaaagtctactaatcttgtattaatccatcagaattcacctggtgttaaaaggcagggtagttctatgatcttttttgctttgtttgtttctttgttttcccttcaagtggaagaatttgtgtccagagtgtatccattagaaagaaaagaaggaaacaagtcataacatctcgaagtcaagcgttcttttgattctcttttccccaggtttattggactgaattgcaacgctatggccagcaagctctttaattccaaatctgtagagatgtgagagatgatagttcttaaaaactgattggaaaatgtgtttattttccgttgaagttcattttgcagtgaggcacttgagagtctttaataatagttctctactgagttcttgaagcaactgagaaatctgatggaaaggtcaacacacaggggacaaaatatcacctttattttataaaaggtctgtgtttatgggcagtattgaatccaagaaatagcaatcttagctgtgggtctggactgggccaggcctctccctggtctctttaggagcctcctttaaaagcaacggaatggaagaagagattggggggatgtatttcttgaagggacatcagtttcaagaaggccagaagcaagctgtgttctactcttgagcaattcttctttcaaatacagaattaggggaaaaggagagagttgagactggccagggtggttatagccagtgaactccaccccgtggggaggggtgttagaaatagggcatttcc

SEQ ID NO: 59726 - DNA, 1253 bp, Bovine  19866881280719
  misc_feature (1)..(1): n is a, c, g, or t
naagctgcttctggatattagcagggcacttttagctctttaggacagattaatgcagaatattttgaatgagacccaaaagttccagattaatcattttgtttttctctctattgtagaaatcttgatgtgaaaagtggttgctatttgttgaagatctctgacaatattcttagttaattcatttctttccataacaattgaatgtcgaaaatccttgaacactgtttcaggaggtaggggccttagacttatgatatataaaacctctgctcttgagaatatgagtcttatatccaaaagcagcaaataagcaggtataaacaaataaaataagcccaaagaatttgcaatgaaaactccaaacttgcaatgcatttataaagctaaaagcttgttataggaaacaaaaaaaggtggaaatttattgaaattgtgatatattcagaaattcttgggagtttggcaagactttccaagctagatcttgccttattttatcaattcatattatggcaagttgatgtaaaaagcataacatgctttgtaaaactttgttcctgaagtctcagtcagcttctctctctccacacgtgccctaagaggatgacatgtaaaatgccactttaagaagtatggaaaaacaggcaagaagagatggagaaaacttgataggttcagagtcagaaggagaaacgggaagtgtgccttgaccttgcaggtcccactgcaagagatttgttggctagcttaaacgcagcttgtgagcttgggcgcacccatgcagggcgcagctcccagctcaaaggcagccaactgtacacagacttcaagtgaaagaggttcatttgcttacattaaagcctggccgcaggggtctccatcttgttcagtacacactggggaccgccggatccctctccgggaacggagactgcggcggccatcttggtgctggccctctccttgcgctcaccaagggcgccattttgttttcttcagcctcagcccttacgctcccctccctgctgccttactccagtcaccaggtgctgtgtttgtgctctccctctgtctccatctagatcttttctttattatttctttttctattggcgggaggggggatggtttctttttcagcaggtaccatatctgtgcttctcctccgccttgctacagccagtgggtgccattttcgtgtcttacctctgctgtgcttcagagaacatgtatccggaagggagcttcga

SEQ ID NO: 59727 - DNA, 933 bp, Bovine  19866881324344
  misc_feature (1)..(1): n is a, c, g, or t
nagtagttgtccaaccccccacacagaagtgaagagtacgtgagacggtgtgagcggcacagggaggcacgaaacaggactctggaagcagggcaggtctgtgtagggtagtagaaaccaaagcagagggctcttgaagaagggcggggacttggaatgtgtctaatgggtagcacaatcttaagaagggtaaatttctcttaatgttcagatttagatgtgattttaaaagtgtgttcattaaacagtaacgtatttagaagagcatataaattcaaagtgaacagtcataaatttgagtcacctccatgcttgtgatattttatagatgatcttagaaacatgggattccaaatgaaaagaaacagatgttaaaacaattatttttgttatgtcagatgtttataaaatgctagcgtaagttgaatacttcaatatggtgcccagaattgttttcgaaagcaagacaatgggaaaaaagactgtaaacatcctgggaaaaatataattatacatttcactttttgctgaggccagtgttatgaatcttagattagaaggccagttatatttttaatgcttcctctagttttaaccagaaaaagtgcagagctgttaaattaagcatctttgttaccttacaattcttgcaataaatcaaagaaatctaaattagatactattgtctttgcaaagataacatggtagcagtatatatcacaacaattttcacaaaattcttactgaatttcaaactttctattccagtttagtgaatttttgagaagacttcaggaaataaattactttatcatacataatactttctgaagtttgcttcattggaaaatagattaaaatgagtaattaataagacacaagtgccctttaaacttaatcagtgtaatttttcttcattcttacaaagttgta

SEQ ID NO: 59728 - DNA, 2149 bp, Bovine  19866881325929
  misc_feature (1)..(1): n is a, c, g, or t
ntagtgaatcttaattaaggttcactagagaagcagaaccaagattatttattataaggaattggctcacatgattatggagactcgaggtcccaagatctatagttaataagctggggacccaagagcagtgatagtctgagtaccagtcacactctaagttcaaaggcagagacccagtgtccaagctcaaaggcaggtggagaaaatgagttctgttgtggtggtgttcagtcgctgagtcgtgtctgattctctgcagccccatggactgcagcatgccaggcctccccgtctctcaccctcccagtcctgcctccaaacttttgttctcttcaggaattcagtggattaggcgaagctcattcacctggggagagcattctgctttattctgctacagattcagatattaatctcatccagacacaccctcatagacacaccccaaataatgtttaaccaattatctagggactgtgtggagcaattaagttagcacacaacagttgccatctcaaccttctagaatcattctggccacctctcttctcaagacaaactgctgtgacccaggtcctgatgagactgttcttactctcctacctccttctgtagctctgtctgtcctcacgccagcactcacacacgtctccctcgcctgcttacacacgtccttaaagaccctagttcctgctcctccttccctttgtgattcctactttaggagttagaaagtatactttggcacttaggtgttcaataaatatgcattgaatgcatgagctattctattaacctttagcttgaatcctcatgaacattaaattattttggcttgatcactgatataaaaccaacatttactcctgcccaattatggctgaatatatatgtaaccatattcaacattctggtttcattaactttcccctgcgatttatacactaaacttgctcactctgtggtctagatactctgtactgattaaaagtgtggctaccttgttagaattctcttggttgatcaccaccagggaaaagggcattccgtttcgctgttccaagttagatagtggcatgtgaagggggcagaggctttggaataaagcacagcccagggtaggagaccagctcttctgatcttcattctgtcttattgacttctgcagactgagcatataggaaagtgcttggcagaaattaggttttaaaaattgttagatactttgataagttataaaagttattttagtcccaggcttctcacttggtgatggtaattgtatccatttcacaaagatatttgcgactacaaatgagttaatgtgctcacattgagtgcaaagaatatgccaaatgaaactctgtttatatttgttgttttcgtagttttggagtatctgtgaatgtgtttataagtgcaaaattaattttccatcctgtaacctccaattgcatacattttccctctatttttaagtacttacatgtgccaggtactacctaagtgctttacatatgtcatcatttctttaatatggtgttgttcttctcagttaacagagaaaatctggtttcataaagactgaataactttgcaagttcacacaacttgcaaaacctaaactggcacctgaaattgtaccaaaattcagtggcaagtccattctctaggtctgtgagtctgcttctgttttgtaagtaagtatcatttgtatcatttctttttagagtccacatataagggatgtcatatgatatttctcctctgtcggacttacctcactcagaatgacactctgtaacatatggttgctgggggaagagaggggaagggagagtgagggagtttgggatggatgtgttcgcactgctatacttaaaatggataaccaagaaggacccgctgtgtagagcacatggaactcactcgatgccatgaggcagctgggatggaaagggagttagggggacaatggattcatgtatacgtaagactaaatccctttgctgttcacctgaaaccatcacagcattgttaatcgaatataccacaatgcaaaataaaaagatcaaaaagttcattggtgataagtgtgctcaattttaaaacaccgaaataaagtctgtgttcataagttaatttc

SEQ ID NO: 59729 - DNA, 1162 bp, Bovine  19866881617930
  misc_feature (1)..(1): n is a, c, g, or t
nctgaagcccagggttttgggatgtgtaaggagtctatttgagtgagaaagatgaagagaacgaaatggccaagggaactgggtccacaagcatcattgtaatcaatttttaaatctatcataaattacagtcttacataaaatattttggggagaaaaataatttctagctaaaaaaataggtaaattacctctaatggaattctgttctgccaaaggaaaatactccaaatctaattctagtcttcaccctgtaaaaatgatcattatttttagtggtttccaagataatgtgcttcaattatgctcagctattggtttaggtaatttcatattaagtgaatctcaaatgtagtcaaatatcacaaaacatttaagtcacacttttaatctaaaaaaaatctagatatttagacaccttttcctaaaacaaatatattacctttcacaataaccatcaaaatgaggtaaatttttcttttgtttttcatacctatcaataatgtttcttagttatttgcacttaaactgactattttctctccaaagtattctactgtctccactagtttatttttctattattctatgtgaataaaaatgaggcattcctatcatacaacaaaattaaattatgttatatgcctgaagctcaaggataatttaattttacatttattcacttgtggtatttctaaatttatttgaagtgctatcttattgtacagaaaaatgtttccatctttataatgaaaaatacctcagtaatttcatcaagattccatttaaagttatagagataagaaatagtcaaaatctcatcaacacaattccttcataaatgtcaataggtgatcaacatgtgtgagttgtgagaaatgttttatacagaattaaactgcatgtagatctttttttattcttcatcacctccttaaaatacgggaaattaatagattgacaacactggatagaaactttgaaattagtttatctaacacattgttatattggttaacatggtgaatttaaagtcccccaaaactcttccatctaaagcccttccaattacatcatcatgaaacagaatactataggcagtggcatgcacggaatgcagctgcatgtcaagacagcctcccataattcctatcctccaaca

SEQ ID NO: 59730 - DNA, 708 bp, Bovine  19866881783162
  misc_feature (1)..(1): n is a, c, g, or t
nacagataatcataaggttatactatcgtgtctttcttattcttatttctatcgcaggttaggaatgaaggcaagaagtgccaaagatattttgtaataattataatgttaaaattgtatgtgttctaaactgctgcatggccatcagctaaagaattattttcggtttctgcctcactatgatgacactaagcttgatctctcctccagctctgcacagaaccagagaacagaggactcgtaacaagtaaccatggaaaccaaactccacaagtgtttgcacagaatgaagaaggttatattgctgtggaattccatttaaatgtaattttctgattgccttatgagttcagattctccagaaaacaaagcatttctcgagtcaataggtcattcatcaagtgcaggaactgtgctctctgtcagggaaaatggtgttccataagacagacattttcagggaacatggtgttccataagacagatattttcaagacatttacaaagaagaaatagaccaaactatcccagttgaaaatcttccttggcaaggagcagagaggcttttcttactattgggctggagaaattaattctgagaaaagaacagttatcctagaatgaagaaatctttaaactccattatcagattgactggtcaatgtcttttctgctccttttcaaaagaaaccatcgactaaacaaaac

SEQ ID NO: 59731 - DNA, 1402 bp, Bovine  19866880395013
  misc_feature (1)..(1): n is a, c, g, or t
natggaattgtacatttaaaatagtgaaatctattataggtaaactatatctcaatgaagcttctaaaaataacatattctaattacatgtaattttgttgtatttctctccttatagatacttttctctatatgatttcaaaaactaaaaaatatgtaagctgtattttctagtttccaacttaatctcaaataacaagcattccccatgttactaaaacctttggacacatttagttcctgcatgatatcccatttatcaatatgccaccttgaccattcccctattggtgaggatttaagattgttttcaatttttttttctatactaatattctgatatacagggcttccctggtggctcagtggtttggaagctacctggagatccaggatccagatctctggatcctctggaagaaggtgtggcaacacactccagtatttttgcctgggaaatcctatgcacaggggagcctggtgggtccagtgcatatagagtgggacacaactcagtaactaaacaacaacaacaaattctgatatctttgtgtatgtgttcttgtatgttttccctgataacagatttttcaaagatgaaatttcaaggtcaaaatataagaacattttaaggatctgaaattcactattaaattggtttccaggaaaactgcactgatttaattctcactagtagtatatgtaaggaccagttgtactgcactcctgctggaattgaatgttattttgaattattatttgaggtatttgcttaaatcttgctcttcagcttgacactggtttggaattctttcctgtacttttgtccatacagagtcagtccatattattcacccacctggattccatccattcccaaggatttgagacatttgcagaccatgtggcactgtgaggatctcctctgagatcatcttcctgatattccagagcctgagtcttactgtctccatttcttgcctctatctgatagttatctcctaatgtgtttttgagtcctcaatgtttatatcatttccagtgcctaagactttaacatagcataccttagctattatatacagcatctattttcctgtgaagtaggtcagcaacatagaattcattttccatgtagcacagttgtgatttgttctcattcctatttaccaccatatcctcatccttccccttagttctcttctcatctctcccacctggtacctctttcccaattattaatacaagcaatgattgaataatagagaaatgaagatgatgcaaaagagagcggagtcttatcctttcagtggctaggctgggtcaaatttcagcccatcttctcagctccttccctgctggactcagtgttcccttccccttgctccaggtcagtcctgtg

SEQ ID NO: 59732 - DNA, 1419 bp, Bovine  19866880424620
  misc_feature (1)..(1): n is a, c, g, or t
ntttgaaggagactttggaggccctgcaatgccaagagctctgatgatcagtacaggacattctgatggtcatgcagcaaggaagggcaaacgggcacaaaagaactgatgaagaggccacagatccaggagaaagcttcccacagggagactaagcaggagaagatacaatgatgtagaggactgggccagaaaaggaagaagcttgctgatgaaaacggggaaaatagttacaggagatatcaccagagccacatccagaaatgtgggttacaaaggggactgaagtgggggcacccaggctcaggactcagttctgccatcaactctgattttgggttagggttagtaacttctctgagccttgatttttttggcctgccaagtgggttaacagtctctgcttcatcacaaggctcttaccagtactagacaaaatcagggacacgaaagcagtctgtctgtgatcaggcttcaggctgtgatgtggccactttgcagcccctggtgtcttctcccactgtttccagcacagactccagtgcaaaacactgggactgtttaaaggtcactgggtgggtgtgcctactttctgctggctccaggattgggctctgtcttcccacctactctcccctggccccattccaggggagaatggaaaataaaatcggtttaaaagcaaacatttacaaataatggtggtgggggcggaacacagcagagagcagcatggttttccacctcctactggctcctgtccaaaaggaaacactagtatttactgccgcagctttgttctctttcaatctcgttccaggaagtcaagagtaaagatacgttggggagggagaaagaaagaaatgaaaacccaagaagacgagtatgcaatgagcattagaaaatacattcccacccaacactgtaaagcaactatattccaataaaagaaaaaaaaaggaaagaaaatacattcacaggtgtggaatcagaagacagctgttcaggtttaaaaacaacacacatcatcagaaagtgcttttctacctcattccacagccaggctcttcacaggctcatgttcaaatgtcaggatggcagcttgttcctggacaccaaagtagaagtatatccatgttgtatggggcaggcgtgacacgctgagggacaaatctacaaagtcccatggattcccaaactctatcccttcctgttgcacctttgtatccaatggggccattgtcactaactgggaatcactggctcccaaggcttatctgctgctgctaacaaggtttttacccataaaaactcagtggaacaccatccaaaggtatatgagggagattccactctgtcagatacagaaccatttcttgtatcatgtggcagacacttgggtttgggaacacacagttg

SEQ ID NO: 59733 - DNA, 1990 bp, Bovine  19866880501877
  misc_feature (1)..(1): n is a, c, g, or t
ncattcaggtcaccatggtgcatgaaagagtttcctgtgctatacagtatgttcttattagttatctattgtacacatagtatcaatagtgcagaatggtctttcaaaagggcattttcccattgtttttaggattactgaatacttcatattttgacctataagactgtatattgtcctgtatggtctggcttctatctaccatttcatcttcattttgcctccatttgtttctctttttgtcatgttctctcttgtcatgtggtctttgcacatgctgtttcatctgcctgtgttcctcctgttagccaagttatttcttccttaccttctgtatttcagagcaagctttgctttccaagggtgctctgccctgacctccttgactcagtgccattgtccttagcagaccgtaacacttccacaagagcatgggctgtgtttcttttagctgccctttctctagcacttagcataccacctaacagagaatagacacttaagaaatatttgctgaaggaatgaaagtataaataagcatatatggtcacaagtgggtcactttggcttatagatgtattttgtttattcccacactatgtttaaaatgtcttttgatgcctctggattgacatgtgcatttccatttccctagtctctgatgtgcctgtccttcattcatgttagagtgtttatgttccttggtttggctgcatgagggcatggcagatgcacagtgggtatctatggggaagtcaagggtctttttactttgtccacatggagaacagtcatattcctatcccagtgctgttccttctcattattgttagaaactcaactgagaatttagaatgacattctcatggacacctaaaaactcaggacccaattaatttttgagtgaagttttcagtgaaaaatcagatatgtaggggtctgacaaataggttgttagtgactttataaaatctaacctttcacacatggaaaaggatgagctgttgttatggaaaggtatcttaaaaggctcttatgattgatttggaaatgacttcagacattaatgaaagagtaatcttccttaaatcacccaaaagctagtaatccctagggctgcatgttggtgattaaaaaagaaaagtaggagcagctgtctttttgttcagtttaattatgacccaatatctgggggagtgttaatttcctggtggcactggaggtgggtggagaaaggtgttaggtttctgtacacttcagggactgaatgtgcagacatggattctacctggtttgtgcccaaggatgctgacaatgttcaggggaggtcatgctcatgtgctcagattgcatggcattcaatttctgccctttatgtctgagacatgaacctctgtgtgccagaggacacaagagtgctatcggatgtcagttagactacacaccttaattaatagcccctcacctccagcaagccatctgctgcacctgtgagatagaactcctttatgtcatcaggaagaagaggaacatttagccctcttaattccttcggcagcatttaaggctggaagtcactgaactgggcatctgctttcccaagttccgagttttgaatattcaagttggtgtctgagtgtgtattcacaaacggtctgtgaactgctggctgttcttgaaaattaacaccctgctagtggtgaacatgaacaccattcctcccaacttttctccttttgtatttgatatattgagaatggccctgtcatctgcccagtcatccagccagatgcttggtatcatgtgccttctaaatagctatcacatctactgtgtcctctcctccatggcatctaccctgttctccttcaccacccaacctgagatttctgcagcattctccctgcctgcctgaaatcccatcactttcctgtccagcttccacagactactaaagcactcttccagaagtgtcaatctcaggttgtgt

SEQ ID NO: 59734 - DNA, 1506 bp, Bovine  19866880600501
  misc_feature (1)..(1): n is a, c, g, or t
ngagaccaagtaaatcagtcctaaaggaaatcaaccactgaatattaattggaaagactgatgctgaagctgaagctgcaatactttcactgcctgatgctaagagccaactcattggaaaagaccctgatgattgaaggcaggaggagaaggcgacgacagagaatgagatgggtagatgacatcactgactcaatgcacatgaatttgagcaaactccaggaaacagtggaggacagaggagcctggcgtgttgcagttcatggggtcgtaaagagtcagacacgactgagcgactgagcaacaacagcagcatggaggcattttggacagctggctgaagtccctgccccatcagagagcttctgctctcagatgactttgagctctgaatttaccattcatcactgcttcaaacagaaaagtgctgcctgtccctagagacactgtgccctacttgagcatctgtggagttgtttggttacagagaataagcgtgacccacaaggctgtttttccaagcatcacatcacactgtggagagatatgtcacttgagtgagtcaaccttcaaatgttgacacttattcttttgttctaagtagaaatgtctgacttgtttccagactgaagaacttgggacaagttgtgttgtcaacatccaatgcaagttatcagaatttatatatactcaaaggccaggtcctttttaagtctatgattatatactatgtttggcactctgacctggaaaaaggctggatcttcaaaagaagtcctgaaagaaaacatagggtcccagatatgtccagtgtccttggatgtgatgagaagttataatgatagagacagaaaagagcactgcaacaggagtctgtaaacttcagcttagaggtgaaccaccatgaaataagctggctggtctggggcaagtcacgtttttgctctattgctcttttttttttttgcttttctaccaaaagagggatgcaggagcactgggttgatgacctgtaaggtccctcccagtgtgaatactactctggccttttctttcatctatccatccccttctataggctgctgctgctgctgctaagtcacttcagtcgtgtccgactctgtgcgaccccatagatggcagcccaccaggctcctctgtccctgggattctccaggcaagaacactggagtgggttgccatttccttctcccttctatagactagctgctatatttaaaacttgtttgtgatggcttatgcttatctgaaactagaaatgtggaccaaagcacaccccccaagctcccttccagtcccagtagcctaaagggattgcgtttggctgccaggctcaccagcaggaatatgggcatctcttgctgtagcgacagcagtaaaattgccactcgcgatccagcactgactcgaagtagcggctctggaaccctgccaccagtccattgttggagcatgtctggtacctaagagaagagaaaactccaa

SEQ ID NO: 59735 - DNA, 1429 bp, Bovine  19866880645051
  misc_feature (1)..(1): n is a, c, g, or t
ncattttgttgatggtttccctgtaccgtgccaaataaaacttttaagttttattaggtcccatttgtttacttttgcttttgtttcttttgccttgggagactgatctaaataaatattgctacaatttatgtcagagaatatttgcctgtgctctcttctaggaattttatggggttgtgtcttatattcaagtctttaaataatcttcagtttatttttgtatatggtgtgagaggatgttatgatcttattgatttacatgtagctattcaggttgtttggagaaggcaatggcacctcactccagtactcttggaaaatcccatggatggaggagcctggtgggctgcagtccatggaatcgcacagagtcggacacgactgagcgacttcacttttacttttcactctcatgcattggagaaggaaatggcaaccactccaatgttcttgcctggagaatcccagggacgggggagcctggtgggctgccgtctatggggtcgcacagagtcggacatttctgaagcgacttggcagcagcattcaggttgctatgtatgtgttcattagtaataatcatggatagaacacacatgactgtgaccagactagcacttggaggtggagatgaatttgcactggactcttagtttcaatgtctatgtgataaatgagtaaaaagacaaacagatgaagcatatattgactctcaaaccctataaaatatttttttttctatttcctcctgtccaaaaacttccactttctctattcagcttttagtgactgcctcctctcatcagatttgcagtggttagcttctgagttttatatttatatattatcttttattgcaagagggtacctccttccacccaaacagattatgagctgcttaagtgctgttatttcattattcccccactgtgaccatgtggtgctgtccccacaagatccttttaataaatgcttgttgaccaattgactggaaccttgcctgatgagaaggggcattgtggggtggcaaatagtgaggcagagcgtgtaatggaatgcagtcagctactgtttatagtaaccaataaatgcagtgatgctaatgtcatgtgttattagtttagaaactaacaaactaacattttaattttctacttatcttttatggtataatcaaatttcaatttgtaaagcagattttcttccgtggaaaacctttggtgagaaatacaagtcccctaccattctgagatacattaaatttagactcctggaaggcctgatctttgttcaaaagtttgctttcctttgcaacacttttctggccatctaactactgtgtctatttcagatattattaattcagtacccattgatgagtacatgctcgaacagaagctgtagtagctactagggattcagagat

SEQ ID NO: 59736 - DNA, 1787 bp, Bovine  19866880703696
  misc_feature (1)..(1): n is a, c, g, or t
nccttcaactgcaaaaaaaatacatgtgctccccacatacctacccactgggatacaaatgcacacccagatatgcaaactcataataaaaattcaacacagtcaattctgtaggtaggcagacaagtggaaaggtacatgactagatgagctgaagaatggacaaatctaaattacaagagataaactgggaaaaagttacaggtgaacaagaaacaaccaattaatgctagaataatgaaatatgttaaatgatacaaagaaaactttgtcactagttagtgtcacaaccttagattaacttttggggcctcatctagagaggctaggctaaatgattctctaaaaattcattacaattctcaaatcctatgattctacagaaaactcagctttaaaacacatttattgctgcttttgacttactgttttcattccttattattatttaaatcacaatatcagtatcatgctccaaaaacaatgtttgatgctgggcctttgtttctggcagtccttatgataagtgctataatgggaggggtttaaaaaaaagtatttaaagaagtaggtgggaggcggtcctaagatggtagaggaataggacggggagaccactttctcccccacaaattcatcgacagaacatctgaacgctgagcaaattccacaaaacaacttctgaatgctggcagaggacattaagcacccagaaaggcagcccattgtcttcgaaaggaggtaggacaaaatataaaagataaagagagacaaaagaggtagggatggagacccatcccgggaagggagtcttaaaagaggagaaatttccaaacaccaggaaaccctctcactggcgggtctgtggggagttttgtaatctcagagggcaacataaccaggaggaaaaataaataaataataaataaaacccacagcttacatgcctaacagcaactcccagcagaaaagtagcccagacattggcattcgccaccagcaagtgggggttgaacagaaaggcctggtctgcattgagggcaatctgagggagctaaaatgagatagcaacccaaactgtgggatagccagagagagaaaggggaaaaaagagagaaagagagaactgtccctcgaaaagccctacctaaggcaccgttgggcccactcacagaacaaaggatgaggaataccaaaggagagctagcctgctgtggactggcccattccccactggaggcagggaggcaggcaggcaggcagcagcgagagctggaaaggcaaggggcaaattcgaccccagagccggcatcctctaccaaactgtgagcaggctcccagttgctaaccaagacttttgggatccaggacggttgacatccgccgggagggtcacagccagagatcagctccccagaagagactcacagcacacctgagagggccctttcactgcgcatccaggaaaccaagtggcccgggatcggggaggtgataagatgcacccccctacctagggagagtgcactcgccaagcaactggttgcctgagctgcttggacctaggaagggcacaaaacgcaggcctatcccagtctgcgtctttgtggagtacccaagaacctgaacctgagttgcgtagacctggggaagtacacgcaacccagggcccactttagacaattaccctgcagagcaacctggagcctgaacaatgcagactgggaaagcacacacaccatgagcaggggcaaacccagcgcgggccgggacactgcgagcactcc

SEQ ID NO: 59737 - DNA, 1763 bp, Bovine  19866880730803
  misc_feature (1)..(1): n is a, c, g, or t
ncaactgaaactatcacaatattgttaatcggctgtgtgtgtgtgtgtgtgtgtgtgtgcgcttagtagctcagtcgtgtccgactctttgagaccccatattctacagcccaccaggctcttctgtccattcggattctccaggcaagaatactagagtgagttgccatgccctcctccaggggatcttcctgacccaagaatcaaactggggtctcctgtattgcaggtggattctttaccagctgagctaccagggaagcccattaatgggctatactccaatacaaaataaaaaactcaaaaaaatgtcttttcagtaaagagaaaaatgtcaaaaaaataaagatgaaggtctagcaaatagctagaacatagaaaagtgggcataattccctggatcccaacactggatggtttattctcacaatgtcccttcataggaagacatttatgaggggtccatgaccaggtataataactgaccttggccttggcactgaccctgagcctatgagtcctcccgacacaccggccctacgcccctcttttggcctgaacatctccatagtcgctatattggaaccccactcagtaggttcccaccccaggtcctccctaactgaggatcatcaaaaaggcagaagagtgacctacaaccagaggttgtacatatgaacaatctgtatggttgtacctacaaccatatgaacctctgagtcagctgactcaacactgattatgccccatgggagagggtccagaccaggaaaagggaaggagtcctccagtctccagattcacagcaaggactcaggactcacctcccttacttaggagaaatcaagcttgaaatagtcaaagagacaattttctccacctgttgtccaacagataaaactaaaacccttttcggaccaaaggataagctgagcatttcactgacttgcagagtccaaccaaaaggagtggtgttggtatggaacagtaaggaaaactagcccttgcaccagccttgtttatcagaattcccattcagccctctgtctgctaagaatgttcatgctgtatttatcctaattcctttggtacacatctcctttctggggatacccccaacaagtgcctcctaatacttggagtgaaggaaaaagacaaagttgacaagagaaaggacaggggaaagagggacctcataacttttgtgtgttgcctcccaactctggctggccatcactggcatcacagctggcgccacgtgatgccccactacccaagggcctcccatacaggaccccactagcactgcacaccagaccaagactcctccctcacgggccattttgctgtgcctttctcagagtttctcaggaacctttgtgttactgtgctgtgtgctgtgcttagctgctcagtcatgtctgactttttgtgaccccatggactgtagcccatcaggttcctctgtccttggagattctccaggcaagaacactggagtgggttgccatgccctcctccaggggatcatcccaacccagggatcgaacccaggtctcctgcattccagacggattctttaccagctaagctaccagggaagccccctcttgtcacttactttctacaacttcccatatccaaatcacaacttaatgaaattttatttatccttttcatgacatgttaacaatttctgtcttgacaccttgtcttgacatgagcttcaaagtaatatacagtaatatttctggaaatagaag

SEQ ID NO: 59738 - DNA, 1520 bp, Bovine  19866880732674
  misc_feature (1)..(1): n is a, c, g, or t
ngaatctgtaagaagaagctatcaggcaccaggctgaggaattctgagaatacttgagggtttgcatgtgctttatagagaggattgctgtcctttctcatgctgccttgtattcttgagaaaaaccccctgccaatgatgggctgaaaactttcttctacacagcttcttaggtaacctccccagctggaaatgaattccacaagccacacctgaggtcttcattgctttatctgaaaatctccctcacttttgtacattcaaatgagagtattttggagacaatttcttattaaccagaggcatctcttgtgatacacttggccatcttgaagcatctcctgccaatcttatttatatgtacctttactgcttccccaactcattccacatccccatagtcttaccatgtgagggataaaacagacctacaccacaaatatctcgaatatctcaaaatgttcaaagtagtagggattagacaagaatatttggttgctcctcctcagggggctctgcctgaagccttcaagggaagtctttttccttcctactggcgagtgtactccagagaccctgagctcagaaggttgagcttatccagagaggcctgggttgccacttctgtcccaatcaagtgaaggctagagggaggaggttgtgaatggtcaacattgattctctgagcttactcctcttgaagtgaaaggattaagtgcaaccagaaagaactggtttagcaagaattttcaataaggaagggacttaccatttgatttcatgctttacaaagggcaggtcttggtttccaaagcatgtcaaccattctgctcctgtcctgagaataggaaagccgctggggtcaggtggggccaagtcagaggcccaggcttcctagcatccttggctgtgttgaaaggtgatcagttggatgaatagctaagaggcatgtggtttgggggaatctctgctttatactgcctcctttcagcctggagaaaaatcaattgaatccactttttaaaaacaactattgatcaccatgtgcaaagctcaatgctggagccactggggattcagggggtgaaaagtacatggtttctgacttcaagatttcatcagccaattaaaatgactaacacatctaaataactttgagacaattctgtaatgagtgctaaattatggttacaaacatgctttatgagagaaaggattctttctttctctgtgaatctgagaaggcttcttgaaagatttaagatataaatggaccttgaaggaaatgcaggagtttaataaataaataagtgctagagaagattagcaagggaggagaaagcctttcatataaaagctaaaacttaaactggggtccaaagcagaaggatgaagggcattatttgagaaatacagagtaatctcagatgaatttactaggtggagaggaggagatgaattgcataattagaggccagcctgtggaaggctggactgaatggtttggaatttatcctgta

SEQ ID NO: 59739 - DNA, 1493 bp, Bovine  19866880782390
  misc_feature (1)..(1): n is a, c, g, or t
nagtgaaatgagaacagagtccagagatagagatcactgaaagtgctaatttaaggaggtcttgaggtcagaagctcaaagtgagaaggggtgaaactattcttagttatcatgagtcctttcaggccaaggtggggccaagtgagttgcccaaggtcatactgctttcattagaaaactgcagtcctccagagttctggccctgcttacttccctttatgaattcttttctgaaatgttccatcagtgggatagggcaagaaaacaagcatgaaccttccatgctttgctcagtgattattaaggtgataatcacctttaagaaaatatccacaaagttacaggttaaaaaaagcaataaggaatccatctatctatctatctatcacagcagaatgttcccagcatcaggaattggtagacctgggtcaatgaccatcactggttgtattataggtggggctggggatgagcctcagcttacaaatgtataaaatcataaaacagatgtataacatctgcctatttgtctcaaggatttttcgtaaccatataatagcatgagctctataaaaccaccctaaactaaaaggacctgtgcaaacatatcctcatccccaaatacttgatgttacagtcctaaggagagtcagtcttaccttgcaaatggtatgtaggaaagactgtacctacaatgaaaaacagacaaaagatctagtcagatgaagcgagtggaaggttacagagtgaactgggcttctgagcatctgcaatgtgtggagggtgcacgaacacacacacaagcacacacacacacactgtcatgtgtataacaaggaagcaagtattatctgtaatcaaagttggagggcaaaaggcccatgtggtggtaattgtcacctcagcctcacggggttaatctttaaccaaatgagccagcaacatcacctacaacatacagattccagatatcctagaagccctattctttttttttcttttggaagccctattcttaaggaacactaaataagatccagatcagttgtcccctaatattttacaaatcctcaacagaatgtaccttctacccaactgggacaaattttctggtctgtgcctattaattgtaaaagaagtgaaaagagaataggtaaaggtggggaaacacataccaaccgctctagggatgaaagtataagcaagctatgattctttctttttttaaactatgattctttaagaacccaagcccacagatttcttggtggtctcagttaactcagccccttccccaggagggaaccacacagggaggaagctggccacaccctaaaagaccaggcctgggtgtcaggcaggctggaagtcaatcagccctaagaaggcgcatacagttgaaacacatcagcattgtaacagggccatttgcttctgcccatatgaatgctaaacctttaaaaactggcttcataatcagtcgataagcaaag

SEQ ID NO: 59740 - DNA, 1420 bp, Bovine  19866880793029
  misc_feature (1)..(1): n is a, c, g, or t
nggtcctggttaggctggattgttttccttttggttaaaatgttgtctttcgagaagaagtttgtctcaggatatagcaactacattaagtgtaaaagcttgaaagtcaggccaagatgtttagaatgcagctgacagatacccaggggacatcttagtagctacagtccaacacaaagctgctgaaggcaaagaggctgatacctgagaggtacacttaggaggtatctcttattgtggtatttaaaaatcattctcactgatgttcattatttgaggaagcaggaacacaccctaggagaaaagaaagctgaaagtttgccttgaacatttcacactgtcttcccaaatagtgtggaactagaagccccagaaggttctcttcatggcaattcagattaatagtctaagacacacttagaatgtcctagaaaagtggaacattcttgtgattatttagtaattacataatgttcaagtcatagtgatattaatatattcaacattattagaaattaaagaaataaataataggatattgtgtaagagtacagagatatgaaagaaaccagaagagactatctaaatattttggagtagccaaagtactttttttagaacctataatagccaaaatgcagttttaatgagggcatggtgctcaaaaggaattcagtgtattatttgtcataacactgaaggaatgaagtcatattaagtctggctaagactatggtttggtttcactcttaaatggtgtaactgttgtggttaaaacacccacttaagaaagtcagatatactgtttatttcttcatcgccctgattggttggttgatggagcaattcagtcataatggctgctttatggcagaattggtgcccataaatacagtctagagaggactagagattagaagccatagtatatagtttcttgtccactatctgtaatcaattgtgcttttatagatctcatctataaaatctcatgctggaaggggatttgataggactaatgatactttttggcaaaatttgacctttgcttcttgcatgatgtttgaaaagagcttgggctttgaagtcggaagatagttcaaagtcttggtcctgtctcaatatctatgtaaactcggtcaagtcacaatcgctgggtgtctacttcctcatttgtaaaatagggttaataatacctaacacacaggtctattgaggagctatatgggtatgttttttttttggttgcattatttttaggttccacatacaaaaattatcctttagtatttttctttttctgtttgatctacttcactaagtataatattccataggtccattcatgctgctgaaaaaggcaatatttcactcttttgtggctgaataatacacacacacacacacacacacacacaca

SEQ ID NO: 59741 - DNA, 1074 bp, Bovine  19866880939603
  misc_feature (1)..(1): n is a, c, g, or t
ntgtttcaggaaaatatcacttaggttttccatcgaacgtcctgttgctatttctagctgatattgtgcaggcactgtctccttgcaggcagcctttcactctgcagctgactggtgttattgaggccagtgttgtggactcaggtcagaacagttggctttgcatgaagaacttgactgaggggcaggaccctccaatctgctcagggtcctcatgcttctgtgctgtcgttcccaaagggaacaagttggagtaaatgtctccagaagagaagcttgggatgtcctctgtcttcttcagtctgaagggcaggccaatcaattattaatgatctaaatttgaaattgtcactttaagtgagagataatatatttgtgacaagagtgatgggctatgtgtgcttagttgctcagtcatgtccgactctttgcaaccctgtggactctagcttgccaggctcctctgtccatgaagattctccaggcaagaatactggactgggttgccatgctctcctccaggggaatcttcccaacccagggatcgaacccaggtatcccgcattgcaggtggattctttactgtctgaaccactagggaagtccgagaagactgatgggatagaaggagtcctgccttctctctggttgactgttatttgttttcatggactcaggaatatcacataacctctacatcctccttagcttatctctaagatgaggaaggtggtaatgcttcttaatcttttcaaccaaattaatagaaaagagtaaatatatagatacagtggctgtgtctgagagtaccaaattgttcacaagttccctttacctataggctattacaaacctctgtacttgccattaaggccacctacaatttggttccaatacatctttctgccctgctgtgaaatcccttgccttcatgaatgtgtctctccaatgtatcaccagcatggcttcctttgtgtcttttcttcattgtctcctcatcgtgaactgtgtctctttttttctctacatcctaggcatctcttaggcctgggctctgaaagttttgtttgattc

SEQ ID NO: 59742 - DNA, 946 bp, Bovine  19866880975072
  misc_feature (1)..(1): n is a, c, g, or t
ntggctcctatttggaattcagggcacattaaggagcaaggatgaaattggcgtcagctctcctcccacgctctctcctaggttctgcaaacaaggacttcaaggacaaagacatgagcaatttcgctgtgttctctggggataagcaggaagcatctgggggaaaacaaggagagaaaaacgcaaaccaggcttgtgtaagactggatgatgggatgggggcagagaaggttgagggaatgctagtatatacattgcttggtttaaagtctattggcttaatgtggggtctggtaaaactatgattatcaaaatgccttgcatctatgggagtagctgtgggaatctattgcagccaggacaatatcatcctctctaggatccatcttcacatctgcctgtgtcttggaagagaagcagctactttgtgacccataaatagtccacatttcccaaacagctctcgtacatatttagtaatgctagagctatctccagtagcagagagtctgtcagcctacaattagaaaaaagaaaagactcaaactactgagatcagcttctttccagaaacagcatttctttggtgggagggagaagaggaaggagaaagaatgagggctcctgcagtggaggtggggacacaatgtccagagaagaaacaggggacttcagggacagactgtcaatggttcaaggttgacccagattttcccatggtgtgggactaatagaggctgaggttgtcaggcttgggagtgatgggagggaaagtggatgtacagtatagttattttcattcaggtcactgaaaataaagtgcttcactccctactttctgtacacactttacatgcataatctcacttagccctcaggccaaccctgtcacagaggtctttaagagctgcctttaagttttgcagggcataggtcaagagaataa

SEQ ID NO: 59743 - DNA, 1945 bp, Bovine  19866881027507
  misc_feature (1)..(1): n is a, c, g, or t
naaaactaatgggttatctatgctgattctgaggaaggttttttttttttttttggtcaaaacatattatgcagtgaacctgaggaaaggctatgaatctggaaaagaaccatttaggaaaggaaacacatgctcaattcaaaactgttggtccctgcgacatggtctacacctggacagcctcagcgtgctgatgggggacagcctgatgcatggcaagcagccactggagctgtgtggagactggggaattattcagtctctgaaaggttgtggcttcctcagtgacacatgtttgtggtttgcagatgaatggactaagaatgcatattctcacacataaataaatctgtgtaacaacatttacgtctgtatccagtcccagtggggacttgagagtgatgccatgtctgcttctatcaggaatttgctttcttaccagacttcagtgatgctataatatctcatgagaaactgcagagactgaaatgggagcggcgccttggtccccaccaaacaaataaatcccgcacttatgtgggagttgcttggatgatttacttttttttcctgtgcacagggtgctattcctgaatccctaaaagcttgcaagctcggagaggatagatgttcacttctcaatgtcaggctcagtgctatagaacagccttccaagtgggaagagaaaaatgtttccacccacatatgcccagttccctgggaggtgattcaagttagttaaagtgatgtgagggaaggtttagaggaagagggttatcaggagctttcactgtgggaaggtgtgggaaaacagttctcgctccgaagggctgttaaaagggtcggataaaataatgcacttgaagaaagacttttttccactatgaaacctcctcatatcaatgtcaggtttccctactgttactgttccaaggggcctttgatgctcaactattcatttgaaaaatttattgcctactttgtgccaagcaatatgctgagatgccagagaaataagacctaattcatgccctagaggtttcatgcaatgtagaaaaacatagaatgtcatgactcaggaaacttaaagatgccactgaaatgtctagacatgccggcgggacagtgactcatgccctgcataccacagtgcttcctgcaatctcattgtgctgttccaagtgtccctttggaaaaggactatttccttgacaaccaaagtagttctcagctctgacaccacacaaccaggaagaggtccagtcaagggaagcctttcttagagggaccacttcaaagtggactttctgtgtcttttggaggaattatctcctctctccattcttctctctctctccacagtttgattctaccaactgtcagtgtcaagtctgggtgatggagtgggatgaggaatggggagagtgggggtggtgggaaggatgggcagaccattgcagaccacggccaaggataaattttgttaccagagattttaatgtcttgggtaacttaagttgctcatctctgtcagccttttatctcaagactttggtcccacatacacggctccatgctcattaaattcttagcctcttagaaactggtgggctcctgctactctaccctgaatgtaagaccgtttaggtctcggattcaggaactttcagagttataacctacaccctagtcatgtctgttcaccaaccatggtggagtaagaccagctttatggaggcatctggtcccatcacttcatggcaaatagatggggaaaaagtggaagcaatgacagattttactttcttgggctccaaaatcactgtggatggtgactgtagccacaaaattaaaaacaaacaaacaaacaaacaaacaaaacaacgcttgttcctggaaggaaagcttgacaaatcggacagcgtattaaaaagcagagacatca

SEQ ID NO: 59744 - DNA, 766 bp, Bovine  19866881163308
  misc_feature (1)..(1): n is a, c, g, or t
ncagctgcaggtgggggcccctttatcaggccttattcatccatccccactgcctccagcgagcatatttaattatctaaaacccttccagacagatggctgactcagagtccagcctcacctcaatgacagtctccagtggcttcccgtaggcaggccattgcctggcacagagcctggggatgacctaattacaactgtctgtctagtcctccaatttaggggaccagtagatgggtgtggcccctttctaatggccccttttagagccacacaaaacagcactcagatgattttttaaatcctaaaggaagagctggactctgaatcaggaggcctggacttggatcctgcttctgaagacaacttgcctggtgaccttggaccatgggttcagctctttaggctcccacctcatttggaaaataagcagttagactgcctaatcttgtagggctccaaggctcctaatctctgcttggctctgaaaatacagctggattgttctttcattctgttgatctttgtgtttatccctgctagggagagaaggcaaattgtgtttagtttcaaacttgccaacgtgtgacttgtttgtcattaactcccaaactatttgaagaaaagcatgagagggagtgcaaattatatgattttgtttggccaatgggaatcaaatgagaagctgacagacacaatctctcttccgccttcacttcctccacatttttgattgtgcacagtcaaatgattttttttttctttc

SEQ ID NO: 59745 - DNA, 1709 bp, Bovine  19866881235239
  misc_feature (1)..(1): n is a, c, g, or t
natctctataagtagttttgctaagttaaatgctagaaattcattgactatctagatcacttccaggtaagataaaacacaggtacattaattatgttgaacatgatttttgcttttggttgcctattacagagaaacaaaagttcatggtggtagtttaatcgctaagtcatgtccaattcttgcaaccctgtggactgtagcccaccaggctcctctgtccatgggcttctccaggcaagaatactgccgtggattccatttccttctccaggggattttcccaacccaggaattgaacccgggtctcctgcattgcaggcaaattctttaccaactgagctgagaagcccaaacaaaagagacttggactcattagtaaacatgtcttgctccacattgaaaaattatactatgagaaagtatatgcatctagaaattatgaaatgcattcacaaatgtgtcagtgtaaagaatgtttgtgtagcacagttcacagttgcttatttcttagttttcaatagaaattaaggttttaagggataagatgtattaataatagtcatgggctgcaaagagacatagctgagcgactgatgcacatactagaaataataagggaagcaactctgtatgcaaaggaactaggatgtgtttgggcgtaagaaaggtgtgaggtatggaggtgcatttttgtaaagataaaagaaattaatttgcccaaaagtcaaactggttatttctgaatgagaaagaggaaagtaaaggacaaactaagttgatagaaaaacttggcaggagagaaagaaagggggttttatttcgtgtaactcaaactgtctaaaaatgtaataaatttattacaatagattttaaatagtgtacttatgcttatgtaaagttaaaacttaattttctttcatctactaaaaactcaatgttttcttggaccactggtcagctcttgataagattagaaaggtgatttatggcaaaaccaatacaatattgtaaagtaattaacctccaattaaaataaagaaatttatatttaaaaaaaattagaaaggttttctttaccttttaagtaatctgcttggaaagcaaagattttatgtcttactgaaaaaattgactgtgcttcacgttgtctttatcaggtctttgattatctaaaaccaagtcttctccattaaaagagctaaggtttttttgacaaccatgtaactttctgtttttgtctctgtcactttggtttaaatgggtaacacagtattgtttcacgtaatcaatgaacccatctatttaagtgttttaaaacctttttataaaaaaaaaaatcttagcaaacttcccacactccctctccccccaattaaattctaaatgaagtttttctgacctcaaactactggaatttattttcaggagactctggaacatctcaaaaacaaaatttgctctcttgccttattaaactacaacaacaacaacaacaaaaatgagagaggggggaggggttaaactaatttactttatttgatatgttaaactacatggagtggttaaactaatcagctttattttatatgttaagttacaagagaaacattatcaaataaggagttaatactaagccttctttatgttttacttgtagaggtgtataactgttccagaaattttatgaagttcctagaaatctgata

SEQ ID NO: 59746 - DNA, 677 bp, Bovine  19866881236574
  misc_feature (1)..(1): n is a, c, g, or t
ntgtcccatgaaactgtgagctgcgaagataatatacccgagtcacagaaagtcctgccaaatgaggtctgcatttcaactgttctaagccagactttgtgtgtccttaacatttacctctatacctgaacccagccccatccccacacgctctcacagacacacacagagaaatgctcacacacacacagacacacacatagaaatgctctcacacacacagacacatacacagatgctcacagacatacacacaaatgcacacacacacacaaatggacacacagacacacacagaaatgcacacacagatgcacacaagtgctcacacatacacacatatgtacacacacagggtgatgggccaggacaggggcacaggtgagaggagattgtcacctgccttatcttagttgctcagctggtaaggaatctgcctgcaatgcaggagacccccgtccaattcctgggttgggaagatctgctggagaagggataggctacccactccaatattcttgggctttcctcgtggctcacctggtaaagaatcagcctgcaatgagggagacctgggtttgattcctgggttgggaagatcacctagagaagggaaaggctactctctcgagtatcctggcctggagaattccatggactgtatagtccatgggggt

SEQ ID NO: 59747 - DNA, 3924 bp, Bovine  19866881335285
  misc_feature (1)..(1): n is a, c, g, or t
natttataagattttctattattgccttgagtggaacatctcttgtaaagcagccaaagtatttggtacacaaccttcccattaatcatatcccccaaggaaatatatgagttgaacacaccattgctctaatttcacaaaggtagagagagaaggtgcagaagcaaagtgatttttcaagtttacctaaggtctcaccatgtaagtggttggaaagagtgggctggcttctagccagcctagagactttgttctccccagttcttagttttattcaaagtacaagagaacaagcaatttaatatcagtgtcaccaatacatcatccatatgaaggatggtactgccacgttaatatgcaaataagctgaatataaagtatctaatcttactaagcacagtgctccctgtttctcagaaaaatttatgtctatatgaaaagagaataaaattgcagaggatattcaataatgtatattcattaacatatgaaggggaacacggagctgtattccactcttaagattaacccttagagtttgggaaaaaagaaaataaaattgcccataggcatttggtatcaatactctttctgcaaatattctctctctaaaggctttaaagttatgaggaaaatctcagataaatggctgaaaggtgatcccataaaaccagtaattaaccctgcatcattttcttctttcttcaagattgaaagcattaattattagcaccaagcatataggtctgtctccagatgccaagaagctggtgatcagaaatggatgctaggatatgctgtcatctagaatctactccccacatgtgggcaggaatggaacccagtccctctgttccccaaagctctctgtagactttgctgcctcctttctgcacaatgagaaaaacattaacagaaaacattccctcgaggtatttggaataggggaactctttggtcttattgggctttcctgctggctcaaatggtaaagaatctgcctgcaatccaggagacttgggttcgattcctgggttgggatgatcccctagaaaaggaaatggcaatccactccagtattctagcctgaaaaaccctttggacataagagcctggtgggctacagtccatggggttgcaaagagtcagacaagactgagcgactaacactttcacttcacaggtttggtcttattaggaggtgaggaaaataggaaagaaatcaagagcagcatctaaacaggattaagttattattattcctgataacaatgaaaagaactaaaacccacacatgcttagcacttcatcatttataaacactttccatccattttctcatttgatcctcacaacaatcctgtgagataagtaagatggatatttactctaactttcaactgtgaaaattaaaaatacacagagaagtagatgaagcagtgttaataacctgaatatccatcttctggatctcacaatatgaacatcctgctctacatgtacatttattttttgcttaagtattttagcagattataagcaacgtgggatttaaccttttcacatgtaacaaaattaataatacttctctagtatcatttcccatccaaattgtaatcagatagccccaggtgtaagataagcattacttctcattttgcagatgtgactttttttgacataacaaaatgaaccaacgggcttgaggacacatagataataaacaaggaacctgagaactcaggtttagaactcatgatttcttggtctcaattcttctcactttgaagcaaagttccataaaaatagtctcaattggaagaagacagaaaagctacacagacctctgcgtattatttgagcagaagtgatcttaagaaaatgtaaagcgaatatatgagtttatcttcaacaatgtcttatttttagtggcccttctcattccctgtagttctgtatttaccctcccccaactcacccttcattgtccctaattcaaaccccagtcaatgctgcttataatatttgttgttgttcagtcattcagtcatgtccaactctttgtgaccccatggactgtagcctaccaggctcctctgtccttgctgggatttcccaggcaagaatactggagtgggttgccattttctcctccaggggatcttcctgacccagagattgaaccccgagtctccttcattggtaggcagattctttggagctgagccaatatactggctatctaagtgccctatcaatacttccctctccccatctataaggtcaacaccatcttgcagccatcaaacatcttaaaagagcgtgatagactcatctctctgagatgagttattagtcatcgttactgacaccatgaacccctctgagtattcctggaactataggatgacattattttgcctcatggaatcaacaaatcattctgatgtcatgattcttacaccaccatgagcattagcaatgtattcctgcttagctcaaaagtgtatattcaatttagacaattccccttgtagatttatacaatctctgcagtaaaaggtttcctctcccatctaaatgttttaccatcttctcccactttgagcccctttccctcatcacaagtatcacacatgtaatcagtggtagactcagcttgccattcacgtttcacctctactccacaaatgtttgcattgacttcttctgggttcctggcatcttttgacaagacctgccaatggttgctgaaaattttccagatggatatgggtatgttccaaatcataacatcaacggtatctcttggctcgactcacttgtttagtctaaatggatcagacaaatacaaaaacattatataaattttaagtgtcacccaagggaaagaatgtaaaacattctgagataaagagaaattctggtcatcatcaggctactctggaaatgtgataagacaaagccatgtcatgttgccaagtcctggagaactagggaggagtcggtttaaccagaacatatctgattccaggctcaagatgcttagacaggaattcaggttagcaattcctagttccatacaaagcatattacacgataacaatagtcaaaagctttatgtgtgatagatcccttccaggattgccatgtgttgacatgcaacgtataagaaaattcttttaaggactattccctcatactagaatatcagatatgcaaaatagcccagaaggtcttccctgtcatctctgaaatcatgttacaattgtatcagccacagttcttgattacaaacaatagaatctacttggcataattaaaggggaaaaaagaatttattaagagatattttagctcaaggcaggagaaggagacaacagaggacaagatggttggatggcatcactgacttaatggccatgagtttgagtaagctctgggagatggtgaaggacagggtgaaggacagatgctgcagtccatggggctgcaaagagtcagacctgactgagcaacagaacaacaattttagttcacagattcattaaactagctgtaaaaacaggttagagttgaagctcccgggaataatgcctaaaactacacagaactgacccagtggagaaattgcctgctgtgtttaaattcctagaacctgatgactgctactaacatcaatgccactgcaatctgtgactaggggaaaggctatatacctttacaaccacctgtgcccacaactcagagctccatgcagagttagctgctgtctcatattgttcacatctgaactaagtctcatgctcatgtctgattggagagtccagcccctgtcccaactcttattaatcactcactatgtgtcatgccttcttctaagccttttataagaattaaatcacttaagccttagacaaccct

SEQ ID NO: 59748 - DNA, 827 bp, Bovine  19866881369725
  misc_feature (1)..(1): n is a, c, g, or t
ntttttaaagtacattataagcattctttttctgcctatgtgcttactctgatctctccaaatagatttatgtttctttccttttcttcttcttcagttggactgtttgcttaaagtcaaaataaatttcatctcctctggactctcccctaatgcactgatctataatcacagtccttatatcctttgacactttgaatttctaaagtctgcaccactcatttggcacttagtttttgataaccttagaccacatctttttctgtattccttggatctccaagaaaaatataaattatttgaaagcagggacatttttgccagcccaatgccctgttcatgcagacattctctaaacattattgctgtggatgacaatgacaacagcatctcaattatgaagcataatcattcttaggtaaattgaagattcacaatgtcaatacgttgaaactcttcatgcattgttaattttatactggcaattacagttcacaattgttcacagggcacttcacaattgttcatcagtttttgtcaagatagtctcaagagatggatgataaaaagcatttgctgccattttttttctaaattgagcaaagcaaaatatttttatgagatatactgagaattttcagtatattaattaacatgaggaagcaaaataaattatttttcttggtcccttataccaatagcaatactgccccagcaatttttcccatagaaaagcaaatagtgacttatttaattgaacttctggtagtccttaaagacggagaggttctagccttctatgcaaactaaacttctactttaatgcc

SEQ ID NO: 59749 - DNA, 890 bp, Bovine  19866881395300
  misc_feature (1)..(1): n is a, c, g, or t
ngccctaaggcagaaggtctgttctctgtgaagatcctaggtttccttcaaacagacagagctccagagagcattcctggtccccttcttcaatttctgccccttcattccactgctaaacctcctcacaggtactgctcagcactaggcaactcactgggtagtaaaagcaacagcaaggctgagacaggtgctcaagcaactaggcttgttttcaggctgtgcctgtgcacacagaatatatggtgtgcaacacagccatcgtcactcatacaaaagggtttctatggaacatgttgaaagtgagaaattagggattttattataagcgtgatactagtcagaaggcccagaaaactggcattccagctaccaaccagcttgagcagaagaaaagagagcaacagaaaccacttaggagtccctgctgatgttaacgtctgtggagtcctcaggcctcctggacctcttcccttcactcagattggtaggttgcagatctaaacatttgcaaattcacagtcatagtcagtcatccggcacattatgaatttccactggcgatccctgtagggagagagtcagagagctaatgtcagtgagaaaagacaccttgggaagaataaagcaatgagcaatctttggagaatttaggaacgtaagggacagctaacctcactttcctctcaggaaacatctctaagaagtctctagaaaacctattggtaattgtctatgaggtcaggactcctggacccctcctcccagttcaaggtgcatcttggacgggactaactaggttgccagtgtgtttaggtcctgtttatcaccagtgatcagctgatcactggtccatctcaaaagcaccttctggacatacaggttaacag

SEQ ID NO: 59750 - DNA, 1426 bp, Bovine  19866881562687
  misc_feature (1)..(1): n is a, c, g, or t
ntctctgatcatttgttctgctacccatttggctatgattatggagaaaagttacagtaaaactactttcttaaaaggacacaggctttttttttttttttaattattcttcattgcatcaagccaaaatagtcaatctattcgactataataaactttatctgttactactgataatcaacattctaattatcaaaacagtatttcagtttttatctctctagtattgtgggcatgttttattcttttctttttcttaaaatttgacctcattaagtgaattaacttgctttgattcttcttaaaacagcatttcaggggcctccctgatggctcaatgataaacaatctgcctgccaatgaaagagacatgggtttgatctctgaccggggaaggtcccacatgccgtggagccactaaccctttgtgccacaattattgagcctgagcgctagagcccaagagctgcaaccgctgggccctcatgccactgctactgcagtccacgtgcctagagctcaagctctgcagcaagaggagccactgcaatgagaagcccacacaccacaactacagagtaactcccatttggtgcaactagagaaagcccacacagcagtgaaggcacagcacaaccaaaaaatatatacataaataaataaaattattaagcatttcaggaacaaagtgaaatatgttctataataaatataacaaaaatcttacttcatcagcaagttttcggttaaaaatccttgattcctctagtggtgaccagatttttatgtcataatctatgccagatgaagcgagaactagaaaaaatagttcacattaatataaagcttagaaatgtcattaattcacttaaatgtgtaatgtatatatgcatggatgtatatattcagcaaaactgagttagaatggacattgtacttgatacgtttaactgttaaccgagaatacctgttttgaagatttcctaaaagttaccctataatacaattttaaaaccatcttgaaatcactcaaatttttttcctatttactgttcttttatgagaaacatgggaatgtcaaatggaaggtaagaacaagtcattgctcctttgttctggtaaattaattctgatatgtaaagactaacaggcacagaacttccatttggttaagcagggaaaagtccaatcaactgaagctcttatagctgataaaactaagaagaactattaggagaataaactttttaatctatttccctctattttcagccaaaaacaggttgtaaactttttttgttttaaacccaagaagagcaatacttgaccctagtagctgcctactaggataatttggattattcttacaactagaaaaaagttgaagctgattaatcatactaatgattttgaacccttgccttat

SEQ ID NO: 59751 - DNA, 765 bp, Bovine  19866881618017
  misc_feature (1)..(1): n is a, c, g, or t
nacaacaaaatactttttaaagaaatatggtttcattacttttacaattatgaaagaatgttagaggttgaccaaagtataatctgctaatagtctttgaagaaagtgccttaatgaataaagataatttgcaattagcaaatcattattagtatacaaagagcttgagaatatatttttatcttacaatcatcattgtctcaaatcttgttttactaatttaattaaaattaatatatatatatatacaaatatatataattcttgctcaaagcacctcaaatttatacccaccaccttttaaaatcttgtcttccttatagtcacatatacaccaaaaagataaaacacaggagtatccaatttagttgacttcattccatcaagacaggtggttaaatggggaaatttctaacccattaggagagaaaataattagaacataaaatatatgaaatcatgtactttagtattgcaataaaatcaattaaccatagcttttcccagttttctagaacattctagacctcataaattgaataatttaatcataattttttaaggacatacttgacctcttttgactaactggaatttcaacattaatgacccaaacctaactttccacaatcactggccaagggatttctgtgacttttcaacactaaatatagaaatgaaatttatattaccacacggctctttttcaatttggcatttataccgaacttgaaaaccactctaaattcctcttaatgttttatg

SEQ ID NO: 59752 - DNA, 950 bp, Bovine  19866881749404
  misc_feature (1)..(1): n is a, c, g, or t
ntaccctgtaatttaatgctaaatccagctcaatttggtttctgtggcaacggagagaaccagttctctatggctcatatgtcagatttctaaatgcagggtgcctacaacatgctcaacatccccaaacatctgaagctctgatgtgctcagaagctcttgattctcagcttgagccacaggtacaaggatgcagtatggaagcttctgttaaagtctttacccagcctagaaaatgtagaaaagggtagattagggagctttcaagcctagaaatcttcagagatgggaaagctgcttaactggtttgagaagacttgggagagggtcttggtgaagaccaaaggaggtcttagacctgatgtagtcattggtaacccttagtagaagccttagcagatgtacatgttctctatgaatggacccctgtgggcagtcatgagccctcaaaagtaaatctgctttctttcatgtccttcctctcagcgagtagcatgcatgggactggggaagagtgggtttatactctggctgtagcattgactttgatacatgagatgtctccttacctctaggtccagagatacggaaccctcctagaaaaccctctgccatcctggccaaagccccaagattggaatgaatttctaaagcccctcctcctttcagtactgagtttttttttccttggatgctgaaactgaagctccagtactttgactacatgatgcagagaactgactcattagaaaaggcccgcatgcttggaaagcttgaaggtaagaggaaaaggggacaacagaggatgagatggttggatggcatcaccaattcaatagacatgagtttgagcaagctctgggagatagtgaaagacagggaagtctggcgtgctgcagtccatggggttgcaaagagtcagacacaactagccactaacaacaacagaa

SEQ ID NO: 59753 - DNA, 1222 bp, Bovine  19866881840488
  misc_feature (1)..(1): n is a, c, g, or t
ntgagtgcagaatggctatgtgggggctgtgtgtagaacataccttctgtaaagagatagcaggtgtgacaaggttctagcactttgcttaatctgaaatgggggaggcgggcggtggaaagttgcaaatttttaaggaagaaagctccatgtttttaaaattggcaactaattcaaaacagttttcaaaatatgctgggcaaccaaatcatgtgtgtaggctcgttgtagcctgcagactgccagcttgcaaccttaggaagtacttgctgtcattctgagaagcaataaagcataactggagggcagaagtgatgttttcttgctgtttttctttgagatcaacaaacatcaacaaagatggaggtagtgctacctggaatttggagtaaggattgactttatgactcaatacttcattcattcagccagtactagtactgatctactctgtgattttagtcctgcaccaagagaatactttcaactagtttttgttagccagtttaacaaatctggaaatagaggtgaatatgaatgcataatatatagtttattgatattatattataaaacacgatgaagtactatttgcatttccaactttaggaccaaccttagtatattggatatgcctttaaaaatacataaatggggatcatatataattatatgctccatgacttaattttttgacttaataatcagacttggatgtcttctaatggcaataacatagatatacttcattctttttaatggctacatagtattttatagtgtagattcaccagaattcatttaaacattttcctattgaggggctttgagattttttttccagcttcatctattatcaatgctatagtaaacatattgaatggtttgccttggaaatgaacagagatcattctgtcctatgcaatattgttctttacagcatcggactttacttctatcaccagtcacatccacaactggggttgttttgctttggctgtgtctctttactttctggagttatttctccactcttctccagtagcatattgggtacctactgacctggggagttcatctttcagcatcatatctttttgccttttcatactattcatggagttctcaaggcaagaataccgaactggtttgccatttcagtcccttctccagtggaccacatttggtcttcatgacccagatcttcacattactaaaagat

SEQ ID NO: 59754 - DNA, 778 bp, Bovine  19866880374343
  misc_feature (1)..(1): n is a, c, g, or t
nccctcactcgaacctgctggcaccctcactgtggccttccgcctccagaactgtgagcaatactttttgctgttttgtttatttggctgcatctcgtggcatcaggatctgccccaacgagggactgaatccatgcccctgcactgaaaactcagtcttaaaccactggaccaccagggaggtccaataatttctgctgcttatgagtcacccagtctgtgatattttgttatggcagcaggaagagactaaaacagatggggtgagtaggcagggccatttctgaggtttaaaaagccaccaccacacacccagaatgcccttcttaattactcccacagagcagcaaagttaagtacagttgattctctttatttgcagtaattacattctataaagccatgtagacactgaattagcaaacactgaaccactggtcctaggggaaacataggggtaggttcctgtgagccactggccatagaatttttgtcaactgatcaaaatataaccttgttttatgtgagtttctgttttaaaatactttatttaatatgcagctaatcagatcagatcagatcagtcgctcagtcgtatctgactctttgtgaccccatgaatcgcagcatgccaggcctccctgtccatcaccaactcctggagttcactcagactcacgtccatcgagtcagtgatgccatccagccatctcatcctctgtcgtccccttctcctcctgcccccaatccctcccagcatcagggtcttttccaatga

SEQ ID NO: 59755 - DNA, 2383 bp, Bovine  19866880423655
  misc_feature (1)..(1): n is a, c, g, or t
natagctctaatgtttgccagggtttgggagaactaatgatcagttgtgtgagaataagatgacttttaaaaacttgctccaaataaacatgctccaaagttgaagtgttttgatagaaacatgtttctgggaggcaggtgatccaagtgataatggtcaagaagtacaaactagacagagataggacccaaacaaatgcaatgaaagtttatgttattttgttcaaagtagaaacttccagtggagaatgaccctgccctccacctccatcagcgcagaaaattttgacttaataattctttatgtgtaattttcagcatgtgagctcagtcatgtatgactctttgaggccccttgaactgtagcctgccaggctcctctgtccatgggattctccaggcaagaatactggagggggttgtcatttccttctccaggggatcttcccagcccagggatcaaatccacatctcttgtatctcccgtgttggcagatggattctttattactagtgtatttgagcaaaagacatcactggcttcctttctcatccagttaaggtcatgtccccacaagggaaattgtgggttactgtgggcttcaggatggtgattgtctaggctagagatccttctaaaggattcagtcccttacccagggccaaactgcttgtctggttcagcaggaaatgactacttgaatatactttaattgctttcaactgcttgtgactctgaattcactggtgccctggggaagtcttcccccaaatctttgacccaatactccttggtaagccactgacatggcttaaatgatttcagagtcatgctctaaatactgttgcatcacctcaagaacaaatcttcatgcttttgtggtaaaacttgtttctgtggtattcagacatatattaggtagtatctcgactcagttaaacatatgctgtgcaccatgataggttttagggatatggaggaagaaatacatggtttttgctctaaaagactgtggagtctagtgaagaagaccgcagtgtcagaatgtaaaaaagtgccaattgaaaagatgtcactttttattaaacataagaaaaggtaaaataatttttagaagggcttgtgaaggggcattttctggtgctttaggaagacaacccattaatgctttagagcaatggtccccaacctctgggatctaatgcctgatgattgaaggtagaggtaacatgatgataatagaaataaagggcacaataaatgtaatgcacttgaatcatccccaaatcatcctccccaccccagtccatggaaaatttgtcttgcacagaaatgatccctagtgccaaaaaggctagggactgctgctttagagggggcccaaagcagaaggtcctggggtgatgtgtcctttcaagcttcctcgtgaggggatagtgtagggtgcctcctgagggcagtattggtattgccagcctggtcatgggccagagtttattgcttgaatctttgtagcccacatcgcatgagctcgctctttgtgggcacctccctaaattggtcatcatgcgtagatacaaacaagtaaaataccattttcaagtataataccttacaagtaaaggtaagccttacaagtaaaataccactgttcaactcaatgagtttttgtgtgatttctttctaaaatggagagaagtgaaacctagtatttgttcaccattgcttcttcttcttctttttatagttcagcattttaacacattgagttataattggcatataacattgtataagtttgaggaatacagtgttttggtttggtacattatatattgcaatacaattactacaatagcgttagctgatgcttttatgaagtcatataattactgtttctttttttgtgttgagacctactaaaatctagtctcttagcaactttgaagtttcatatattacagtattgttgactgtagtcactgtgctgtgcattagatctccagagctttttaacctgttggtttcaagtttgtaccctaaaacaaatctttccaacttccccatcccccagcctgtggtaaccaacattctactattttcactgaaggaggaaacagacagagctggactccatcttaggcctgtccatgctgatcacgctcagccacctctccaatggactctgaactctgtgcttagtgtctatggaaaccacaacagaaggataagacctcttctagccaggggaatcttgaagctcatatccaggttactcattgcctaagagaaaacatactctaatcacccctgcctccggacagggcataaattcgttctgtatctattggagtgtaaccacaagcttattgattattataa

SEQ ID NO: 59756 - DNA, 2650 bp, Bovine  19866880465028
  misc_feature (1)..(1): n is a, c, g, or t
ngccttgtgggccatgataaggaatttgaactttacgctgagagtaatataaagcaattaaagattttaaagcaggatttatgtttctaaaagattcctctgtatactatttgagaatggactcgagggaaatgggaatggaaagagtgagatcagttggagtgaaattttagtagcaatagatatgactagggtgacagctgtgatgatggtgactagttgggtttcaaaaatattttgaaactacaattgctgaaatatattgatagatgactgggctttccaggtggcgctagtggtaaagaacccacctgccattgcaggagacttaagagacacaggttcaatgccttgttcaggaagatccccgggaggaggacacagcaaacccactccagcattcttgcctggagaatcccacggacagaggagcctggtgggctacagtccataccatcacacagagtcggacacaactgaggtgacttagcatgcacacattcattttattgtgcttaacttgataacatatatatgtatatatatatatttttttttttttttacaaattgaagttttgtggcaaacttgcatcaagcaaatctatcagtgccatttttcaaaaagtcattttctcaattgtctttctgtcaccttttggtaattctcacaatatttcaaactttttcattattttatttgttatggtggtctgtgatcagtgatctttgatgttgctattataattattttgggacaccatgaaccacacccatataagaaggtgaacttaatattgaaatgatgacataggatttagaatattacataaacttagttgagaaagtagagtttgagagggttgactccaattatgaaagttcatggcatctgatcccatcacttcatgctaaaaagacggggaaacaatggaaatagtgatagactttattttctttggctccaaaatcactgtgtatggtgactgcagctatgaaattaaaagatgcttgctccttggaataaaatctatgcaaacctagacagtgtattaaaaaaatggagacttactttgccaacaaaggtccatctagtcaatgctatggtttttccagtagtcatgtatggatgtaagagttggaccataaagaaagctgagcattgaagaattgattcttttgaactgtggtgctggagaagactcttgaaagtcccttggactgcaaggagatcaaaccagccaatcctaaaggaaatcaaccctgaacagtcattggaaagacttatgctgaagctaaaactccagtactttgaccacctgatttgaagagctgactcacttgaaaagaccctaatgctgggaaaggttgaaggcaggaggagaaggggacaacagaggatgagacagttggatggtatcaccaactcaatggacatgagtttgagcaagctctgggagatagtgaaggacagggaagcctggtgtgcaacaatccatggggttgaaagagtcggacatgactgagcaactgaacaacaagaaccccagctttcagcagccaccactttgatcagccaacagtcatcaacatggaggcaagatcctccagcagtaagaaagattacagctcactaaagagagttagcatttttcagcaataaagtatgttttaaccatgtattatgcacattgtttttttaggtataatgctgttgcacacttaattacagcatagtgtaagcataacttttatatgaattgggaaactaaaacaatctgtgtgacttgctgcattgtgatattccctttgttgtagtggtctgaaattaaacctgcaatatctccacggtatacatgtactctatgattccagaagccttttgaagggcgatgattgttttttacatgatttggaatctctcacagcaacctagcataattcccaataaatgtttggaaggttgagtatgtgggtttaaaattagcagaaaaactcctttaaactgagaatcttctgagtgctgctggaagcgggcagggtaaccattgaaggattaacaagtgcttcctgatccactgttggcacaactgtgggtctgactcttacttacacattcttattcatgacctggatggaaaaagggaagaggctggatgtttttggaattcactaatggttccaatttggaaagtgttgtgagcagctcaggcaacagaaataaaatgcaaacaacctttgagacttgagggatgtaggctgggaataataactttgtgagcatttgaaaaaggcaaggcagtgaatacacctgggggaagagaatccaaacatagagctgttttcggggaaggcgacaccagaacgcagcgatgccaaagtaggcccagggggcacggcggccgcaaattaaattcagggcagccaggcagtctggcaggatgaaagggaagtccaggctgaagctgcctgtgcagaagggcacggagtaacagttcctctgtggccagttctagctgagtagcacctggcccctcaggctgtgttcctgccaccttggttcctagggaagcacgggcaatttggaagaagtgcggagaataacaagagtgaatgagtccaggagcctgaggagaggactcggatgaaag

SEQ ID NO: 59757 - DNA, 1919 bp, Bovine  19866880562008
  misc_feature (1)..(1): n is a, c, g, or t
natcttggctagcccctgtgccttggagtccttatgtaaaattagatcttagagtccccatatgggatctgacatacaacttttaaccaggagctcttatttaaaaaatgaaaaccaatgcttcaaagaaaagataccagctattcatcacatagtccaccatgtcactgagcctgggcttccatacctaaagaaaggttcccggatcctggcgcatgaatattatgattggtgaacactccttggctcacattcttttccctgtaggtctacatcagtgtgctgttgcttcacgattcttcacctatgcggtgggggcaccatcaacccccttaacactctgagtcagaaacctgagttacttttgtaactgtccccactcctatattttgttatcatcaaaactctctccttgatatcttctaacctagtctaccccaatccacctacattctactacttcattttaggctctcactggaattaaacagatggcaatccactcttggtcccatgtgccctctttgttttagccttattcctgtttaattgtttctaccccccgtagttggaatgattgctcccaaataaaaatgttctattattattcccttcctccaagtccttcagtggctctccactaccatcagataacacacaagcaatgatgcccagaatgtcctaccctttctttttctattaataagtgattctgatttgtcctctggaacatgccttgtagatgtttttcatattcttgtgcattcctctaaaataacttttttgtttgtctctctccttgagctcctttgggggatgggagaatgctctgtatatttggtctgtgaatcctcagcacaatgatagtgtctgacacagtctaggttctcaatatgtttggtgagtgaatcaatgatgcaattaatgaatagtcttccctcttcctaattggccacaaaggacataaatggatatgaccatagttttaaggtgttattaaaatcacaagatggagaaaaaactcaattgttctatttttacactgaaattgttagtgtgtttgtcatgggatgttgaaaagaaacctaagaaagatatctttccaatgataattataatggaatttaatttctcctgcatatcaagattaacatttgttatggcttaaaccaagatatttcatcactggcttctccaagacatacactgcatgttagaggctcttctctgctacaaaaatagatatttgggctacttcaaactgcaattccatattcagagtttccactaaaataactcagctattcagatacctttgaccaaagagaagtccagatggagcttaaaagatcaactcttttgccttgggatacagtgtgagagggcttccccggtggctcagaggttaaagcgtctgcccgcaatgcaggagacctgggttcgatccctgggtcgggaagatcccctggagaaggaaatggcaacccactccagtattcttgcctggagaatcccatgtacagaagagcttggcgggctatagtccacagggtcacaaagagtcagacatgactgagtgacttcactttcacagtgtgaggcaggccacacgcggaccagtgagcgaggaaggggccacctttccaactaattaaacagataaagtcagctctgcagacaaaaggagtggcagatgccaaagccagatgacctcaggcctagcgcttccataccccactggtgtttccttactccctccatggtcttcctcacttgttttatggcgagaatctagcacctggacactttcggggctcttcctggttacttgacctctgatgcctgagaaagaaatctgctcctcgagcctcaacttcactgcctggagacagttcctgagacttgcacatgactttcaa

SEQ ID NO: 59758 - DNA, 570 bp, Bovine  19866880568120
  misc_feature (1)..(1): n is a, c, g, or t
ntcaagtggaagtttagtcaccaaatattgagtacgtgcttgttcagttccagacaatgagctaaggatcaacaatgaactctatttaaaaaagaaattaagattgggattcactaaagaagaaactggaggagggcatggcaacccactccagtattcttgcctggagcatcccatggacaaaggagcctggtgggctgtggtccatagggttgcaaagagtcagacacaactgaatgacttagcatgcatgcacacacaaggaagagaaccaaataggtttaatatgatcataagtatcttggaacaacactacctagacagcactgacatttcaccataacaaatttattctgttgctattaagaatagatagctttcgagtcatttcaactaagcaattgtattcaatgtctggaagataatttgtcactaagtagatggcatcaaattgtgatttctcattttccagagtaggcttacaaagacttatttacaaaagaaaaatattcattaaagaatttttatttcataagtaactatataatgcctatatcaaatattattcca

SEQ ID NO: 59759 - DNA, 2201 bp, Bovine  19866880587237
  misc_feature (1)..(1): n is a, c, g, or t
ncctggctttctcctactttcctggacttgttttcaattggcaaagtcctgttgcttttcctaaatggaaaattcacttctctgttaacttttgccctccatttccagaccatgtcttatcttagaaaccccaagtgtccatgatagtattttactaaacaatgagctatgaatgtatgttcaataaatgtatcttgagcaccatctttataccaggtattatatgaggatgatgtagtaccaacaaaaagacaaatagttcccaccccttatagaatttcaacctaataagaaagaatgacattaaattaaattattttataagaaatacattagcttttcttcttcatattttttctgctatcaccagcttttttattttaggagaacagactgaactcagaccatgtatagacatggtgtatgtatatatgtgtttagtcacccagttgtatctgactctttgcaaccctatggactgtagcctgccaggctcctctgcccatggaattttcccagcaagaatactggattggttgccatttcctcctccagggaatcttcctgacccagagatcaaaccagtgtctcccgcatctcttgcattgcaggcagattctttactgctgaacgaccaaggaagcttcaaaaaagttagacatggtgtaggtgctcaataagtgtgcactgatttgtagaaaatattaaattctttagtcctcatcattctgcttacaaaagtattattttaaaaataaatagtctttaaggaaaatcatcctgtgtagttgactgtcaaaatcagtcaacatgtgtattgaaattaggtgtttatgaagaaagggcttttgatagcctttgatcccctggaaaaggtcatagctactcactctagtattcttgcctggaaaattccacggacaaaggagcctggtgggctacagtccatggagtcacaaagaatcagacactactgagcgactaacactttcatttttcactttcctaagagttaaagctcataaatttttgaggaaggggctcttataatctccattttacattttaggaatctgtagataggaactaatttgtccactatggagctaagattatagtctcttgtctccaaatcatcttttgactacactgcctcttgaaaatgattaaaacaaagcatcagaatatgtacaagcatctcagtttccactcataataactatttttttttcatttgaaaagcacagaggcaaattattgcattcatttaatttattgattcatcaacatttctttctttttcttcaccaacatttcttgagcaccttgtatatgccaaagaatgagtttccaaaactaagtgtccaaaatgcaatcttttccttcaaagcattatagttaattgaagttgacaaagatataacttaataaatacagagctatgagataagatatctttgaggtataatgggaaagatcactagattcctggagagtctggtttgaatcttgacatcactactaattagttcttatcctgggacaatcatttttcccctttgaccagcagtttcctcaactgtgaagttggggataaaagtatttatgtgtatttcagttgtaaatattagaggaaatgtgtgtaaagggtctagcacaattccacacaagtaataggtgctcaattagtgctactacaattacaacatgactgaaccagtgcaaattatacatatatatgtatatattttgtttttatgtctctatttgttctttatctctctttcttttcctctcatctggccaggaactccccaagatctagggacggatttcctgatgaggcagtagaaaggctaggggaactgtctgaaaggaggtaaagttttttagagtgtgaagacagattttttgggggttttgttttgttgtgggtttttttttttaacccctgaactgaacttttggatagaaggaattatgccagtgtatgaagctatcaaaaagcatagagcctttcaagaagcacaggatgcttactgtagccaaagtatgaagaatgggctttggaatactgagagctaggctggacacacagtcacgggtcagatcatagaggggcttgtatgtcatgctaagccacctggactttacttaccatacaagcaacttctcacctaaagagaaaaggacaagcctag

SEQ ID NO: 59760 - DNA, 1345 bp, Bovine  19866880606158
  misc_feature (1)..(1): n is a, c, g, or t
ntttctgtaaaggggccctctctcagtgggagtggtatgtggtatccctcagcagagcagatttatttgttttcttaagcttttctttatgtcccagaggtggattctaaaagctcctaaagtattttgattttgaattctcacaaaagtattttttccttcacagtaattcaatataaaaggcaataaaagtgatatattcagaagtattcgggacctgctatcagtgccacacgggaataaactaccttgccacttgctcatcccacaggaggaaagactcacaattcacatacaggaaatactgcatgtgtttgcctccgttttgcttgtattgtctgctctgctgaaaggcagatttttttgcagataaaagccgccctgtcttgctgaactgctcatctgttttgctcaggaagaaaaggctttgttaaaatcaggagcaaagcctgatttgcaaaatatcacctaaaaataacaaatcacagaaaaatgtcaaaatatgctgactatggtccaacttcatgctttgggaaattatcgaacaaaatcagcaatactgttttttttaaagtgaacaggaatgatgtgttttctaagcaccatcctagtcattggtggttagatggttagagagcaaacaagggtgtggaggtggcctcgcccttctaactgactttttggtgtttactcgctaagtcatgtccaactcttggtgacctcatgaactgtagccctccaggctcctcggtccatggaatttcccacgcaagattattggagtgggttgtcattttctccagggtatcttcctgacccaaggatggaacccgagtctcctgcattggaaggtggattctttactctctcagccaccggggaagtcctgtagctgactaagaccaggagacatgtagttagagaagatgatctgtgccacactcaggcaggcctccaaagctgtttccagattcctcatgtgttttggaggtctgtttacacaaggctgctggcttggctgcttttgtgggtggtgaagcactggtgaacatgagaggtagagctttggtttttcaagagttcatagtcctgcaggaagagagatgttaagctagtcattccaacagtgaacagagacacttactgaataggaagttcaatgttagggatggtggttaaaccctttagcggttgtgaaagtttaatcgttggacctagttctgtaaaagaatacccacctaggcagggtcttgggcaccagagctgaaattttagtttaaatattaagatctagcacaagcttacctctcatccactgaatctgtttctaaatctggggaaatgg

SEQ ID NO: 59761 - DNA, 963 bp, Bovine  19866880625668
  misc_feature (1)..(1): n is a, c, g, or t
nggtggtgcattgggagaagttatgtaacccggtgtctctccttatcccttgctctttgcatttcctccctttgtaataaaccagtaagtgtgttttatctgagttctgtgagtcattcttgcaaattatcaaacctgagggcagggacatggaatacccaaatttgtaaccaaagtggacagaagtgtgggtggcctggggatccaggatttacaagtggtgttgaaagtgagataccacttcaggcagagtgggccagagttcttaaacctgtggagtctgatgctaactattctgcattattgtcagaataagattgaactgtggatgcccagttggtatcagaattggaaaataagtgacataaggtcacatttggtcctttcattattccatcttgatattttctaataatgcaatctaataaaaacatgaacagctaactttatgcagttcaaaatcaaaacatgaatttttttccatcatagtaaataaatcaagtatacactattacatgaaataataagacttcttgaaaagaatacaaacagatacacaaattgaacagatacataatactgaacaaatttatttttagaatgtatgtgcatgaaatcagattgtatacaacagaccaaaggttaaccagagaccaacagagtcatataaaaataatttaagggaaactgtattgactttttaaaaataaggcaagtgaaatgtgggctcagaattatgtgggttcaaaattaaaaacttctatgtaacttctggtcactgtttaaagggagaatatgaacatcaaatttttgactattactgtacaaaagagaaaccaaatgctttccaaattgcagtaaaattaattcttctaatataagaccattaagtctacaaagtcactgacaggttatttaaatcctagaatattttctcaatgtaaattttggaacattctgaat

SEQ ID NO: 59762 - DNA, 2506 bp, Bovine  19866880651630
  misc_feature (1)..(1): n is a, c, g, or t
nactgaaggtcatttttctggagactacaatattcacttagatttatttgatattagggctattacaaaccatgacagggagaaatgtttgttacaacacaatttattttatatgagcatcctttatgccaagagtcataatacattttacagtgatacataagctaatggtccttgtacaatgctgatttttcgatgtttatttcacatgggataaaaaatcggttgttttattttctggcaggtaacagctgacttttcaacaactgtgttaaagaaaataatcccagaggttaagaaaagaccagaaagaccacagacctggaacatcatgatttaccctctcccagtgcctcatacggaactgaggaaatacagcattgtggtgaaaacaaaggaggagagaaaagaacaggaaacgatggtattcctcactaacagggaaaatctgtcaaccaaggaatatttgttcctaaaagaagtgaaaaacactcccttgtattttgccagtaagtgtgcagctcctcagctgctttcagggtaccgatgttctaacatttaaatgataaagtaagacaatttgaagttcaccatatcaaatataccaacagctccccaaggaacaagaaagaagaatcaatggctgtactgctgaatgctttaggcctgtggtaatattttcataaattaaatttataaccaactggtttgctttcttttgctctttcattgaagtcaaaacatcgtatctccccatcaagagagatgatactgacagtttcagacagattttttggctttctcttttcttttagccccagtccctcatcttagcatagaaactctgggaaattcttgcttccaagggaatagagggtatgcagggttcttctaaaaccacatagaagtgactcagctggtcaatggtaaagccttttattccccaaggacacaaattcaggagaaagtctcattgggttttagggcaaatgactcaatatctaaagtgcagaaaatccaatgcttcattggtattcacttgaggatttccaaaatctcctgctaatatgtagttcatttattcctcctccttctcctttaaattccatgctctttttttatcactcaaagggaagacatagatctaatcagatttattatttttttaatttataaaatgcctgcttgttaaaatatgtttgaatttttaagaaggtcagatatgatggcaaatgagatttttggcaaagttaatggcaaaaacaaagaggctttgaggagatagagtagtgaaagaatgcttctgaattagatgaggctagagtttgagccttagtcctgaaactagctgtgtaatcctggacaagtcacttctcctttttaactcccagattttcatctataaaatggagttaagagacaccttgtagagtgattgcaatgactaaatgcaatgataatataaagattctagtatgatgcctctcatatagaaagcctggcatacagcaggcaatgaatagatgacaacaggctttgtcattgctgctgccagaggtttaagttatcacccccatacttttgcattcttccttgagaacagatgacggacaataccgaacttggactcacaaagtaggggctagttgttaacaaggtggtcagttctctcattcttccataagactcttcctcccaagatacttactacaaagcctagtgagctggataattaacaaggaagtctatgaccacttcatgggtcatgatcaatatcacccacaatgacaaatatttattgagcttttcaagtatttgttagatagagataaagtactgtgtaggaaccagaggttgtggttttaaataacttttcatattgattaataagatagcttcctggaaacacatataaaaataaataactcttttgaaattgtttcaaatgtgtctgtcataaaattagctgaagcataagtcaggagagctggaaggtcttacagggaaatattagagtaaaagtggagctctgtcaaggcatacaatgccaaggaggtgatctagaaagatgtgatcagggtagagaaaccatagtgatacactgtaccccacgtctagcaaaagaggggcatcggaggaacaagaggagggggagtggttactggaatgcagagacagaaacaactgcgtggagacaaagcctgaaaggatctctgattttcgatattgcaatagagcctgcctgccatgaccttgcaaggagggagaataaatactccttcttcactgtccttcctccctctgatcttctgctagggcatccattggctaaacccaaccagatggcagagagcaagagagttcttgcaatccgtgtggaccagtctcccagggcagagagcaaggtgaaggtcatagagtgggcctgaagggcagatggaggacctgcagtctacccatagactcaggcaagataaaccaagtcttaaagtggaaaattcataaa

SEQ ID NO: 59763 - DNA, 1342 bp, Bovine  19866880690598
  misc_feature (1)..(1): n is a, c, g, or t
ncacagagaactgggttgagctccctgtgtcacacagcaaattcccacttggaacaggttgagttttgatgtactacttaaccaaacacattaataataatgttcatttttatatattataatagagcctttatatttaaacaaattcagacatgttcaggcagtctgggtagagctccctgaaggattgatatgtgtgagcagaacaggaagtccattcactttcctttgtcccatcagcttaggagagggcccaaggggtcaggacctatgtgtctcctgaaatcaacaatgtaaagaaaatctggcttggctggtacaactagccttctccaagtctttttttttttttaataattttatttatctatttatttttggctgtgctgggtcttcactgttgtgcgggctttcttctagttgctgtgagtggggactatatgtagttgccgtgaacgagcttctcattgcagtgacttctcttgttgcggagcacatcttggtctctcaggcttcagtagttacaacccctaggctttagagcatagtttcaatagttgtggcccgtggacttagttggtctgaggcatgtgggattatcctccatcagggattaaccatgtctcctggattggcaggcagatttttttaccactgagccatcagggaagcctacttctccatggcttgccctttttgatcttcttaagtttgggtttgaaatgttaaccctacacatcttgtcatgactttaaatagattattttcctttgcaacaaggtccgttttctctatgatttctatgtttctttgacgccgctgagatgggaggagtcaggaaatataatacaggcattcacttttgtgttttcactgcatttcttttgtatgtttcttccaaggtgaacccgagtgtgatcacagttagctaataaataaaaaggtgtcattctttcttcagatgatgaggtttgaatttcttagaaaatcacgtgttgagcctaacttacagacttcatgtgaccatgcaaaagggaacctttatgaatatgttattaggaatgtgatctctttgtcattcatcctttttgtgcccttgcttgttggaagatgagaattttgtaattggtttaaaccaatggaaatgtcagagaactgagttagatatgcatagggtattgaaaggacagaaatttatgccttaaggtattaccattattagatttataattttaatttttcctcccatctttgataaggtgaattgttgacaggtctctgagaccagaaggaaattagaaggtaaatgtgtgtaggtaacactaaggatcagagagagaaa

SEQ ID NO: 59764 - DNA, 771 bp, Bovine  19866880700118
  misc_feature (1)..(1): n is a, c, g, or t
nagttttatttgacacatactatgccaataaacttcagaatgttgctgagtcccatggaaatggggtctgtgagatacaagtagtcttctgctttcattaggtagtcctctgcaccctattgaatcttggggtcttgcaaatctttattagccaatgtatatccaaagggagagaaaagctacttctactatcactgaaatattacagaagttcaatagtagtagaataatactgccctgatgtggaataaaagaagactcttgtctcaagacaaaaaggagtctgggcccatcccaggcaaaagtgtgaattaagtgaaaaatctctaacactaaaacctcatctttcctttaatggtcactttctctctttcagtgacccgaataagcagatgttcattgccctgaggctttccctggctctgtgaatcttcccagggctgaggttatcaacatagcaaaaccctccttagactgtgctgcttgctccataccttcccaacccattctttagaaacattattgaacaactgactctgtactggggtaaatatgtgggggtatatcattatgctttcctttccaaggcacatttatagttcaaggaggacttctttgccttattccaaaggagagataataatgggggtttcacattcaagacatgaagattagctaaactagtgaaaaggggagactggagacaatttggttgaggaggcttggatcagatgacaacactcagatcatgttgtaaaggcaatcagctat

SEQ ID NO: 59765 - DNA, 875 bp, Bovine  19866880708429
  misc_feature (1)..(1): n is a, c, g, or t
ntatccctataaaattttatgctgttaaatttgtctattatgttgtaatctctgtggttctatactataatccaacagacttgttacattcccacatctgtatcacatgccaatatgatttgcatggtggattctttactgactgagccaccagggaagccattacttgcatggcagcaacagtcttttccaaggcatcattaagactgttgaagagcaaagaccaatgacaaatccttgtggttatgtccctagaaacctctgtccacatgacattgatccattaaaccacactctttggcattgtgcaccaataagttacgagcccatgactaactgactcaaaaattaactgacaattcttgcctggaaaatcccacggatggtggaacctggtaggctacagtccatggggtcgcaaagagtcggacacgactgagcaacttcacttcatttcaagtaaattatattgaaattgtcatagaaaaacaaggaaagcctaagaaactgtgatagaccagaagaaactaaggaaacatgacaaatcaatgcagcaaagtaccttgaataggatcctggacagaagaagaacattagtgggaaaactggtgaaaaccaaataaagcctgagttttatcaacattcatttcttagttttgataaatgtacaacggttctaaaacatgttaacattaggagatgagtgaagggtatgtgaggactttctatactatcttacaactctcctacccatctaaaattatttcaaaattaaaagtttttaaagtttcacaaaaaagtttttggaaacggcaataaatgcttaaaatgtcacttcccagttttactacattttactattaactataaaagtg

SEQ ID NO: 59766 - DNA, 793 bp, Bovine  19866880756748
  misc_feature (1)..(1): n is a, c, g, or t
ncataataacaagcatccagttggaacatagaaatctaggcaatgtagcccatttcactgctcctgtgcacaggaaaccatgagctggtttaggattatttattcaaaggattcaggggatctatgagagacccccaaaggcatgaatgagctggatcttgagaatttactggaacttgggactgagatgctccagagaagtctaggaattctttctctctgttgcttgtctttgctcctcatccttcatccttctgtgtctgtagatctgatttctcaatttcagtattcacacagcagaaaatggccacatccaaagataggctggaaatctggtagaaccaactgcaaagtcccagaggcaggggctggttagcatagcttagtattgaaattcaattttggcccaatcagtcactactaaaaagtggtatatacaaaaatgatttctcctataaagcaatggcaacccactccagtactcttgcctggaaaatcccatggacagtggagactggtaggctgcagttcatggggtcgctaagagttggacacggctgagcaacttcactttcacttttcactttcatgcactggagaaggaaatggcaacccactccagtgttctggcctggagaatcccaggaacgggggagcctggtgggctgccgtctctggggtcgcatagagtcagacacaactgacacaacttagcatagtcaccacacagagttgggtaggtggaactaccaggagatgggaccctccactaagtttggagatattcactaga

SEQ ID NO: 59767 - DNA, 1289 bp, Bovine  19866880763809
  misc_feature (1)..(1): n is a, c, g, or t
nttgaaatgcccaagaggctgacaagcttattgcccatttcagagattaaatagtttcagaaaaattttctcccctggtggttgtaattgtgtctgtgaaataagtgttcattccgcttgagcaacgtggtttgaatgcttccttgtctatgttcccccagtagattgattcttaaaagatctgcccagatttccctgtaccagtgcaaattaacccatgaacttgataccatctcctttgccttgtcccatgctaatgggtaatcagaggcaccatcaagtgcctttatcatgcattatctttgtaactgtttgaagggagggaaaggagttgaaaaaccttccaggttaataatgtggtaataggaaatgaacaaaagctaccatcagtaaccttgagagtcctaagctgccctgctggcatagcactcatgagtaggtaaagtggtcatttagttattggaacttccaaggcatctgggagggcttcaattgctccagataaaatagggtgaggataacatctccagaagagggaacaagcagaaaaacacaggctcatcacagacacatcatctattccctgactttgcccaaggtcaacatcgcatattagtttgctaactgctggcaaggatctgacctttggggtgatttacagcatttttgtttctagtctgggtagataaaaatgactatgtgttaacacaaaccacagcatattcactttacacaggcagtcattatctagaattcctggatttatcattttaaagaagtctcaatatcatacctcagaattgaatgtgaaaacatctaagaactctggagacagttaataatctttatttctgagcattcagtaaattcctgtcactgggctgagcctatgagtgaactatcttatgtaatcccatagtaattttaccatgtgggtattaccctgtggaaactgatactccaagagattgagcaacctgcctgggatcatacagttaagttattagcttaatcaatttgaagccaggtcaggatgagctcatgctggaaaatgattgtttactaaccaagattatatgctcacctgcattcagtctgatttttatgccattctattaaggggattgccttctcaataattttaaaagtattgcttatggctccaaatcctcttagccctattaccttgttcagtacctttctctctccacttttttgggttgtcagtggtgatcagcctccataactgaggagaagtaccgtagtcacagtatacaagcgaaaaagca

SEQ ID NO: 59768 - DNA, 940 bp, Bovine  19866880808415
  misc_feature (1)..(1): n is a, c, g, or t
ncccttggtgggtgcattgttcattctccaaatgcaggacgactgatctatctcattccccaccttctggccgaccatctgacccgagtttgacacaatggcacaaagattccagtccagttgccaaaggctgaaaaccagaaagagaaaccagggcaggtaggggagaaatgtgtaaattaggaagttcctcatattcccaacaagtttttctgggaaaacaaattccagatattgtgcataattgctaagtgtgggaatatagctgaaatatatttatactaatccaaaactagctccataggatatcaagcttggggcatgcctccatttaaaaagtgaatgtggattgctaagaaataactttcatttctctttcttgtgttgctttgaaattcaatgaaaaagcagtcatttgtttcccaccttttatgatgtcttttcattcaaaactgttatttcaaatgaaataaggaaatacagaaagatttgctctctttaataagggtgatggctaaaaaaaagaaatgcaaaaggagtatatataggcatcaatttgaagtttacttatatgtatgaatgattatgtagcagttgacaaaaatataaaaaactcagcaaatgatgagattctgaattttcaaaacccagaactactgaagataaatttcagggtagcaaaaatattatagagaatcttaaaaaattcccttgcatcaccatggttaaacaaccgttgtgctcttgtttattctagttggataggaaaggcttctttttaagaactcaaggaaggcacatacaaagacagtctccaccatccttttctttttttattggagtttaattgctttacaatgctgtgctaatttctgctgtacaatgaagtgaatcagctatacctatacatatatccccttgctactggacttccctcctg

SEQ ID NO: 59769 - DNA, 1698 bp, Bovine  19866880942115
  misc_feature (1)..(1): n is a, c, g, or t
ntccaaagaggctccttagggcattggtaaatttttaaaaatataaggagtacagccacctgctattattgtttttattaaatagatgtgaaaatgtaggttgagagggagctaaacacaaaaatgactaggttttgggagctctgactcagacccacatctgtggtgcctgcagagcctgtacttttattcactaccccattctgcctcctggtggcttgctctgagggtgaggaaagaactttctgacctacctttctccaggtattttccttgcttcccttgctcccaaatccctctgtactggcctgggacctgttactgcttttctctggtaggatctgagatcccacctccttggcatcattgttagccaggaagtgctccaggacaaattttggctgctgggttggaggaatggatatttgcattttaaaattatgctgaggaattgcccaaagttagcaatttgaaactgtgtgctttgtgttgaaactgaaagtgttagtctctcagtcgtgtctgactctgcaaccccatagactgtagcctgtcagtctcctctgtccatgggattctccaggcaagactactggagtgagttgccattcctttctccaggggatgtttccgatcagaccccggtctcttgcgctgcaggcagattctttactgtctgagctgccagtgctttgtggacccacgcaaatcataacagaaagcagatgcttgtctctgaccgacgccttgtcagccacatgccttcatctgaccctcttgactagaatctcctgctgctgttttataaactaggctctacacctgagtttctctgtgtagcaattccaagaacattcaatcttcaaacacatttcatcgttaacagaggcagccatgagaaacactttgtagtcgctgtgaaaggttgttgctttggaaaaattgaatagacagtctcagctttttaaccagggtttctaggatcagtttatcaggaataagatttctttttcttcttcccagagggcccatggatgatgaggaatttaagcaataatagcaaatctatcaaatttacctttaaacgcttctttcacaagagcaccccagagggccctacttagataatcagataccagtagcctaccctttcctccatccaatacaggcccacctctggtcagaaccaggaagaaggggcttcagcttctccagagatcccagtgtttaaacctgagggattggagccccaatgtgggtaccttttgtagggggcgccaagaggcagtccctcagctgatggtctctggctctcaaaggcaaaacaagaactgttcagagccgtcgttcaaaagagaaaaatggctacttcccatgtatttagtacccaaactcacacatgtgagtaaacaccttacctatctgagaagtctatcaaagccaggattattttcttagaacaataagtaaataagtgtcccttacttgatagaataatagtctcttggatgcctcagttccccatctttaaaatggggatcataagaacacccacctatattagttttcaagggctgctataacaaataccacaagcaggggcttaaacaacaggaatttattgagtcacaatgctggagactagaaatcttagatcaaggtgttggtaaggtggttccttctgaggtattttgatgt

SEQ ID NO: 59770 - DNA, 1478 bp, Bovine  19866880971707
  misc_feature (1)..(1): n is a, c, g, or t
nacctggggtctgaactcagtccaaccaaggaagacagtctgatttgcttctgtgttcttgctgcttctcagaaaaaatgtgcccccacatgcctcacagacagagatcagtggagtttattccaaataaaactgtcacttttctgtcatatttacagcacacagaggttgagattaaaggtaacgcatcagagtataagtaacataagttcctgtaggcacagatttcaagaacacaagtggaaagacaaaacaaacatgtttttacccgagttcatggcacctaaaaataaagcttcttgaacaagaaaagaacacacactagcaggagacatcactctggagggtgaagactggctccacttgccatacacaaaaatcagatttttgagcttcacgccttcatacaccagtgagcaaagtatacgttttcctcctccctgtgggagagcctgggtcactaggtatctttccaacctcatctcctaggactcctaaaacaattctccctccctggctctggccatgcctgtttctcacatttccagaggctctgcacaagcaatgccattctctccagtcatccaagtccaacctgcttttgagggtctacctcaaatccagtctccttcccatctaaaacaagcccacatcctgttgcctccttggagattcctgcccacccagcaagatctgatttgtcgcttgtttgagcttcctggcatataatgagtacactgctcatctgaagctctttgctgtaagggttgacttggttctgcatgtcattctctctgagaccatcgttaactggcagaaaggcctggctagcactgacacttctaggtacttgccacagagcccagcaaatagtgactgatgggttggcatgtttggggaactggggtctgatatggtttgttgcttacaatgtgcgtaccaaaacacctatttagaggagtatggaaagacattgttttggtcactccgaaagcagacactggaccacaggacttcaaaaaacatttacactggatgggaattccctgatgatccagtgatcagggctctgcacttctactgcaggggacataggttcaatccctagtcagggaactaagagtcttcatgacacgcagagtagtcaaaaacaaacaaataaacaaaaatcattaacactggatataaggttgaggaggataaaataatcaccacttcactttcagcttccacagtgattttatctcctttaacccaaaacttttagacaatagtcacagagttggcccacaaactaaaaaggtagcagatgaaaatcctagtgagcagaagggcttgccctctcagtcaaataatgctacctctgagaaaggcagtggagtgtaaccaataagagcgctagttcccaaggcagtctgattgttactcccagctcttctgcccacaagctgtgcagccttagaaaacttgtggaacaa

SEQ ID NO: 59771 - DNA, 969 bp, Bovine  19866880975872
  misc_feature (1)..(1): n is a, c, g, or t
ntaagtatataaaatgctaaaggtaaccaatgctattggggaaagaaaggaaaagtaaaccaaagtaaagcgaactgggaatgctgcttatgaggggcagggatttcaattttaaatagcatcatggtagactcactgagtgggtgacaggagcaaaagcttgaaggagttgattatgcaatatatgaagagaaaggtgatccagcaaagagctgagatgtaggcctgcgggagggagcttgcccagtgtgtttggttcatagaagtcagagaagaaacaagaggtcagatcaccctggaaggcattataagtcattgtaaaaacttgtacttttactctaagagaaacaggggactaagcagaagagtgacatgatctgaactctgccaaagcacttattagttttcctctatgtagaatttcatcaaccatctatgaagcaggttaaaagacactgctactatttttttttcttttatgttcttcctgaagttatttcaaagtatttccactaagtcaattcactttctttgttgtcagtgaagaaaatgttatctagaaaatgattagaagataaattgggcagtaatcagttctccgttccttgggttttttcttttctgccttttgtggtggtggttgtgtttgctgcctacggtccaagagtacaaccttgggtcctaggaactgttttttcactgggcaactgacatctaacaactgtgagcgaagtcttggaaactgctttgtcactgaagtgaaactaaaatggaaacctgtatttgaagaatggctctgtcactgacttattaaaaaaccagtgcccggctacaaaatctctggaaaaggtaatagtcttgccaacctttgggtaagacagagcaaggggtggtctgcctgagtagaaccgtggaaacttttctatcaaaagccaattctataacttgcctcacttggtattactgtga

SEQ ID NO: 59772 - DNA, 1967 bp, Bovine  19866881084559
  misc_feature (1)..(1): n is a, c, g, or t
naaaacagagtctcaaatagaataaagtgccttgatagcatgtgactgagttggaatttgaacaagaagttgatctgaatccaaatctttgtaccacaccatgcatataacattaataatggtgataacagctaccatttacttcattctcaattctgtgcccattatttcacttcattcttacaagaatccttagcaatagtacaaaggaccagcccctgccactgcacatggtgccatcaactcaatcttctgtccctggtggcatcagtgaaggacaggccgatcaaagatcacagtcctcacccttgttcgaaatgattatgaatttagctcccacaatagcacactgggtattcatttgctaaaaaatagtaagtgctgaaagaatcatacaaaaaatgtaattcacctacccaaactggaaaggactccgtagttctaaaatgcagagacatttgcaagcagcagtctccagtatttctttattagcaacatatttttaagaacatagtcttcgtttactcacaccaaaaacttaaacgatgaaataaatatagaaaggacttctggtattgttcccaaatttctactttggcgttttgactcagaacataacaagtggtagaggggagaaaagaggagacagaggcaagaaaaggaaagagaaagagaaatgggtgggagagaagggatggtaaaaatgacagatgacaggagaatgggcagaagtgaaggggtgaggagaggcaagagaggaaaggaaacagaaaaaaaagatgatttctgaccatctgttttcgtaaaagcttttatggtaggaaagcatttagaactcttctggccaaataacgtatatccaccatgtttctgaaatcacatctatgtttggaaactttcaacctaattcttcctatttcatttttggattctgaggcgacacaggtgaggagacccaggtgaggcacctgagtgcctggtacaggatggctggtacaggaatcacagttgtgctcttgctctaaaaagcagggagactgactgaggctgtggcccccacgggccccacttctgccttggacagctggcagacattaccccaggcaccacagctgaaaccagcactttcatatgccgcactcacttgataatggccactacctgtctctaacaagccatcaagatcactagtcatctcttccccacaaaggctcctcctgtatctcctgtaacaacatcccaccaaagctcccaaggcctgctgaagagagtaggttgattggtaacaactgtgtcttccagcggacgatttcacccatgaggatcacagatggccagatgactcgaggtaattttctcaccaaagaacattgggctcaggcatgcaggccatattcagcagagaatccttcccagtcaaatccacagaggagatttttcacagctgtaagcttttacttgagttgttatcagagtcttccatcactgactgtttaagaaaatattaaaagactgcacacagacttccgcattactattttcagttccccagactggctgtgcacattgacaagcagtctaagggaagcatgccagtgatgcctgctatctgcttcctcaggtatgtaaaaactcttccctaggggccagttggtctcctcagccagcaacagtgacaagaggaaaggaactgagtgctatcaaacctctgctgactttggggagggggtgggaatgtcacataattgggctatagaatgaattattcattccagtcattgtattcagcgcttagaaaattctgaacatactttttgcctgagggaaaagcacaatatgatgagtaaaaccattttggagtgaaattcacttacttttaaatcctggctttgccataaacacattaacttcaagcaagttacttggcttctctaaaccttggattcctcgtcattgaaacaggaata

SEQ ID NO: 59773 - DNA, 1162 bp, Bovine  19866881095930
  misc_feature (1)..(1): n is a, c, g, or t
ngcagaggaaaatccatggaagcaagtccctttctatgatttcaacacagtggttcttccataattgcaagaatgattccagtacttaaaaaaaaaaaaaattagcttgaaaatacagataatacctctgacttaaaatttaaaaaaaaataaaataaaacttttccctgaaaaataggaatttgtgccatttaaaacaatttttttctccaaacttttcttgcaacactgttgataaagctaaaaactggaaatgacctaaatatccaaaaatcaagttttagcatatggttagtatagagttttaggcaatattaataatcatagtgtagttttaaacattttgacatggcaagatgttcataataaacttgaaagttcaaacagatttaaaaaaaagattaaatatggtataatctcattttatattgtctatgtatatatcattatgaaattatatacttacgttatataaaatataaatacaatatgaatatgtatttgtgtccattaacctcttactgtctccctctaaccctgaaatccatacaagacaggacaaaaagaaggaaaggaacatataaagacggaactccttcagcaagcagaaagagagaaaaaaatgagaaatacacgtaatgtgattcttatcttctcacacaaggtggttatatattgtttctaatcacttcagatgatttgagcacatgaattttggaatcaaaaaggtttcgaggcattctaccttttccatttccacttcccatgcatcctaccctctacattaaccttttccttccttttccattactgctgaagatatttctgcttctctcgtgtcatcaattcagcgaacacaagtagaaatgctgtcaaggcacctggcacctgctgtgtgctcagtgtacagtctcttcctccctcttctgactgtcaattgtgcctaaaaacatgttaatgatcttcaagaataatgaatgtaggccattttctttgaaagctcctaaatcggcagttaattgtgtggcagagtgaggtttggggccttcccaaggaccaaacatttgaaaatgagaacaagatgctgaataaacccaaaccacagccagtttgtagtcattatcctctggaccggctccccagttcggtaaacagaagggtg

SEQ ID NO: 59774 - DNA, 1312 bp, Bovine  19866881104505
  misc_feature (1)..(1): n is a, c, g, or t
nctgactgtggagcacaggcacataattctttatactatagaatcttaacataatactgactccccttagaggagatgcagtatgctttagtttttcgctttttttccccccacaaatactgcacagcctggcaaatgggaagtcatgacattgcctgctaggtgaggccttaggcctcaggggtctcagcctcctccctatgcgtgaacacaacacacacacacaccacagacatcctgcttaagacacaaaggcaccctttgggaaggtttaagaattcataaaagaaaaacatctcttgtcatttcattgtgatataaaaagctaaggttagagtttcttattttcatttgaggttatttaaagggagaatctgtgaatatgataattttagttgagtgtgtatgttgtgtttcttacttttatttaagcagtgtagccttccaagaggtgtaactaaaataaggtacaatcccacaggatacgacgctgcttgttttctctcatgtgtgtgtcctctccctctcctttctttctgccttctgcttgatgtttctgcttttgcaactaaacacaggaaaaaggagttagaaaacaccctttaggctggaacaaaagggaaggagagctagttgcctctttttgttgaaacccctagggattctggtcctgactcagccctcagctccagcctgtgagcctagctgctatgggagcagttttaaagggaagctatgttgtcatatcaaaattaactataaacttgacttacattcctcaagaatacagttctttacctagacggattgctgtccacaacccagacatagagtttcataatcattttattttcctttctcctttgctcccgtccaatcatcgggtcatactgaacctggccgccgactgttctcccacattttcccctacttctctttctgtacttggccgctcatcacctgaccctggattatgtctgagggcttttaatttgacctcctgtcttgagatctttcccttcatgttcctttgcagcataacaaagctttcaaaatctggaggcttaaagtggaaaccaccatttagctgctcatgtttctgtaaggtgggcagagctcagcggcaatggcttgtttttgctccacatgtgttggttcaggaacttgattaaggctgcaggaatcaagctggcaatactaacacgtctggcaacactgttggggtcgttgagctagctggggctacacgggcctatctcttctcatgctttttcatcccccaaggcctctatctacctgcctctccctccag

SEQ ID NO: 59775 - DNA, 1384 bp, Bovine  19866881116749
  misc_feature (1)..(1): n is a, c, g, or t
natcttgtggattctcctgactccgatcaaaccttgttaaatttagtcattttttttgtttccaaggtgaaaatcacctggacaaagtgcatagggccaaactcctagaaatcttctcaatagcaatggcccagaatagtcagttctcttggattctttccttcttcttcttcttctttttttttttttttttgtaaaaattagctcttttcctttccttctgttgcctattgaaacaactgactcttggtagcaggaatgaaccaacagatcttctggatgttttaagcaaaagccttgaatgtttgctactaggattacaacaaagcaaagagattattttgcaaagctcaaataaagttgaaattaacattgctggacattttcatttattctgtccatcttgaagctttccttgaatctcccagtggtaattaatcattttctccttagtacttctctctcatacaacttatcagaatctctcatcaaagatctatgtaattacaatttataatataggctttgggccatattttgtttatctccatatgctactacctgctttagagccaaatacatagcacatgttgagttaatacatagctataaggaaatgggacatttagacctcacttatccaacaaatatttattgagaatttactcaatactaagtattgttctaggcattgaatatatcatgataagtaagataagatagtcaaagtttctgccttcctggaggtttcactctagtgggagagatgacagtatgcagagaatatataatataatgtcaagcagtgaagtgttaacaaagaaatacagaatgacatgacatggtaataaagaggatggagtgggagggggtggggcacaatttttaagagaacttggaggagatgacagatatttgaagtaataacactccaagcagagtgagcaacatgggcaaagactctgcaacaagaacaaatcaggcttagcccaggaactgcaaggccaatgtgacaagcaagaaatggttggagcaaaggttggaattggcaagaccagatcacatggggtcttgcaggcctgcaaaagcttatattctgtgtgatgagaagccagtgaaaagttgggcaagagggagatatgatcagatgtgcattttaaaaagatcgtcctgggtgtgatatccaggatggattacatgtggtacaagtgaatgcaatgaaatagacttggagaaaatatctccagtagatgtagattagagtataggtgatgagggtactaagctgtggttagattcctcctacagtttgcaattcaggctatcaggatttattttgacatattaaaactctcccatgagtaggctcaggaaactcaaacag

SEQ ID NO: 59776 - DNA, 1074 bp, Bovine  19866881171828
  misc_feature (1)..(1): n is a, c, g, or t
ntgcaataaaataaacagtggtttcaatcaagagggttcttaacggaccagtaagagttatcagtcttactaaaccttgagtacacttccttttaatattctatatgatgaaatgggggaaataccaaaagtacttccatataggtaaatataattgttacaaggaaaagcatgtgtccggctatttgggtcaagagctcagctggttccttttttccttaaacacaagttttatttgaaaggaaaactaacaaagtatgattatttagacttggtcatttggcaaacccttttctgaaaaatgaaggaagtgatcctaccacttcaagaaaagcaactaacagtacttgatgcctgtgataaaagtttagtttttcaaatgaaaattaagactttataaaacttatatctgccaacatgagcttgacagctttccagtacttaaaaaatttttctgatgagatatttgaagtgatattaaggaatgtaatatttggctactgtgtaataaaatgtgtcgttatttgaaagatcttcattaactcagtgaaccaatactttcatatgaccaatgcaagatgtgacaaaatcatgaatgggtaaaagtttcactcagagtacaagctagacagtgaattttaatgtaacagaatatgaaaagtctgttgattccctttcagatttcacactgcaactaatttttaagaaatttggggttttggtatggtaccaaagcaaaatgtccttaattatcagaaaagggtattcaaatattcttcccttttccaatatccacgtaaaattgcattttcttcatatacttcaaccagcacaacatgttgcaacaagctgaatgcagaagatatgagaatccagctgtcttctattaaggcagattagagagatttgcaaaaagaaaagttttaatgctaacattctcactaatttttttggaaaatataatcacttcttatctgtgtgcatgctcagtcactcagtcatgcccagctctttgtgaccctatggactgtagcctgccaggctcctctatccagggattttcccaccaagaat

SEQ ID NO: 59777 - DNA, 1616 bp, Bovine  19866881219611
  misc_feature (1)..(1): n is a, c, g, or t
ntctgactttttgcaatcccatggactgcagcccaccaggctcctctgtccttgggattccccaggcaagaatactgtggtaggttgccatgccatactccacatcttcccaacccagggattgaactcacatttcttgcgtctcttgcatctctgtctcttgcattgacaggcaaattctttaccactgtatgacctaggaagccctgcacacatatatgtaattataataccaattattttttggtaaaaagtaacaaaattatttctcctctagccttaagactcaatgttgatctgttgaaagtaaatgttgacatttatacttcttcctctttggaaccatgcaaaatactcaaccaaataaaagcactcactcttttttcattattgactatggtgactatgccaggatgatgtgtttcataatcaataaattagtattcttcagtatccttgtaacaaatgttaagatgaattggtatggtatatatgtcagggtccagaaaagaaaacaaaaaacacaggaggaatttttaacatgaaattacttcagggaattggttttccagatggtagaagactgaatgggccgacagggtcaccgcggtaaccctgatatacaacagcaggagcagctgctatccaggaaagaggttggaattaccagagctcagaagctcagagagagccccacagagatagggctcagatccccgaggaggggatgaccccactactgctaacattctgagaacatgcccaagggctggtttcgagagcgccaagtgagactgcagaccagaactaactgctgttgtcagacaaaggccattgctggagtgatactgagacgaacaacaggaaaacagggaggagaaaggcccttcctccatccttgcagtctctctgctgtccctatttgcagaccctaacccaggtggtgctagtagtaaagaatctgcctgccaacgcagggggcataagagacagagttggatccctgggttgggacgatcccctggaggagggcatggcaatctactccaatgttcttgcctgaagaatctcatggacaaaggagcctggcggactacagtccatggggtcgcaaagagtcggacacaactgaagcgacttagcctgcacgcaacaggaagccagctggcaaaggagaaatgtatagaatcccagcccgccccacagagtaatgtgtgaaagaaggcatttgcagctgagaggtgacacctgcccaaccatctcagcacatggctgagtcagccttgagtttgtcacctagatgaaagaggctgcctctcccaccagaaggtgggcactgtgctttgctttttccccattcttgcatcctaatgcctgaaacagagtctagcacttagtaggtactcaataaacatttgtgaaagaagaaatttaaacagatctctctaattgcaaagcccatgacattaactcttcttactatcactacaacatcatccactgtctttaaggaagaataattcaaagagaatatctttcccactttataaaattgcctacaaggggttttagcagcctattttattgtctctaatgctgctagagtgaatcagaaa

SEQ ID NO: 59778 - DNA, 1675 bp, Bovine  19866881235445
  misc_feature (1)..(1): n is a, c, g, or t
ntctgcttttttttgctcagtgccacttactcattcccgctcccttctttctataaaatctcttgccttttatagctctttgaagctcctttctgtctgctagttggaatgctgcctgattcatgaatcactgaataaagccagtaagatcttaaaatttactcagttgaattttgcttttttaacagcactatgctattttttttaaagcacatgagatgtttttaagattgttgtaatataaattctggaaaagtttctagaacaagtcacaaaaggatgatttctgagtactcataaaagaaagtttgacaattagaagccatcaagggttcacaagtgaaattatgacagattcctttcatttttctctgtgattggcataacaatataaacttcatgaaagatgaaatttttaaatctatttttcattgctgagttctcatattttcattgcttatagcgcagaaggtattcagtaaatatctgttgaaccactattagaggaataaggtggatgcagttagtttaatttatcaagacaaagggaacagttcttttgctgtctatgaagcagtcattgctgggtaataagacagttgggtgagttgctaactagttaaataaccgcgagaagcagctaatgaaaagagctttcaacttgcagttggatttagagttagcttcaattcttggctctttcacttaatctgtgtgatccttggcagtcatttcacttctctgaatcactggtttctcatcttcagattgtgcataataatttcgacattatgaggtggttgtgggtgtcagatatggtgatttaaaaggctagtgtgaacacagtatgaaaggaggtctcaagtggaattttaaagggtgagtcttcacttcaatccagctaatgttcgtatctctcatatccatagggatatattgattggatttgtggatgacctaagctgaactaaaaatcagaattcagagagacttcaatagactgaaaaagatagtttaatcctttaaggtgaaatcaggagaaatatgatttacacttgatttaaagaaatgttgcagtggtcgtggacagagtttgtggcttacagtgtcatgccacatgtgctgtggctgtcagaagttagttttagaaatagcataagacaccggggttgcacactggaactcctgggaagttaagcatgctgatgactgagccattggcacggtttctcatttaattggtgtgggactcagtgttagcactgagatttttaacttcccttccattacccccggtgcttctaatgtgcagctaagtttgggaaccacagatctaagatgagggagtctctccatatgttcactccatgtttacagtctttaaatattacttgcatggaaaaatgcctgctgcaggaagttcagaatgtcctacttaggcttgcagtgtctttagggaagatgtcaggacaatgggtggactggcagttctaacattctgaggggaagttgaaggaaacaaagccctttgtgtggagaagagttggaagaggtaacagtcttggacattgcttgcttgtcctgtcataggaagctaagcttagttcctctctctggcatttcagagggtagaaagagatcttccgaatggaagcctcaggaaaggactaggaaa

SEQ ID NO: 59779 - DNA, 1403 bp, Bovine  19866881252885
  misc_feature (1)..(1): n is a, c, g, or t
naatccctcctctgtcattttcctgctgtataattctgaccagttactgaacaaatctgagttttggctttccaatcaaaaaagtaagttaaaaatatcaacttcataagctattataaaactaggtaggatgttacttttcaagcacttagagctgacactggataaacaatggttagcatcagtaccaggatgtgtatgagaatagccatttttaagacctatatatttcagcagaccttgggggaaatatctcatcaaagggttagtgacaaagattacgattccaagtcatcctaaccatgggattgtaaagaaagacataacttcccaaatatttcaaactttcctaaacaacaacaatgttcctgaaataggcatgcacaaaagatgtcatataattcaggggtcacaggccttcccacctctgatgcttactcaactgtgaaagctatttagtaccaagcatcttctggggcttgctcatctaaaaggagtatttcacacaaacacacacacacaaacacacacacacatacacacactttagtagacagtcctcttggggatattttttcctgtgaaaatcaagtagaatagaattagcttaaagatctctacagagaatcagagaagacaccactcaaaattgattctacatcctattgtatagcacatggaaacaaacacaagtgtagtacctatgaacaaaaaataaaataaaacagtctatcaaagatgactagatgatacattacagactgcaactttaccactaatttcaaaaccctcacacattaaccagtcctataaatgaatgaatgtatttgttaggcacatatcaaggaacgaagagtctactgacaacaaagctattttggagaaagtctgcctcccaacagaagtaaatgcatttaaaatagctgttgaccaggctcctgccttttagtaaaccctctgaattttgtttctagaagtgcatctataaatggcctatagctgtctcgttttattagctctttacaatgcacgatataaatttctcaaataaagcacctgtaatgaaattccgctgtgagcctgtttgtggtaggcagcactgcttcccagacctgtacagcggattccagaagactacagacaagccaccgccaaaggcccgaccccacaagagcccactccgcacacagggctccaatggaaccagagcagaaaactcccggggtgtgcaaccaagtcacagattcagggctacaactctacaatgggtgtagagcctttcaagagcactgctggtgggggcccctttgccacaacacaattagggacatgtgtgacacctggaaccaattcagatgtgcccaggtacacaggtagagtcccatggacagaaatctacacca

SEQ ID NO: 59780 - DNA, 1562 bp, Bovine  19866881287749
  misc_feature (1)..(1): n is a, c, g, or t
nggggagttgaatggtgaataaatattctccttctgatgagaataatttctcgacccgagttctcccactgtcccacagaggaaatctaagtaacaattttgacccattcttaagactgcactgcaagcttcaaaagacgaccaaggccaggaaaattccattaatggttgtctgtctcctctgagtgacaatcagatagtcccaagtcaaacaccttgggctttgtttcttaaacaaaaggataagttaaactattttttaattaatctcaaaatagattcttggctggatgttaggaagactgttctcaaaaaaataaagtgttatttgtagtctttttggaaaactagttaggttttatgtgtagtatggataaccacagatggcagtaaagtgtataatgtatgcaaaggggaatggttccaggttgatatttttttcccctgaaaaactttctaatattcccacatcaataatggaccattattcagaaattgaaggtgctaagtccaaacaccacaggacttgtagttatgctttgaatgtgttcttgcaattatccagctgcaagttaaatgcagtgtagactatggcttcccaagctgaattctgactgttatttctagccagctgacctgtgctcttgtttttgactgcaacatgagtttgatccacaaaaatatcctggatgaatgagatgacattgccaccaaactctgagttctaactctcaagctggaagtctaacctctaatttactttagtcccagaatgattagacctattatttaatgaagcctctcttggttgcctgtctatcaaattatttgtattcatggagacaaagtgataagccaaaatgctaattatccatttttctaaaataaaatatccatgctaagaataacaatcagttattaacatagcactttcatctgacataatatatcttaacaagttctttatatccagggattttcattactggacatcttatctaataaaaaggaagatgcttactttctatctcttcaggctttgttagcattgggcataagcttttgaatttgaaatactgttggaaataatgagataaattggggaaatctagtctttaaaaacagatttttttcctttttatttttttgttgaaggataattgctttgtacaattttgttttctgtcaaacctcaacatgaataagccattggtatccaaccagtccattctgaaggagatcagccctgggatttctttggaaagaatgatgctgaagctgaaactccaatactttggccacctcatgtgaagagttgattcattggcaaagactctgatgctgggagggattggggtcaggaggagaaggggacaacagaggatgagatggctggatggcatcactgactcgatggacgtgagtctgagtgaactccgggagttggtgatggacagggaggcctggcgtgctgtgattcaagggggcacaaagagtcggacacgattgagtgactgaactgaactgaactgatacatatatccccatccttttgaaccttc

SEQ ID NO: 59781 - DNA, 644 bp, Bovine  19866881325412
  misc_feature (1)..(1): n is a, c, g, or t
nctctgattttgatgacaaactgtcaaatggaatgcattttgatccctccaagggaattgttttgtaggaaggccatgctaggtttccatagccattgcatccttcagctgggaaggtaacctttagtgagagctgtggcctcttaatcttttagtggtaattttttcttgtgaaaaggggacctgatagaatcttggctcactaattcatgccatgtgggccaaattgaagcattaaaatttcatagatataatatcatttataaatcatgtcataaaagcattcatttcctgtagaccttgaaaaataggcatgcctttctccagctgttgcttaagagttcattacatacatactagtaattgtgaaaaataaagctatggtaaaggaggggaatattttttatcaacaccctaagatcatcaaggtgctgtcctttccctgtaaacacactgctcacatcagtggtgatttaacctgcatgcctgcctccacacaatgatggagccctacagagttgtattcataggccaagcaattccaggagggcagctttctcatttttttatgacagtattctgttcagatggagaaagagactgtttattactttccccaagtttctcttctataaaatttcaat

SEQ ID NO: 59782 - DNA, 1612 bp, Bovine  19866881480922
  misc_feature (1)..(1): n is a, c, g, or t
natcgtctttaaaggaaaaaactgtttttaatattatgttctgtctctcaatccaagaatttttctactttgcctattttcttttgggccaggttttcctgaggttagtacccatttatcctgagttagaaatgattaggcatctttgtttttggagtccaggtagggtaacagtacctttttgggcaacgaggcatgggtctgtgccttgtggctggctctctggccaacacagcttctgagttttgtttctgccaccactcccaccttgctgtactgcatttgttgagcagtttgcctgttttgtgtcccaacaaagggggacattcagggagttcccaaattctcaaaggagaggcttgaaacctctttccactctaggaactactaagggttgcaaacctaagggatgtgagccaatttaatccctaaaatcgatcacacagtagcacaaaaaactttcaaaatggtcaaagctatgttaactgtaaattggctcttgacaagagcatttgccagtgagtgaacaaccgcaataagggcatttgccacctgcctctgtggaggtcgaaccctgtgctgctacagctgctcaccttcaacacccccttagggaatttagagtgaagtgaagcactctgctccagggattctgttggaacaggtctttaggtagttaaatattttcagaaagtgatttcatgatcccaatccttgcatctcttcatatctagaaaagcactaaatcacttcttactgacattagcttctcgtggctagcagaaaaccttttgtaagtaaggacttgactgcactgaactcctccttcaccaaaaccttatatattgaccttccccaactgcctctttggagcagtctctcagagctatctgaggtgctgtctccctggctgcagtcctcattttgccccaaataaaacttaactcacaactttcaagttgtacatcttattagtcgacagctaaaacagcgaagctgcacttaaaacccactgggctgcacttaaaacccacaccggatgacaactccatctccaacatcagacagtgaggaataacacattgctgatttctttttctctctgcaagattgaatgggaatggatggagcacacaaacaaagactcgccatgcatggctggtacttaccaatccgtttctcactttgacagtgtcttctgaaagtgacttttgtatctcctgttttctaaatgctttagaagtaactccttccctttacatcctttgaacctaaagcagtaacatcttgaaacattgatctatttgctgctagctttcattaatttcatccattcctgaaggcagagccacatttggtgtccacttagtgaagacctacttagggcagctcaggtccctttatcaggcccgaattagctttgcagttttaataagaactatagctttctcaattattatttaattcaataatgtgcccacatttgctaatgtatttctaaagtgggaggcaagctgcaactgcctatctgtccataggtaagcagaatgtgtcacacaggctgtgccacctctccgggagagttaacattcatttgcatctgtacaggcca

SEQ ID NO: 59783 - DNA, 898 bp, Bovine  19866881506170
  misc_feature (1)..(1): n is a, c, g, or t
nccttggggatagagacactctgtggaagagaaagaatgacagactctcctgtggctcagtggaaatcctgtgtcagcaatcttagaacacactcggggccaagcactgcctatgaaaatgtactttgcgaaaaagagcattgcaatttcccagcatttgtttatacattgtgggagcgtctgaattctctctgagggaagagaggggaaggaaataacagagagaaagaaacaaagatacagataaataaagataaaaacatttaaacagttttgccctgaagtgggaaacctgtttgcctcaaagagggaaaaatgaatgaaacgggcaaatgaaacctgaaaggaaaataaactccagccactcgccaccctcccgtctctcagttcttagaccgttctctcctaatgtgatgagcaattgaaatttttgcaacacaagctctgtaacggaccaaagaaacatcttttaggaaaaaaaaaaaaactttggggaagcaaaaattcccattaagtgactgttgaggatgtcaagcactcacgtggcaggctcaagtgagggacacaggcgtgcgagcactgccgcacccaccctgtgcagcccagacacggacagggctcaccttacaagaagcacgggctcgggtctgttccctccacgtatacatttactgagcatattccacagtgctgtaaaacgaaaacatgagtaccccacgatcgtgtttcagcttaaaagtaactttactgaaacattgactatatttactgacaaaacaggtataaacaacagcattccataagaagggtacttacaatgagagaagggtcatgattagagaagactttttggaagaaacagtacttagagaggtagatgttgaagcgggatagagag

SEQ ID NO: 59784 - DNA, 863 bp, Bovine  19866881593299
  misc_feature (1)..(1): n is a, c, g, or t
ntttggagtcaaagaaacctaagaacagatagagaaagcccatatacaagacttgtgtccaacctcaagatccagttataaggaaaagctattattttaatcttctttcagcagtacagaggagaagtcttgcttgttatcactggagattctaatttatctgcataaaatgaattctaaatgattattgatagtggtaactcttatgcaaatctatttcagatcagtagttgaatgttaattttgcaccataatgaaaagcaaatcctctaagttctcactctcattatttaatacaaattgatgtcacaacatgaccagtaaacaaaaaaatatctttctctatttcttctatttgttagtttcacacatttaattatagacgtgggagttgtcagttttttgtttcttttattaaccaattttttgtttcttttattaaccaacaactgtagacaatttcactactttctggtcagtatgctatattaaaaaatgtgattttttttttttttttttgtataggtggattgaccagtaaaaggataaaaaatttggataataagagtttgacactcatgtactcagggaagtccttacaggctatatatcagcttcttgtttgactgtatgacattaagtgaggtttggggaaaaaataagattgttgactttgtacactccaatgactgtccccccctaacccacttcctggagtaagtagcctcttctaagatgtgaagatgtatgtagactggacagtatttcagttgtgctgtatgtctccagaatagcattttaagcatgttgatactgtgtggcggaaagagtattggaattaggactagaggaagagttacagc

SEQ ID NO: 59785 - DNA, 1017 bp, Bovine  19866881618907
  misc_feature (1)..(1): n is a, c, g, or t
ntataagttgatattgactccaaattaacattaacctgttttgaatatttggggttaaataaaatatattattaaataaattctgcctacttctttttgctttctttttaatgtggttcttacaaataaaaaattacctaagtggcctgcattatattcctactggatagtactgctgcagaatattaaataaaggtattattgtcattactcaaactcatcacaaaactggaatcagacttggagtccgtaacacggtctttttcctgtccacaccctagagaacagctcttctttcttggttacccttttccctgattgataaggcaaaccctttacagagagagactttctcatctctttctccaaagtcaggcacaccgttggggccaagaacaccaaacatgtcctcctattgtccaaaggaggggaattgtctaaggacagtcatttgctcactccaatccttaaaatctaagatgagctccacatgcacagtttaagcccacattacaacccactcccaatgcaggacatatacattttacttcgtttccttgtgatcgtgatctttcagagcaagatgcaaacagagttttcaaaactgaccgaaccttttattttgtgtctggtaaacacacagctaataaattccctaggaaacagatttgaatgttagacagaagtcccttccaaaaaaggatcttacatacaagggttttcaaacctcaatacatattaagatatgattgaataaatgtgggtgcccatttctctttatatttactatgtgtatgtagagagacatattttttacacaaacactagaatgtcttaggacaaggactctcttttcctggcccctgagcaatctctttaggagttaactgtttccagtctcccaaataccagaagttgtaagcccccacccctccacatctcacaggaaatgaaacagaggcctggagatgtggggtgtggacaaagggctctctgaaaatattacctaccctgagg

SEQ ID NO: 59786 - DNA, 818 bp, Bovine  19866881652442
  misc_feature (1)..(1): n is a, c, g, or t
ntctaataggaaatacttaattcaactaattcacttgcattagacatagagccctgaacaaggcaaacacagttcctggccctacagtacctgcagcattcaactcctaaactacggactttcctgtaactgattcatgtggtaattgggatactcttcattacattgtgagcttagttgatggatctttttagtagatctgattagccatgttgccatccttagagaccctcagaaggatgtcaggccacagaacacgtttccagacacataaaacttagttacctcaatggtagaatacagccaagtaagtaaaactgtgatttcagtaaaaatgaactaagggttatatagagaactcttttgcctcaattcttatggttaaaaaaaatgcttctgaatgtgcttgtccactttataagagcaataccgcaaacagaattattattcctttgaaagctgatgtttttcaaggccactcttagcaataattgctttcactaagcagaactacacatggagatgggctaggaaactgggctttacatatagtgattcaaaaccatgctcaggaactcaatgaaaaaaattctctcattggttactgtcttagcattgctttttttttcatcaaacctaagtgcaaggggaaaaatccaattatttggaggttccagttagctggaacctttggtctgctaggctacagctgggcaaacttcagctatggagagatgctctctgatcatctacctgtggtgtgatggattatctctcttggtatttaatcagtaactgcaaattacccagatttcgga

SEQ ID NO: 59787 - DNA, 697 bp, Bovine  19866881658215
  misc_feature (1)..(1): n is a, c, g, or t
ntgctgaagaaggtccaggaaggagccttggcttctatgaagaatcggcaaaccaccatggaggagatagcttttggactgagctctgaggaatgggtagattttctacatgtgaagataacacagagaaccttgccaatctgaactaagccatgaaggtgagaaatggaagggccaatatagaatacattatttttcttttaacatcatttttttctagtagttaggccaacaagcattgagaaatgagtaagagaagaaatcctaagtgcaatctcttaattggctttctgcatacttaacatcatgtatgggaaaacaagtcatgggggcaggatgcagtagcctatagaatttgaggcattcttctattttaaaagtaaaaaagaaaaaagaaaggttcctgctagcaggaaaatgccaaggtagctcagatggtgaatattattctgttgtcatgattcccatggttttgtcagcataagtgtttttaacacaggcacaccactcactgaagagatgaatgacctcatgttaggtaaccccattcccagcttctaagtggggagtaataacaacaggccgagcgtgggttatttaatgaaaaggagagttatagtgatcatgctggttttgagaagcaagtaagcgaattgaccacagacccatgcactaaaaatacataaataaaattctg

SEQ ID NO: 59788 - DNA, 718 bp, Bovine  19866881712092
  misc_feature (1)..(1): n is a, c, g, or t
ncttcttgtctctttgccaagctatgagactaacaatacttttgacaagatgaaaaattctttagctgcctgctgtctctgcaacaaatttccttcatcaactaattcactaatttgggccttcttgagaactcggctaatttgtaagaacaggtggctcattccataagtgttcaataaagatttgcacatgattacacacacagcattgcctcaaaaacaaatgaagaaatgtgtgtatttatgaagaagctaaagagacagacaagagattcttcagtagctaagagtgcatctggtggtctggtaaaattatttcaaaaactggtgggggtagggagtagaagcaggtgacataaggatataaagttcttgtcacatggacaattaacaattcttgggaaactaccaagcagtgttggatatgaaaacaaagaaacaaactaaccacagcctcattctgattttttctttattttttatcctggatttgagttcattcattcatacaacatttttgagcatctactacatgtcaggcaccatttcagccacctcaaagtcacctattttctattatacaaagaggagaaggtatgttataaggctaaaaaaaaatcttaattttgtttaaatcataaattagatgttgggctattactggaacaggttaaaaaaaataagctcatgtcaaaaaactgtagagccagtcaatcca

SEQ ID NO: 59789 - DNA, 976 bp, Bovine  19866881872968
  misc_feature (1)..(1): n is a, c, g, or t
naataaaatagcatcatgtggtccacagagacatccaggtacaatggataatgcatgtgccatagactcaggttaaactctgcctggcaacctgccaactgcctgaacgtggactaagcacctctgacatgaggtgtttattctcacaatcataccatggatttggacttatctctactttataataaagaaacagactcagagaagctaagtaacatgcccaccaacacagctggtgagcagcaaagctaaagtgatgagctgtaagtctggacaatggagaagtcacagtggatttcagagaattttggcacacattttttgaagttcttttttttcccctggtcctataccccaaactaagtgctaagcctttgacgaactgacactgacaaatatctgtttccaaaaactttctgaccaactctgatcttcagttaagggtttatgatgaaagtccaataatatgtaactgaaacaacaatgggcaccactataattaaatagaatttagaaaaggcaaaccaataaaaatgcggagaatcaacagtaggcactatgttaaactgccatctgtacagactgtgttcaaatcaaggggtggcctttcaaggcaaattatgtggctcattgctggggcaaaccagagttggaagagccaaattatagacaagctcccagtaaaattgattttgacacctctttcctcaggagactgggaattatcttcccagtgcgtactttagaacatcagtgtcagcccatctgctacctaaatttagatctcaatacagtatgtaatggagaaggaaatggcaacccactccagtactcttgcctggaaaatcccatggatgcgggagcctggtaggctacagtccatggggtcgcaaagagtcggacacaactgagcaacttcacttcactcacttcatactttctcacggagaaggcaatggcaacccactccagtatt

SEQ ID NO: 59790 - DNA, 1185 bp, Bovine  19866880233449
  misc_feature (1)..(1): n is a, c, g, or t
ngaaatcagtcctgaatattcattggaaggactgatgttgaagctgaaactccaatactctggccacctaatgtgaagagctgactcgtttgaaaagaccctgatgctgggaaagattgagggcaggagagaaggggacaacagaggatgagatggttggatggcatcactgactcaatggacatgagtttgggtaaactctgggagttggtgatgggcagggaggcctggtgtgcatggggtcgcaaagagttggacatgactgagcaactgaactgaaagaatcaccagctggctagcaactgtcagcttaagtttggccttttgcactggcatttctgggttgccttaaaaatgcataaagaagtgatcagagagagagagtaaaaaaaaatgagaatgcaattctgccatttgaagtaacacagatggtcctagagaatcttatgctcggtgaaataagttacacaaaggaagacaaatactggaagatatcacttatgtgtgaaaattaaaagagaatacaaatgaatgactatgcaaaacagaaacagactcacacgtagagaaaacaaaccagtgctgccctaggggagaggaagatgagcaggggcaaatcagggtacgcagtggagagatgcggactgctacatgaaggaagatgagcaggggcaaatcagggtatgcagtggagagatgcggactactacatgaaggaagatgagcaggggcaaatcagggtatgcagtggagagatgcggactgttacatgaaaatgggtaagaggcaaggctatagtgtgcagcacagggcatcatagccattattttgtaatagctttttaaaaagattacttatcttaattgggggtaattactttacaatattgtgatggttttccccatacattgacatgaatcagctgtggttgtacatgggtcccaccatcttgaaccccgctcccacctcccccagccaccttatccctctgggctgtccctgagcaccagcttggagtgccctgcttcattttgtaaaaacttttaatgaagtacaatctgtaaaaatattgaatcactatgctgtacacctgaaattaagattatattgtaaatcaactatcagttcagttcagtcactcagttgtgtccgactctttgcgaccccagaattgcagcacaccag

SEQ ID NO: 59791 - DNA, 1201 bp, Bovine  19866880398724
  misc_feature (1)..(1): n is a, c, g, or t
ntctgtagtatctaagagtaaaaagttgcaacatgtatttcatatgtccacttttgtattatattgcccatttctgctaggggcctccaaaaaagatctttctttttttttaagagatacatacatcactgcatacatgttaaaaataattctaaggacattcatctttgttttaatctatggatccttccagtataaaaagaaaacaattccaagatacattattcaaaaatcaaagaggatgatgcttttctttctaacatttgtaaatcactaataattgttcctgacaaatgataagtactcgattttaggatctaattttaaattacatttactatcatttgcatttacttaaactgcttatatatagttcagtttccaaacaaataagtttgaatttatactaagataaggcaaaatcaaaagatacacatacattattcaaattttaccctatttcatagttctattctccttccttgagaagtgttagtttttaggaagtaaattaagttaaaattcattttcaatttctagttattccttagtggcaatggcaaacaccaacaaaagaccaagagacaagagctgcaaggggaatttctatcaagtcaaacagtaagtgcatgaaaaacaagctgatgatttatttctaattcatcctgcaggtctgagaaacctcaaacacaagctaaagtttatgaatctttattagtcccactataaagtgtaaaacaaaaacaaaacagtcaccatcaactttgcaaatcgcctgcttgtttcaccaattaaattatgaaaaaaatcgtgactaaatctcccaagtgaaattttaaaaccaatctgaaaaaagatcatatatcaatttctgttagagatttatttttagaatgtatgtgtatcagttccttttcagctaagtatttccttcattacaggtattatgagcctcctggcaggtgagactttgcatgtcagactctaaaaatcagatgcaggacagatggtaaggctgcaacctaacaaaaatccctctagcgcatcacaaaaagatgtgatggtacagctaagaaagaagtatccgagcacaatttccaccatacttaggctctatatttctacgttatttcctggatccaggcttcaatcagaaaaagctaacattagtttgataagaagcattatcaagaaactaaaa

SEQ ID NO: 59792 - DNA, 1144 bp, Bovine  19866880450014
  misc_feature (1)..(1): n is a, c, g, or t
ntaagaggcagtgttttttaatttgttttgttttggtgttaagcatgcagtacgctgcagctgttagtacgtgttgagaataaattaaataaaaatagaacagttactcctaaggttggtctcaagtgattcatgtaaagcctttaaatgtctccagtacctagataagttttcctccagaatcagcactgctcagaggattgctgtcgtgggagataattttgtctctctttgtaaggcgttttagatagtaaaagccaagaagaagaaatttctgtcaaccaggatggattgtcctttcaaatgtactttctctaatgtaaaataaaccattggagatgagtttacgagtttatatagttctgagttcccacctcgcctgggtatgggaaggctttcttaaatacacagatagctccagaacagagagaagcaggaacacgtacaagaaaagggaaagctgtggttttaagggctggagtagaaatcttgaatttcctttccatgagacatgttcagttttcttttaaaatatttgcttttgactggaaaacttttctagccagatataatctactttggcctatatgtttagctactaccccttaggtcttttaactttcagttcctcatttagataaagcatacaggagcaaaatgtccaattgcaagtgtacagcttggtgatttctgcaaacagaacatgtgcattcatctagcactttgatcaagaaatattatattacctgcaagtcctcttgtggggccagcttcagtcaccacccccaatatgataagcagtttttgaactttgtatgcatgggatcatagtctgtgtgctttttgggacttgatttattttccataacattatgttttcaaaactcattcatgttgttgctcctcctcttcacttagtttttttttttttttcctttttcttcagatagacatgttgctttcatgtgtcacctccttgattcagtgtagggagccatgacgtgtataagtggagtgactcgaagtcaggtcctcttggtggccttcatcgctagggctgtccctgctttttttttcttctacatggttgttattctgggcagaactgagatctaagaagagagaagtgctaaaaacttagcac

SEQ ID NO: 59793 - DNA, 1363 bp, Bovine  19866880457884
  misc_feature (1)..(1): n is a, c, g, or t
ncattattactagagataaagagcaatatttctcaattgataaaaggtcagttaatttataaacatgaagccgagaatgtacaatgagaaaggaccatgtcttcaataaatggtactggacaactggacagccacatacaaaagaatgaaatgggaccacttcttacacaaaaatcaactcaaaatggattaaagacttgaatgtaaaacctgaaaccacaaaactcctagagaaaaacaggtggtgatttccttaacatctgtcttggcaacgattttttggattagatgctaaagcaaaggtatggtaagtcgcttcggtcacgtccaactctttgcaactctatggactgtagcccaccaggcttctctgtccatgggattctccaggcaataatactggagtgggttgccatgcccttctccaggggatcctcctgacccatggatcaaacacatgtcacttatgtctcctgcactggtaggcaggttctttactacaagtaccatcctgacccagggattgaacctgggtcttctgcattgcagtcagattctttactgtcttagccaccagggaagagccaactacattttaccaaggagtaatttagaatgactagaccaaatcaaatcaaatcaaatttcacctattaaaaaactaatctgttagacatgaggataggacaatttagaaggtacctacaaagaaagcaaccgcctgcccaagcacaaaaaaacaaaaacatacagagagctgagcttacacatgagatacagcatagtagggggcggtgtaattttctcctctgaaactgattgatggtatcggctccaataacatcaaatcaacacatctctcctacttaactgtgccaatgatttatttgctctgactggcctggaaagtgaccctcttgttctacctgctgaagaatgtctgaccccccaagacctttgcccatggctgatttcagcaaaatggaacactcaggtggaatcctgatgaacacccacaacggtggtacacatgtggctcagggaaggaactgaactaatgtattatagtaatttatcggcagttctgtgtgacagcatatttacagaaatgaggcctgccaaaaagatcaggttatagcaggaacacatgatttcccagccagccataaaatacaaatcaaatgccttttctgcccgctgtcagccacctccacccactccttgtccccaaccctcagacaaattgaagcacatgccacaatttgcagagggaaaatcaaactcaatttcgcagtacaatgaagtgagttttggtcttgtcatgtccacgacatatgatccctagaagactaaaagaggatgt

SEQ ID NO: 59794 - DNA, 2289 bp, Bovine  19866880558647
  misc_feature (1)..(1): n is a, c, g, or t
naaacataaagcctctttatacaaaactgtaacaacggcatttttctttcatcactgccaagccccaaacacatctagattttccactatgaaaaggctgcatgttttatatgttatatttatgtctcactgtaaactattcattggtttatagacctcaggtcctctaggaagcatcacaaatccttattatactcgtggatattaaatttggtgttaggctctctgatttatcttgccagactaactcacatgtaaacagacatctctgttaaaactatctacttcaggagataaaaaattaatccatgctaaagctctaaccttgaagctcactgcaactgcaatactgacaaaggtaagagtaaggatgaagatagtaatgatgacgtcaaacacgatggcgataatgaagaaaatgctttcagttagttccttcctcattctgttaactttccctaacacaaaaattaaacaaagctagagaccaaagaagcgtgctttgggaagctttcgaagacccaagtaggatttctatgtgaatacagtaatcttgagatgaagggatgagtcaattaacaggaaatgactaagacgtgccacaaagcaataaataatggccatctaatgactgcaaatgaaagtcagcccaacgacattccttcttacaagctctcacctttccaagaagccaagctacaaagagttctccgtatgagtttatgtgataattttttttttctagacgctacataaaattcttccgatgggaatttgcacagaagaaatttttatcttcactcgggtatcttttgagaaagtatgatcgcacgagttattccaaaggtttctgaagatgtcatcctcccagatgttctcctttgaatcttagacacatgctgccaactgcagaatcacagaagaaacactttcctcctctgacattttcaaaacagtaaaaaacttatttttttagatagatgacgtttagtaagaatgatcatgaactactaaaatacactgctagatatatactgaattgaaattcatattatatgtgtggaaaaccaacgagagttaacttaattccccttcaacacaagtgaatgcagttttactgtgcacctatactgtgcgaaacactgcggtaggtaatgaggtcaaggtacctggcgtgtcccctgccttcaaggctcttccaaatcaacttgcctttcttttgcctttcacgtgaacgaaatggtcttaaattttcaaaacagaaagaaattttactttatatatgaaggccctgcttaataatatgatcagttctcacattcaagaatgagaaaatggtgaccattaaaaacaacccccaaaaaatgagaaaaacaaaccacaggacttccctggtggcacagtggattaagaatcgcctgcccacgcaggggacacgggttgggtctctgatctgggaagacccacatgatgcggagcaatgaagaccgtgaaccacaacgatggagcccgtgccccagggcccgcaggctgaaactgctgaagctcacgccaagagcctgtgccctgtgacaagagaagccatctccatgagtagcccgagcgcagcagcagagcgtagccccggctcgccacaaccagagaaaacccttgagcagcaacgaagacccagtgcagccaaaaatatttttttaaacaaaataaaacaaagaaatttaatttttaaaagcattccttttaggtaaatgtacactgtgtgtagagttgtctcgatcaaacaatacttttaaaaatcaagataggataatatatgtagaaaagattaagattctaacctttgctctttgttggatctgaaggtatttttatcccagaggtcataatgcaaggaaagaatctgatgcaatcttattcattaaaaatcttaagaaagcaatcaactctgcaggctcaagacataaaaaagcacagagaaatggcaaaatggttaaagcacagaatattactatcattgcatttctggttttttccctgcagaatcattttaagcacgataggcaacgttcttcctccagtagatcagggataaccttttagaaacttgaaattatgaggtcaactattaaaaatttttccacgaaattttaatgaattaaagacatattccaaagggatgcttataatttattccttatatgtgcagaatttccaaggcccttgaatcctataggttattagaattctctcacttgatatcttgggaaaagataactgaaaaacaacatagtt

SEQ ID NO: 59795 - DNA, 1530 bp, Bovine  19866880588224
  misc_feature (1)..(1): n is a, c, g, or t
ngatcctcggttctgtaccccatagtggctggtagccgatttccattcccctgcagcggagggcggcctgccctttaggcatagtcctcatttctgacttccacaaagacactgcctatattttaataccaagcagtgagtggatttacttctgaactcctctccttttcaaatttgcagtaaggtgaaattgacctgtgggctctctttcttcctttctttggtatgtacatgtgtacaatctagggtctatttcatagcaagctaaattaaaataaattagagaatgagttaaaacggttgaattgacgacatcagcaatggatgactgagctatgagaggcttcctaagattcctaaaccagctcatggtgagttttctttcctaaagttggctaactaggtgagattttattttcccgttccattccagagacttctagctctgagttctatgggaaatacatgtctatcataccttatctgaaaccttagagcctgatgtttttcagaattcattttttacaaagaggtgatataacaaacaggtggggcccagagcacttttagggcagtgtaactactttgtacacgtgtgtataatgatgaatacacttgtcctaagccacaggatatacagacaccaagagtgagccccagtgtagactgtggacttgggacagtaatggtgtgcaggtttgttaattgtaacaaatcaccactctgatgctggatgttataatattgaagtctgcgtgtgtgggggcagggactacaccgaaaatctctataccttcttttcagtgttgttctgaatccagcactgttctcaaaaaagtagtcttttttttttttttttcttttaaaggtgataccatgtataatcactggcagggtctgaaccaatacccagtaaccaaaactatctttacagtgaaatttaggctcctttatgctaagcgggttcagcatagcttaaaaatagcctgaagtcagtttgggtcagattttgcctccaaatgagtttacatcaaaattacaaaaaatagagtaaaaattggatttcttctgacatctttggatttttgcattgtggttaagagagaaattctccatccactctaccctgtttacactggctgtttatgagccagtctgcagtagcagtggcacaggctttcttgtgtggtgagagggctgagaactgccatctcatccgagtgacctacaccagcacccccatgccagtgcattccacggacccttcctcggggtgggcagagctgctgacggtgccaggtaactgaccgtgtgatgaggttaatcccctttccctcggccccctctgtcataacccgtcataaagctgccactggttttcagagccagcagttcattgctctcatttctctctctctgctctcagaaaaggatagctttacccacacacttctgggcaaataaatgtctctttgcttttttgggtaatcctagacttatcaaaaagataaaagtcagagtggaggtttt

SEQ ID NO: 59796 - DNA, 2065 bp, Bovine  19866880637552
  misc_feature (1)..(1): n is a, c, g, or t
nttgccttctccctttgggatggattacttagtaatttaattaattacttcagattaattaatttaattaattatttatttaattaagaagtaattaagtaagtaattaagaagtaatctgtacttcagattaacttggaaaaattccttgagctaagaggtatttatcaataacctgctaattttacttatattttgtttcactgttgttgcttttttattgtaccattctctaggatatgtacaatttgcagaatatatttctgtaaagatgaccatttaatgtgtccagttgtggtgataattattcctatgtgtgcctagtcgctcagtcatgtccgacttcttttgagactccatggactgtagccttccaggctcctctgtctatgggattctctgggcaagaatactggagtgggttgccatgacctcctccagggtatctttccgaccaagggatcaaacccaggtctcccgcattgcaggcagattctttaccatctgagccacctgggaagccccataattcctttattatgttttaaatataatgcgtgtgtgcatgctaagttgcttcagtcatgtccgactctttgcgactccatggactgtagccctccaggctcctctgtccatgggattctccaggcaagaagactggagtgggttgccatgccctcctgcaggggaccttcctgacttagggattgaacggcatgtggcttctatactggcagacagattctttactgctgagccactggggaagcccttcaaatatactgtgtggatataaaaaatcgtgttatatataacatacatatgtaagttaccaagtatcaataaataaaagccatgatttcaccacaggctcgcacacacaaagagggcatcaagagctcctctgggcaggggtcagcgtgggatgtttttcctgacgccagtgaggtcagttacctgaatgggaggtgcttttgctccccagctgcgtctctgactgactgtggctgacgggcgtgaggtcttggcagctctggatgggggagtctctcgccgtcgggtcggtgcctggtggcttctcgatatttttcatctccatttcttcatgatggatccacaggtccgggggccggaggtccttctggctgccctttcttttgccaacgctgtgggtggcccgtttcctatggaacaaaatcaggaggcagatgtgagtacctttattcgatggcttttcctctctctctctcttttttgtttcttagtcaattcaagttagaagcgagagagaggagacaaaagcgctcccaggaggaaccccgtgaaatccaggcgctggcagcctcggcctggctgcctttcctctccttccctggagcttcgctgccttccggagacgcggcgcggcctccccagggcccggcggcctgccagggagcgcttcacgccagcatccccgctgcgggcttcagcgtgaggtgacggtgggttagatggagccatatgccgttctttggagccaggcataaggtaccccacggcaacatctgtctagcagataaatgacagcgttgcttccaaagggcaaatggaaatgaaaaggccaggatttgtgccaacagccaagattggggcttagaagaaagtgtgtacctcagctgtccaatttcctgtgcaactggggaggtggccctttgaagacaaaaaggctgcagaaacacattctcgggagaataaaatgctttcttcttggagtcactaagtatctggattcgaacacaataagacccatcttttttttttttttaagaccgatcctttgacaaaagaagaagccatttggaagtgtgctgtaaacatctcttattttcttcagtaagcatttagcaatccttaatttgtttttcagcagcagtctcctcttggggccattgagattgcaatgttccctgcagactgagtcaagagcccgatgcttatgttagccaatctctagagcagggggtccggagaaggcaatggtaccccactccagtactcttgcctggaaatatcccatggg

SEQ ID NO: 59797 - DNA, 1520 bp, Bovine  19866880703283
  misc_feature (1)..(1): n is a, c, g, or t
ntgtgttatcaaataccaaactgacagatgggatggtagagaaaaattggagtttggaaacaagcggacatcaacctgaaaatacagcttcaatagaaggaagctgtttgatcttaacctgggcattcagcttccctaagcctactatcctcatctccaaagtagaaatcatgatacagaagtatttataaaggatgagaagagatgattatagagttcctagcagcagcatgatgagtggcaaataataggtattcagtaaatgggggccaattctactctcaatttgttggtcttatggtgatatattttgcaatgagaagaaaacaaaaacggaaatctgatgcccttttcagacatgcagtggtactgagcatttctaacattctaatatttgctctaaactaggaaagaaattatgtaactgtacaaatatttcaaggcatttacatgattaagagtgaaaatgttatgctttcaaatcattagaaaaataatacatgaaatggctgagaaaccagacctgaacaaactctaacgtggcaatcagtcggatttcagaagatagcaaggactagcttgctgtcatctttatctgctgacctgatttactcaaagaaactcatgtcatttggctacatgaatgtctgaaatgaataacatttatttgcactagaaagaaatgccatctttttgtatctatagtacacaaaaatatatacaagcagatacatagtatatctgctcttggccaatgaaacattaacctatgataaacctattagaaaaccagcatattaaattcagactaaagcgatagcatgtgttacttatcatgagtagtttactctcccatcataactctctgtgtttaaatgtgatgtaatagaaaatgcttttattaatcccctctgacatacttcaataaaacttccaaggtctctaaaactcagaaaagtggtagttagaatgcattctgggatctagcctcagatcatcatgtcaatgaaatagaacatttgtgtaggataatggtggcctgatgttagatcactgttgagataaagaattttttcaaatcaaaaaagacaaagcaggatttttttttttttttgaagcggagatcaaggttctcttaaaatgtcttctctaccacctacatgtcatttcttttttacaaactccgtaaagagccgaattgataaggcctctcaacttgatctcttggaattgccaagtgtttgattcatgaaggagtaaatcagattttgtacatcactgaggatgtgtgtaagattgtaagattacacctgagatttaccttatgggttgggttaggccaagatggcagagcagaaagagcctcagctcacctcctcttatgaacccagcaaaaccacaactgccaaaagaacagtcatctatgaaaatgacaaaaacctcccagaaaagattgtctacaactaaagacataaagaaggaaccacagtgagacaggtacaagaggtgggaaagtggaa

SEQ ID NO: 59798 - DNA, 692 bp, Bovine  19866880793768
  misc_feature (1)..(1): n is a, c, g, or t
naaattcatgtgcatacccccgccatgtgagccttctccaaagagttctctgcttcaaaatctgcaatctctctaactgcctttaaaataaaacctaaacttcctaagctgataattaagatcctccacaatcagtctcctatttctattcccaatctcatcccccagtaaaaccctctcacctcactgccacccaagcatgtctcaaaatagtccactttcattatcacatgctgttttcttctgcaggaccctggcccttttgtctgcttacccaaagccccctctccttgaactataacgtctagtataaatcctttctcatttatgaaatattcacagaccacaaaggccttttcttttctaaactcacattgcttgctgcctttctggactagtaaacatgtattgaattatcacagcttctgcagtgcagcctgaattgctagttaactttctagacctttttttttttttaaacaaagaaagaaaataaaaattatttgctttaatgatctgggaatttaaggtaaataaatctgaataatgacttcgttactattactgcatctgagataaatacatcatctaagttttagttcatcttatcacatattagttaccaggcaagtactgcctatgcagattcatttatggaacataatacagacagagtcactctctattcacct

SEQ ID NO: 59799 - DNA, 1819 bp, Bovine  19866881069705
  misc_feature (1)..(1): n is a, c, g, or t
nggtgcccatacaaacttactgattatgaatattttatctcacaggagttagaattgtaagaaccttacagtgattcttaacattgaggggttagagtcaagaagggtagaatcctccttgatggatgtggccatcaagagcatcacaggccttcagaattggtatgcaacctctttggtgactttggatttttttcatgattatgggaaagagtgcatcactttcatcatattctaaaaggagaaagtgactttaaaatgttaatcagcacttgagggagacttggagatcttatttttgttcgttttatcattctttaagattgagctactcacacgaccttttgcttctttggtaacatggcatgatatttatgaaggcccagaaggactgtgcttagtgataacattaagcacattcagaaacactaggagttgcaatgaatttgaatgagaattcaaattgaatttgttgggttttttcctttaaagagcagagacctggccaccggcaggtgaaaattaaattgcagagagaggacgataggtacagacttattgctaaaattcagtgagtggtccagtgggaatccatgactgttggaaattaatgcagagtgacagattgatgctttgagcagaattttttttctctcacacaaacaagtctgtaattaaagcattttatgtttatatagttgtcacatccaataatttaaaattatcctaatttaaaacagcatttaagaaactctaattagactgttaatattatgaattttcaagtactcatgttctctttccctgattaaaattaagagggaaaaaaatgccccacatcagccagccagtacctgattctagacgtgatagttaacttaaggtgagcatatggtttatatactctgaaaacagggagaaaaatcctacattccttgctcaatttctcattcaagtcagggagcagattattaattttctcaagtagttttgatcatgtcataaaataagagtttagctttaaggaattaataaaagtcagtagctcccgagaagtcactgatttaaaaatcttgtccatctcagaaaaagtggggggaagagtaaacacaatgtaaaaaagattagaatgtatttgtttcaatactgtgctttaaaatgaaggtggaaatagatttgatgtctatgtatatggagagaagggtcatttttttcttgattacaacccccaagagaaatgcggatggctatcagtcaaatctccatcactttgactgcaaaagttgtgccaattaaagacggttggagctctccaagttcagaatgatgttgccagactttttcttcaattattctgaagcgctaaatgtgaaaacaaatctcttagattaccacagggctggaaaaagaagagctggaagagccagcaacaaatcacaacaaagcatagaagtgtcaccttcctgatataagcatgggcagggtttctgcagaaggatttttcagatggaaaggaaggggagccatttccatttcctatcacccagcagttttattcttcagaatattctcaagagaaactctgaagcttgtacaactggagatgtgtacccgatagtttgccaccatcttgataacagtggaagtccaaaaacaatccaaatgcccattagttgcagactggttgactcaatagagagtcttcatacagtgccattgtgtgatagattaaataaactacagggtgacaccacaatatgggattgagtttggtgatgtatgaattaagtgaaaagaagtaggttccaacatactatac

SEQ ID NO: 59800 - DNA, 2420 bp, Bovine  19866881183496
  misc_feature (1)..(1): n is a, c, g, or t
ntctgactctttgcaccccatggactgtagcccttcaggctcctctgtccgttgaagtttccaggcagtgatactggagtgggttgccatttcccactccagggctacaccatgtatccaggtgctgcttttcaatcaccatagttgaggctaagcagactggagtcaggtggacagagagcaggaaaaaaggatactgtgaacacagaaccaagaggatcctgtccccttaaaagtaaatgttaaatgagcatggcaacagcagagatcctaaaaatcaacgcagtcaccgaacgttccgtgaatactgctcgagtactgcttcccagatttccgacatgatttctcctggttctgttcttcacttacttcgtgtcctgtgtttgctgggagtatgtgacgtgctgccccgacattattccgttaacgtctgtctttataccggtgcccttgcttactgcatctgtggccggcagccgcagtttaaggggctctgtgaggctggtgaaaccatgccttcaggaggcctgtgtgcagttgataacagagcggctacgtgcgttaggaaggtagtcaggagacggatcggtaggtttacttctccagtcgctgatactgtgagctaatgggaacaaggtttagggggtcttagtgtgctaatgggctttccagaggctcagtggataaagaaactgcctacaatgcaaaagacgccagagatatgggttcgatttcctgggttgggaagatcccctggaggagggcatggcaacccactccattatgcttgcctggagaatcccatggacagaggaccctggcgggctacagtccataggtcccagagttggacacggctgaagagaccgagcacagcactgcttccagaactgtggtgctcagcggtcaccacttgggggcacccttttgctatgaaacagcaaagccccatccagtggccttgcacagagttgagggaatgtgtgattcttagctgtctggcctgtcccaaagaccatggaccagtaagcctcacggcctctctcacctcccaatctagaatgctgctatgccatgaccatccaccttcaccgaaaatgtcctctctaagtgctgtttaaaactaatttttcaaagcttttcatcgatttctcaaagtgaaccacaaagcggcagcagcaagcacatccttcatcacgggtgaagcatgtagagaatgtagcatctaatttgcgtggaagccacactttaatgctgtctggcttgagtgccaacaaaatggaattgagtttgagagctggaggggacgccctcgttttctgggtgagaaacccatgttccaggggtaacgaggctcagccaaatgagcgtgtcgaagacacagagctggagctttgctgtatcccattgcctcctctgtccctgcctccgtttgaggctggttccacctgttctcagggaggactaacatgtgttcgttgagaggttgctctacttttaggcaagaccaccctgccctgcaggatatgctgggagttactttacagggtcactctctccctttatgacccctgatgtttccttaagtctgcagatcaacacctataggagatgcagggtcatccttgatctcagccttcactcctcacctggccccactggctttttcacagtgatgtgatttagcaataccttcacatattattctttcattacacctcattttgactcttggattcatttaatgaatacagctttcctaatcaggttctgattccacgtgatggtacgcttccaagggttgcctcaaattaacactcttcccagactgcctctacctgcggctcatggatctgaccttcccggcctggtattttttactggcaccccacccagatcacctgtgctggctgacgggcccatcctggctactgggagttctagaagctaatggctcccagatgcccccttctctggattgtcgtcgttgttgctccgttgctaagtcacatccaaccgtttgtgaccccctggactgcagcacgctaggctcctcggttctccactatctcccagagtttgctcaaattcatgcccattgagtcagtggtgccatccagccatctcatcctctgtcatccccttctccttttgccttcagtctttcctagagagcccccccaacctagaaggtgggggaaaaatggaggaggagccaaaggcagagactgacagattcgatgggcacatagaccagcccggtttacctttgggagggacaacgctgatgcatgacttgatttttttgttgaccatctttccccaccatggaccacgccaagaggagacttcccctgagaccgcatccccactgggcgcccttcttcctccaatctccccttctccctttcttatgggtt

SEQ ID NO: 59801 - DNA, 1052 bp, Bovine  19866881215623
  misc_feature (1)..(1): n is a, c, g, or t
ncaatgaatcatattcttttaactgatacatagtattcagaatttcagtattacttttcaacatatatttttattcagttttcaaatctgcatatatcatttttatttttatgactctaacatgacattttatggaagtataataaatttgtatatagagacctaaccatatttttgcagaatgtagtttgtttcccgtgttttcatagtaagatttaatgtctttggggcttaagtataaattgcaaagattgtggttaattcatacagttgcatattatggagctgttaaaaattacactgctgacttatttattgacagagaaagatttttctgtaacttttttaagactacaaaacagtatgtatggtataatgccatttttgaaaaataagtatattagtatatattctcttgctttcacacacacatatatatgcatgtgtggaaattataaataaataataatagttctttttggataatgaggttctggtaaattttattaacatttctacaatgagagcatattgataaacaaaaaagtagatattattatttaaagcatcaatgaaatgaaaaaggcattggggttcctggctagaaatgaagtattgcatcattaatactcaagagtattgctttccttttaggtcaagacacagaagaagcagggagctccatgtccactctggagaggtcactggcggcacgccgagccacccgggccaagctcatgattcctatggatgcccagtccagcaatcctggtgagtgacagttggtgccacagtggagacgggaacaacatcacgttaatatgaggcatgcgtgcttagccgctcagtcgtgtccaactctttgcaacccttttgcctgtagcccgccaggctcctctgtccatgggatttttaaggcaagaatactccagtgagtgggcattttcctccttgatttgcagtattatattagtttcagtttgtatattatattatacagttttctttgtgtatcttttctctatcagctatcaaaacctgattagagtttt

SEQ ID NO: 59802 - DNA, 1817 bp, Bovine  19866881233359
  misc_feature (1)..(1): n is a, c, g, or t
nttcccatctgtgaaatgggaaaaataacagaagctatctcataaagtataaggttcaataaagctgttgtaagggttaaccaaaattctatcaagtgaagttcttggaacacagtcaatactacaaatattagctgtaatataacaactgattgatgcttttgaactgtggtgttggagaagactcttgaaagtcctttggactgcaaggagatccaaccagtccatcctaaaggaaatcagtcctgggtgttcattggaagaactgatgttgaagctgaaactccaatattttggccatcggacgcgaagagcatccgaaaagaccctgatgctgggaaagactgagggcaggaggagaaggggacgacagaggatgagatgcttggatggcatcactgactcaatggacatgagtttgagtaaactccaggagttggtgatgaacaggaaggcctggcgtgctgtggttcatggggtctcaaagagttggacacgactgagtgactgaacggaactgaacaactaattaacatctttccaccccattagactgagagttcttgaagggcagtgcaaggtcatctgattcgctcagtttcatcatcaggtcccggcccagtgcccagcagagtaagacattggcacatactatctaaatgaaagagtttaggtggtcaagaagagaggctctgtgactgtaagaaacaggaagaacaggaagaactttacagagaagatggaatgagggacttcctggggcacaggttaaattcctggtcagggaactaagatcctgcatgctgcctgccacagccaattttttttttttaatttttaaaaataaagaagaagaagatggaatgagagccagcctttggatgattgagtgcttttaaagaattggagaggaaagagaagtgcatttggggaaagcaaaattacatttggaaagctaatgaggtgaaaatagaaaacttacatttgaaggaccatgagtagcttaacacagctaatgcagagaattcatgtaggaagacaataagagggaaaggctgtaaaggacaccagaactggaatataaaactttagataccaggcaaaacaagcaatcctcttggtctccttccagccttggcattcagaaagggcttatatttgcttcctcttcgttcccttgggaataagactccaattattttgacacataaaagccacccagtgccactagtactaagacatggagagtcttataacacaggtttgggcatccaggctgaaaggctctgctaagatctcgtctgtgagatccccacagacccactacagtgttcagcaatacaacaatcatttctgcctccttcctaaagatacaaggcttaggcagctctgcagagttcaagtaaatctctctcccgtgacactgaaaatgaatgacagattggtgccaagattcttaatggtcccattatacaatgttgctaatagtcaactctgtctcaaaattgtacaaggaaggggctgtctgtaagcttttagcatctggatatcagtttagacatgcaaatttgaataacttgaacaagatcctccccgagacaattaggacacttagaacataatccatgtcaaggctatcaattaagaatggggattgtcatcgctaccccgcatttggtgaggtttcacttgaaaacaaaggagcgtggagcatgggaaattctcaacaccaggaatgtcattctcaaagcacactggcctttattctatgggtgggctgggtactggttttcttcaaagataatgctccactgaaa

SEQ ID NO: 59803 - DNA, 1588 bp, Bovine  19866881282774
  misc_feature (1)..(1): n is a, c, g, or t
nacctctctgtaccaggtctcctggactggatcccattctccacccaggagtctccgactgcagagctcagggttcagctaaccaagctcttgggatgcagttggcatgaggattcagagaggggcctggaaactactcgtgggcttttctaaagagaaaactctacttgtggctttttctggagcagaaactctacctggggctttctctagagagaaaagtggtatctgagtggcttgaagaggacagtgcatgtggaaactgacgatcctggagaagaggtaatgaaccagagaagggggcacccgtgaaaggcccagtcttaaagagggttcccttttatcaaacaataaagaatccagattagctgaaatttcagccaccaaatgtgttgaattaaaagttgttgcactgtaacaagttgtaaattatagtattcttataaacagtgttatttttatagacagtatatatacatatgtattatttctatatatagtattcttataaatctcttctgaggctgcttcaatccagtgagctggttcagagaaagctaactacataaggaaaaggtctgtccacttgatctcagttttctcctggacccttataggaaaaggaagtgttgatttgggggaattagaacgcataattcctggcgtctcctcctaactgcgtctaagggacacccacgaccttggagctatgagggagctgggatgagtatgaggaagaacaagaacaagtgatcactctgcagattagtacagtcaacccttcagcctgcaaaacctaggatgcttttattcacacccatactattataatgccaatgtgacatttccagtgatccttggttttccctgatccttgatcagttgtgtccagctcatttgcaaccccatggactgtagcccaccatgctccatgggattttccatgcaagaatactggaactggttgctatttcatactccaggagatcttccggacccagggattgaaccgcatctcctgcattgcaggcagatgctttacctctaagccaccagggacacccatgtattttcccataaattaacataaattcttccattatattcatgcacttacaactcctcgtggccatctctcttccaacattttcgaggagcccaacacccttgatccctcttgtaaactggagaaattgggccatataacatcaaaacacacatagtctcactaatggcagaaaagagtgccagtaaaatagagggctgggtgatttgtaggcaactgtgatgactcaatacattaaactgggctgctggttaaaattatttgggaatcccagagagttctcttgtgttttccacatcgggaatccataaaatcgattccttagccccttttcccaatgacaattttagcactctgctcttattcaaataaccacatgccacagttcagtagcagccttcctccaaggaaacactattttatctttgagggtgacatgctctgagcttgggagcgatgaccagtagcacagcacagatggacaggaaatggtgtgcctttcacagcatgctgctcctatat

SEQ ID NO: 59804 - DNA, 1619 bp, Bovine  19866881298770
  misc_feature (1)..(1): n is a, c, g, or t
nagtactggagtggggtgccactgccttctccgacctaccttgaatgactgttaaataaaagtctaaagaagtggagaaaaaagaagtgtagttaaagaagcattgatttgcattctgctgtccccccaggacacaaatgttaaattaagaaaaggataatcacatcaataggataaaataataagtagacttgtcaagtggcaagagactcagataattcttcataaaattgtcagtcctttattaccaacttccctgaagaattcaaagcaatgacttcaaagtccccttacgattctggaggtctgtttttgcctgggtatactgagcaacctcactgatctctgcaaaactatcttcacaaagaaacagcttggttattccctggagaagctcaggaaaagaaataccttccacttcctttccaccttcttcacatcattctgagagagtaatttccagcccccttgatgtcaagtgaggcaattaaatgatgatcctagaaaaactgatcaattccagctacttcttaaagggttaactctaaagaattaaggaaacacccgtccatgatgcaagacatataccataaaatattgctactgttattgttgttgttagtcactcaatcacatccgactctttgtgaccccatggacggtagcctgccaggttcctctgtccatgggattctccaggcaagaagactggagtgggttgccgtttccttctccaaaatattgctaggttcagacaaatagtgttgatggtgctaggcaagtacctcttgtttgtgaatattcattggaaggactaatgctgaagctccaattctttggccacctgaactgaagaacattagaaaataccctgatgctgggaaaggttgaaggcaagaggagaagcaggtgacagaggaagagatggttagaaagcttcactgattcaatggacatgaacttgagcaaactctgggagacagtagaggatagaggagcctggcgtgctgcaatccatggggtcacaaagagttggacttgacttaggaactgtacaacagtaacaatactctggaaactagaagaggcaaaagcctgctctcagcactgttcagaacatcctgttaattgagaccatccctgtctcatgcatattcaatctacctgcagaggggatccacggtgagcatgcggaaggtgcgcttgtcactttctgcaactaacagccttgggcaggcatcctgtcccatgaaggcatctagaaaagtctggattctactttgtgtttgctaggactggttccagtagaaactgcccctataaatccatttctgcctctttttaaccactttggaaaccctgcttatgtgtctcatatcaaccccacactcattctcctacacttcctaaaaatatgctctctgaccgagcaaactttgagaatatcttgctttgcaggatcctacctccggacacttgagacaacagttgaagtgaaatttcctctggcagtcagcaggtgccgaaggtatgggggagctgctcacagaaagcgaactaaaccagggcgctcctggggcagctgtgaagtcacactggggcacacaatgcctgacccg

SEQ ID NO: 59805 - DNA, 788 bp, Bovine  19866881345115
  misc_feature (1)..(1): n is a, c, g, or t
naatagtggaattaagaatgacagaaagccgttaattgatgtaatttttttaaaaaaagaaaatcagtatactaaatttttttgatgttttatggacttgaaacaaaatgtttttcacttatagacaggtgattggagttcatttttttagatagttctatagctgagaagtttctagtcggtgtacacactcatctatcttctctagggctcatgacaggtattttccctgagctaatcttcccttgacacatttctgaaacataagaggaagccaaccttaactctcatgtcaaaaacaaatgcacgatatggatacttaatagatgctgagagcaaattagcagtaacaagttcagtgttatttacctatgaaatgaagttgagatactcagtgacaactgcagttaccaaaaagcatagaagctatagtgcaagagagcaatttctcttccatctaattgtagtgcaattcaaagcaggatattattaccaactaaatgtcctatagagtacacgagtccaatgaacaccgaggaacttctggagatacttatatagaaatactggtttaagagggaacaggaagtagtatattttattagaggaaaaaaaagtagatttaaatagctattctgacccgctgtgcccacaacgcattaaatatcctatagttaaaatttctttccgcagtcttctgacaaggcactggtttctgtttcccaacacttacatcaagcagtagaataacccttcgggggtttcctacctgttaaactgggctactg

SEQ ID NO: 59806 - DNA, 1025 bp, Bovine  19866881398775
  misc_feature (1)..(1): n is a, c, g, or t
naaccaaggccagaacccctttcttgaaagtccttctggctccttcctggctccagcactccttacaagactttgtactttgtgactcttagggttttcttcctccaattcccctagcctgttggtaggtagaccagaggagagtaacacaaacctaagtgatgcaatccgagttcggagctataagacacagtgggatggaaaggaaaccgaaagatactattacttagggtgagttactatttcttaactgtatgggaattttctcgatcaaagcgtgtactcaatcttgctgctgcgactatttcagaggccagctttgcctgtacttctcagtgatttaatactgttggtaataaatgtgctgcagtaatgaacaaaacgtaatggactgtgttggcaagtggcatggcttgtgactgtcccacttaaggttttttaaattcaatgcagtgctgctctggttccttgagaagctctaatcttgtgtatatagataaattgtaatatctttttgaatttgtacatgtaaaaccttctcagcaccttttctcaggctgtttttaatcatttgccaagaatataaaactcaaggtagtcctcagtttccaggccaaaaaagaagaactggtatttatggtaggtttaccattgttttcacacattctcattaagggttttgcaaataggatgatgcatttacatcagcagtaatgttcaatggtttggtctattgaacaaatattattaaagaatagctgtcaaacgccttttttctaaatatagagcttatgattggacttcacacaaaatttcattgtttctcaaactttattttaaatcagactcttacctttcttttaaatgaaaatgaaagtcactcagtcatgtccgactctttgcaaccccatggattgtacagtccatgaaattctccaggccagaataatggagtgagtagcctttcccttctccaggggatcttctcaacccagggaaagagcccaggtctcccacatttcagg

SEQ ID NO: 59807 - DNA, 1581 bp, Bovine  19866881647070
  misc_feature (1)..(1): n is a, c, g, or t
ntgaacccatgttccctgcattggtgggcagattcttaatcactggtccaccaggaacgccccaccaaggcatttacttatgtgtggaccaagagtgagtgtgttcttcagtgccatttgccttcagcatacacgaagtcatatctggaatcaagtagaacagcaccatgtctccagcccattatagtgaggtgtgagcctgcctgtatagattaatgctctagccagcttcccagttaacacactcattaatttgtctccatcgagagtagatctttgtctctacttacttacctagtctcttacctcttctgagaggtataagaaatctttttctttctgtttggttggagaatgttgctatatgagtttttctttttcctttttggactgttctgtaccctacttttagtattattcattgggtactaaaaatatttatatcagtccactgtgtataaaagctactatcaaggttccaacaactttaaggggagagtctagtgatcaaagaagcaaagtcttattccaaaatggcatttgtttgggaagtcacagccctcgagagaattgtcttggtcttccccctgagcctgttaccctgccgcccactggaccctgcttccctccacgactccctccactcctatcctgggcttgggacgatattactctgctttcttcataatttttatcacttgttgaactctcaaatttgttggtgtacctattaattatctgtctcgcctccgaaatacaaacactctgaggggctttgtcagtcttatactccattgcattctgggtgcctagattaacttagcacttaataaatgaatacagggccaggggtgagggtctggaggcccaggatcagctgtcccccaagaggcctcctgtggcagcagggtcccggagatctctcaccaggcaaggcaggtcatggcctccccaagacttgcatggtgatgatggcgtgggctttcccagcagggttgggggatgctatgtgttcagaattgtaagagttttcctaattcctttaaagagggaaagaaggagaatgacaccagccaaggaatccttgaaaaaagccgcctgcctattgtctgttcccatttctctcctcattcactgtgctaagcttttcagatgtggacgtgtggctttctgagagcaggaagagctctcggtgtaatcagaggcccggtgatgacagagaacattccgtacctgtctttgattacttgggtaagcttaacctcaattaaggagacagagtgttcacctgatgggtttgcggtgggcagatggcgctcacacagctgttccaggatgccaggtggagggagggcgttgagatggaagtgagggcaccctcttctcagggagtcaccgtgccatctgctccaaggtgactgtgtttcaaaggaggcacgttaacttgttcagggaatggctttgcaggacagacgttgctgtgtaagtcacctgttggggtgtgaacgtgtttaaagggaggggagcagtttactccctcccactgacgaaagcaggaaaagaacaggcgcagtgtgtgcg

SEQ ID NO: 59808 - DNA, 2576 bp, Bovine  19866881673114
  misc_feature (1)..(1): n is a, c, g, or t
ntttcaaatgagtcagttcttcgcatcaggtggccaaagtataggagtttcatctctcattgcccgggtgttattttttcctctgtaaggtgaagctttgacttagctgatctctgaagcctatcacaccttaaagcaacctgcatctctgcacaacctgaccaatttttctgggcccaaggaatcttcattctttgccgctggcataccacgtgggtcgtcaggcggtgtatcttctccctggtgttgtcctgtgtttagtacagctcagatcctgtatttttttccccacagtgagtcaaatcacttgcctgtgtctggggaaacggccctgatgtccccaggtggctcagttgcaaccagcctgggatgataatttatttgctgtcattccgtgtatacatgagtcccctaaatacatataacaccactttttatgtcctcaggtgatggggtgcttatctagcttcagggactttccagcgaagaatttcttgaccccaggcccagacctcaaagggccttaaattccactgagtgatcttcctcctttgtgtaattggcccaattagtaacgtagattttctgcaaaagctacaacctccatccgactgactttggaggagagtgaataccttttttacagaataactctgggaccagtttcatcctaggagaggagctgagtccactacggcctttctctagctcatccggcatcacagctcctttctggagaaacgcctcctatcacgtttcgccagactctctcgcttgcggtctggtaaagtagctcagaagtcatttaaactaatgggccaaaatgtctcttgtgggctgtgacagtccctcctgctgatgccagtaccagaggtgtctgagaagttttcttcacccagctgttcagttcttgcaggtctttagatgaagaggatgctttcaaacaagacaaagaaactgagtccctgcaggcttttcttctatctgttcattcaaactggtgttgatcacaacaattcagacacgtaggagatcgaggatctgatttatggcagagacaggtttgcaaatagttttaacagagggctaaaggagatcaaatatgtatgagtgagtggctttgcttattatactttaatcagggaacactgaaccggatgctgtggtttgaaatgtgtgttaagatgcatggggatatgttgccaatgtatccaactctaatgaatatattttgcacatgtcataatattgtatgtttatgacattttttcagtacagctttttaaaaaaaattggagtatagttgctttacagtgtcgtgtttctgctgtacagcgaagtggatcagctgtgtagcgaagtggatcagctgtgtggtgtacacatgccctctctttaatggacttgcttctcgctcaggtcaccacaaagcatttagtactgttccctgcgcgattcggtcagttctcattcttatctgttttctacacagtatcagcagtgtatacacgtcagtcccagtctcccaggtcatcccacctgggccccattttgctcttggcatccttacgtttgttttctacatctgtgtgtctgtttcagctttgcaaatgagattgtctataccatttttctagattccacatacatgcattaatatacaatatttgtttttctgacttacttcatcgtgcattacagtctttaggtccatccacatttctgcaaatggcacaatttcgttgaatacaacttttatttgctttcattatttttacttctgggcattcctaaaactgtctgaatttagtataaattcaaactactgagttaacttttctcttaaattctggagttaggacatttatgattcccactgatcaatctgcaacttcagttttgtgggtgactaattccaaatgggtgaaatattaaaaccaatatggacacgtggggctgggtatcgataacactgcaggaaggcaaagacaaggcccacctacttagtattaaggctggttggtggctgtggaatagctaagctgaagttaagtgccctgtcttgcttgttagcttgttaccgattactgtaaggagttagtcagacctgcctttgcgtttggatattcagttacagggctcttgtgtctcacatgaaaggttttagctggataaacaatctctttatggctgcactgtggaaatagaaaaagtttaagtgtttcttctgtttatactctctctctgcaaagtgataatatctgtaaagtctccagttggtatttgaatggtaatggggcgtgcattcttattcttatctaggacatgcataaaatagcaaactgtgtgtaaatatatgccagaaagaagccgctcttttaaacctatgtgggaagttcatgtggctgaacacttgtgatttctctgacttccaaattctttgatttttcacattttgccctggttttctgtcatagaactgtactggatgccatgactggttccatttaggagaagttattagagtttctatgggagaacaattcctctggctcctaaggagccatctttttaca

SEQ ID NO: 59809 - DNA, 1359 bp, Bovine  19866881866721
  misc_feature (1)..(1): n is a, c, g, or t
ncaatcagttttgattacttcctttgaaatgtctaccagtaacaagatggatcaatgctcttactatgcaaatgtttcttatctatttctcagctttcagatatccagacactggagacagttaccagcgtcatagaagatatagaccctcgcctcaaagacaacagagtaatgattcacaccagctaacaaatgcaccaggaaaattaaacaacaagaaaatgatgttgtatagtatcctgataacaagatgagcttcccaggtagcacagtggtaaagaatccacctgccagtgtgggagatacaagagacacaggttccccgaatcagaaagatcccctgggggaggacatggctacctgctccaatatccttgcctgggaaataccatggacagaggagcctagagggtcacaaagagttggacacaacttagtgactgagcacgcacacacgcacacacaataacaagacagggacatcacctcactagccccacagataaaacattttaaatattttgtcacctcaaaatcaataccatacatgtaaatttcagatatttgtggggaaaggctcaatacatgttcccattgctcccactgctacctattccagaatattctcaagaactcaaacactacaggtgtttggtgggtacgggcccctaaaataagtgtcagcaaagggaaggagcagggcaggagctctgaacttgtacagaaaacgaaaacattctattcatgcagctctacatgatgatctgatcttggcctagctccttagccttgctaagtcagttttcctcatatgcataaaattaaggctggattaaataacccttaataccgtctagctctacctacttgaattggaggtaaaattatcttgagaaataatattcctagattcccaacactcccattttttcaagattctattgacataattcaagatattctacagttcagcttttgtttgtttgttccccccaaataagtgctttatctgaaatttttagtgtcaatccaacattaaaagagaaggccactgggtgttgatatgaacaacaaaatcagctgagtccaactctagaacctattacagctcacatgaattcatgcaacgaatactgactgaatgctcacaatgcccaggcagtgttttaagtgcctgagatagatcagcacaccagacagtaattccctgcccgatgtgcagcttacattttattagaggagtcaggacaaataaaccaataaacaaaaagaggtgacatacatactgtattagaaagtgataaggactacgagaacagactaaacaggagtaggcaggagggtgggggtaagagggag

SEQ ID NO: 59810 - DNA, 2578 bp, Bovine  19866880245079
  misc_feature (1)..(1): n is a, c, g, or t
nccttttctcctttgcttttcgcttctctttttttcacagctatttgtaaggcctcctcagacagccattttgcttttttgcatttctttttcttgtggatggtcttgatccctgtctcctgtacaatgtcacgaacctctgtccacagttcatcaggcactctgtttatcagatctagtcccttaaatctatttgtcagcattaaaaggaataaaaagataggagtgagtaatgaaaatatggccaatcagggtggtgacatgttggaaattcccagaagctaggaagttgtgcttcctaacacaagtttaagggctagttctgacagcttgggtttagatacacaatttgcaaaagaacagggcttattttcaaggtggcaaacttaacttccaatctttctacatctggtctctccagactgaaaattcactatgataagaaaggccaaaccacaagtttcaaggctacattttgaaccacttacctcaacttccacccttgtgaagggctggcaccaagtaagcacacaaagttgaatgctgaggagaaaagagagaaggccatttttatgtggtactacctaaagttgctcaaccatcctttcctgacaaacaagcaacgtttgtcactctttgtacgtattctgcatttataaatgccctctgctgctttaccctttttgggcttagagacctattctttttaaaatatttaaaattttttattatacattctttttaatattcttttcctttatggtttatcatgtgctcagttgctctgtcatgtctgactctttgcaatcccacggattgtagcccaacagactcctctgtcttgggatttcctaaaaatactggagtggattgtcatttccttctccaggggatattcctgacccagggattgaacctgtgtcttgcatcttctacattggcaggcaaattctttatcactgtgccacctgggaagcccccatggtttatcataggattttttttttttaattggaggatagagaactattcttgatattcaaaagttaaattgccaaacacaataccaaatatgtatttgtgggtcagagccacaggtcagcagaaggaaccccaaatttgaagtctctttgacaactaagactcctagacctagagaaaactactcacagtcacattttaagatatagtaatttgtctacagaaaaactcctgagtagaatattatgttactaaattatttttaatagtgaaaaaaaaatgtgggcccataaaaataaaagccaatccacattatctctcattaagtaagtttttctttaatgattaacagagagctttggaattcaatgatgtaaatattgatttgaaaattctgaacactattaaaagaaaatgaaaccacacacaacatctctcgaaactcaacttgtccacactacagacaaaccaaacagcattttcttatggaattctcaaggacaactgggggaaactgatttggacataacagaccccagtgctaaatataagatgatgggagatgagaagataaggtaaaaacgggagggttaccacacaagtgcgacgtgacttaagatgaaagttgtttctttagaagatcttgtgtttgtttacaaatcctaagatatctttaactctgaaaatatttttttcctttcttagctgtattctctctcccatttttcctcctgttacatacttctcaggttagaagcctagattaaatacttaaccacgctatttacccccaatctcctatttgaccttcatttccactggtccagctgcaaaaccaaaaaaagtcacaatgaacccaaagtcactatctctaagcagacttgtaaaggccctgaggatgacatacctcaggaaatagaaatatgttatccctcaattttcaggtatttttttcctaaaatgttctcatactatttgtttctgaaaaccaggaattccaaattagtaatgacaggaaagatattctagccaagggaataaatagatatcctttacagtttatgtgccctatttttagtgttatttacttaactctgacgaccaaggactaaagcataacaggaatataaacgtctcacaagtatcagtgtttattaacacatgtaatcagcccatctattctgatttaaatgtgttatttcaaagcaatttacatacacaaaaaatggagaaaataagtttgtagtgaaaaaaatctaattttcataagttgtttggattgtctacaatgtatttgaaggcaaagtatgatttcttttaaatatttccaagtgatggtcacctatccatcaataatttgagctctgtgtgtaacagtatcaaaaggcattactgcataagctctgggaaagccctcaaatccaaaatgttgtcttttttttttttttaaatttgggggaaggtttgtcattttatttttctcttctgcagcccaaggccagccaggttccttgaggtgaacactgagggatgtcaatgttgtctgagcaagtaccaaaggaggcacctgaatagggaggggaactaaacaaaagaa

SEQ ID NO: 59811 - DNA, 1817 bp, Bovine  19866880424343
  misc_feature (1)..(1): n is a, c, g, or t
nccctggagaaggaaatggcaacccactccagtattcttgcctggaaaatgccatggacggaggagcctggttggctactgtccatggggtcgcaaagagtcggacacaacctgagtgacttccacttcactttgcccttcaggctttccctaaagccccaacacaaagaagtctttccttttcatcctctaaaaataattgtacttgtcttttgcagacatcatcaccagtttatgaagatatgtttatttttaagagacaagttatttatcatctatcttctttatcagatctgactggctaagtcaaattctatctccatcagtttctaaatgagtagccttggaatgttccctaacatttctgtgccccagtttctgtaagaaggggctaataaaagcccctgcctctggggcttgttgcaaaggcacagtgaaataatcaatgaaggagcaaagaatgggatggattcttaatagaatttaaatattttactcatcattatgaccttatcaccatctcgttcatcatcaccactcctaccatctccatcagcagcaacagcatcatcatcttcatctttagaactggactgtgtctttcttgttcaccattgtatcctaactgtcttagcatataataggactcagaaaatgcttagtaaatgaacaaatgcttctctgtaaacacaactgttctcctaaggaggcatttcctttgagccagtaagttgatcctccttatttttcaagtggaaaaaacaaaacttttccccaggtgaaaacacttaaagggagcctgtgatggaatcccaacatgtcacgtgtgcctggagatattttgccggtatattttatgggaaacatttcgaggctgtgaggaagtgtaattttccttgtgaaatgtctaggtttcttttctcggtcatttttcatgtgcttgtcactttcccagactaattggtgggctcctttcccccagctgtctatgcaggctctcgctcacccagcctgtccagcgctcagtgcagcccacttggggtgtcaggagaaagcacccaggaaaggagtcaggacatgtgagctctgtggggcttcaggaaggtctctgtctttccctgggcctcagttttcgtatccagaatatgaaaagttttgactagctgtttgctaatagcgttgcaatttctaaaggaagccagtgtctcaaagttgggccatttccaattctgggaaggtctttgcctttgtgctgttgaaccttatgtactcccatcatcgctggggctcaggggcccccaatatttcaaatcctcagagtgcagtaactggtaagacagctctgcttttagagtgaatgcaaagcccactgctataaatctgtgcacagacagttttaattgtggatcttggtcacagcactgcaagggggaacagaggcctgtaattcagttcttctgcactgaagggttgacagtcaaccactcagcactgggaggaaaggcagccttcaataggggacccaggctcccacttttccagataacctctggaggactaccatgcaagggatttgtgggttccaaggacctcctggaggaacccaggctgactgttggaagggctggcagcccacgaacgatgaccttgaggtcattaggagaggacagggagatttcctagtagtccagctcaacctgcaaaggtgggccattttttctggcagagagggactttaggtatgacatcaaggatgccactcataacagcctcttacccagtcttcatgggattttcctctaagggaatagaaaaat

SEQ ID NO: 59812 - DNA, 1775 bp, Bovine  19866880439261
  misc_feature (1)..(1): n is a, c, g, or t
natttaattgttgactttttccaattaaaaaaaaatgcgacataccatggaatattctaaaagttcagcaaaaacaaatacacccagaaaacaaatactgtgcccacaattccagcttctgagcaagttgggtagtctttgaacatggtgactgtggatgcagttttaagggttcaactacctacagccaaacctcagtcctagcatatacagccatgtgattttggacagagtcacttgacttcttgtgacctgcctccattcactcaaatttaaatggagatataatagtacctgcctcataggataaatatgaggaataagtctacaggacttagaatagtatctggcacatagtaaacatgacaaagtgtttttacctaacattatatttaatgtctgttttgacataagtaaaggtttttcataaatgtttttttgagcttccacaaagttctataaagggatggatcagtaatcaccaggggcgagttcaggaaaccagggaggcaaaggacagggcttcttgttggtgccacaggctggcagaggctactccccaaaacctttatttcaggatcccttttttttttggcagcatcctgccacttgcaggatcttggttcctggaccagtgactgaactccagtcccagcagtggaagcacagagtcctaaccactggaccaccagaggattcctggggatccatttttcttcaccacctcctgcaaaacccacccctccctctgctatggatgccatcacctctctgcccgcacccaggggtctcccctccagctccggagcgccttctcctccctctgcctgctttgccgctgacagctagaagattccaagccaaccattttgtagaaggtccctcgtctgggtttgtttgatgtttccctttgattaaattcaggttatacatttttgagaggaaatcacagtttcatttcttcacatgaaaatattgaatccatttggaattaatttgggtataaatgatatatttttcctcacttatatgaaacacctcctttatcatatagcaaatatttaattgcatatcttttatctttctgctcttcaaagccagtgtcacactgttttaattaccctggcttcgtaatatgcaccccccaaacacggtaataagcagagtccccctaatcgtgcttcttttctcagaaacttcctggctcttctcgctcattaaatcttccagatgcaccttagaatcgtgttatcaagttccttaaaaagtacctttgtgatttaggttgtcgaactttgaaatcactgtgggcaaaacgggcagctttaatactaaaccttccatagaggagcagtgtctgtgtatcatccacactttctgtgactcggtaaagctttgtactctttttcatgaagttcctgcccttttctctgggagctggtgactacttttgagtctcttgtgaacagactcatatctgtttttcattgccttctctgactgatgagtcgctgacaggataacacagaggctaaggtcagagtctcttcagatgactacttgggtttgaatcctgggtcgctcactcatataccttgttgtatgaggcaacccatgtgcctcagtttccacgtctgtgaaatggggagactgacgtcatctgcctcccagggctgttctgagaagggaccacagaaggatacctagcccatgtttaggataaccactgcaatttcctcacaggctccttacgacccctagggcttcctaggaga

SEQ ID NO: 59813 - DNA, 925 bp, Bovine  19866880712099
  misc_feature (1)..(1): n is a, c, g, or t
nggtctttgttctttgacccccctcctccagagcctgtgggtgatctttccacacgacacgttccctatttggactttgagaagtaaaaacccagccgccactgctgtgcacccatacttgagcctggaggaatgttaaaattcagctggagaggtgcctagtgctacagaagcctagatttttttaaaaaagggatttcaggcaagaggagaaaataaagaagcaagacttaaaatgtcctgtgaaatggagagcattgggccccccagcgcagacatccgtgggagatgactcctttagaaagcagtgagttttgtgtgagcacagatgcattttgttttcctaggaggaatcgatgattaaattatcagaaaccaagctcaaaaccaggctgcctgcatcttccccagccgtccccagtgtctcctgcttatgaggtgccagctttatctcggaagctttagtttaaatgcccaacatatcttattaatgaaagtaataagctgttgtttatatatgtcataatggggaatatgactatttaatataaatctgacatttaaattccgcttagttctgagatgtggacgatatcaaggcataactctttaccctggagtaaaaactccctgggtctgcattttccagcattgaagttttcaaagtaatcaggttccctttttttttttttctttccagaggaaccaaattgtgaagacatctgttctgttattaatttcacataaatcttaagctcctcaaggccagaaatgaggcttcattcacgtcgaattaatgaaacatgattgtaagtcccttgcatggaaatgctgtcacacaattctgagctgcttagtgcactgagtaatctcagaaactgccaggggacagccacgtgaaatccaccctcccctcccgccgcca

SEQ ID NO: 59814 - DNA, 623 bp, Bovine  19866880714809
  misc_feature (1)..(1): n is a, c, g, or t
natgggtttcatatccggagggagagcttttctcatcattggggggtaacagagccatctggtacccccagaaggcagcacgcagacaggcgtctgggtgtggtttcttttcggtgcctgaatcatttgcaagaggtcgaaggactagaaaacacagacaattatctctcggctgctaggacatgagggctggaaggccttggagatcagttggcagagtggttttcattttctttctagcctcagaattctttcttctttcaaaatatcatgcagaactctaattataaaagagataaaagcagaacactctggttaaggtggggatgggggcctcaaaatcccacccactgagccccagaccctcctccttcagcagcttctgtgaagcgcctcagggctcagcagaacatacatttagaaccaccacttcataagcttccttcattcccaatcctgacactcagagagggtaagtgacttgtccaaagtcacacagctcacacgaagggcagagaagaaacaagcaatgccagttataagatttgtctgctttaatgactaagcttcagaagcagataatttgctccgtggccacacctggcctgccacgtgctttgaca

SEQ ID NO: 59815 - DNA, 2196 bp, Bovine  19866880898909
  misc_feature (1)..(1): n is a, c, g, or t
ntgtgggaagacctacaccccatcctctaggactcaaacatgagagatccaagtgacaaaaatatcccctactcctgctcctcgggctcctcctcagcttgaattttatgcgaggactctgatcagtttggctcaagctggcaggagcctttgagcgtgaaacgtgccctccttccctcttttctctccctgtctgtggcaacagacagaactgaaataaagaaggaaacagacaacgcttttctttgcagcggctctgcctcttcagacggggcgtctgcagcacacccataatccttgtgtcagtctgctccctagcgtcgccggccgcgtccagcatctgacaaactccaatctgcagctgccggcagctcctttctgagaagcagctcacagctccagccgccctcctgcagaagaggaacaaagcccagcggactatcttgctatcttctgggtggcaaggaaatctcaattatacacccaagggatgtggtttatgaaaaactagaaagaatgtttaaattgtatacgtaaattgttttgttttacaagctggggtaaatcagcacatttgcagcccatatttatctgatccactccataagactctttctgaatgtatgccattgatgtggggggagatgcctatgcaagacataaccgaccccctaaattcaattagggcattagcaaggggagaatggaaattttgctctggggttagtccacactgctgagaacttctcggaatagttccttggctgtaaccgaagattgaaatcgaaggataaaatttccaacggatgccgagtagtcagaagattggctcgggctcgcccttttaagaaaaagatggcaaaggaaatgccctcttcttgcttgatttctagctcattttaaaaactctcttctttgtgtctcccccaacatagcagagtcaacatttattgaactagatataaagcttcattcacattctctattccaaggatcataaatggtggaaaatgggaatacaaaattccacaggacaaaccataaattgggggaaaaaaataccccaaggaaggaaatatttgaaaacaatgttttatttttatacaactcttagcagcagagcacaccccagggatgtggttgatgaaaaagtaggagtgtttaaaccgtgtatgtaaacttattttgttttgcaacctggggtaaatcccagatagaggtcacagtgatgagaaaagtttgaggtggcaagggaagctaggcaggaataatctcaaggctttgaccgtgggctgctgagccctaatcactgataacaaccgtcaagctaccgaggggctccacttcatatcgatgtggcatttacttctccagaaagtcccccattcggaccaacacttagggtaagataattaatagtcccttgagttatagattctgagttaaaggtaacagtacataatagaagtcaaggtcatgcataatacagtagcttctataacaaaggggattattaccgcaattaccgtcctattagaaagaaagattttagaagttttcatcgttttaattcttaaaccttcctcttgccactgaagtttaagctcaccaatttatgatagaggagtaaaaacaaaagctttcttccccgagcgtccaagtggctactggggaggtggagaggcagagaatggtgatcctatttagcaggaaggcttttgagaagtttccacagactggacctgtctactttgctttgctccttcctgtgttgtatcaagtacacactcaaatcctaccttagatgtaacttttttcttttctttttttgctatacaaaatgggaaagaagtttctagttttgtgtataacattatttattcattttcaacagataggattgattctattttcctttggcagccactgattccgccccccgccccaccaggtcacaaagatttttgaaggcccttgagaagtctgaggctctggccccttgcctgttgtgtccagtgaaggcaacagctctgtgtgccaagacctaaattggacttgaacccaagagcatgtttcccacccaaactatttagtaactaaatttgctcctggctggaagaaagctagttcctgtcctttaaaccaaagcaaagcctaaaaaaaaacctgttttaaaaacttctttaaaaaaagagt

SEQ ID NO: 59816 - DNA, 1636 bp, Bovine  19866880899411
  misc_feature (1)..(1): n is a, c, g, or t
naatagtaatgaaaaagacgaaaaagagaaacaggacaggtatttgaaatataatagccagagttggaaaagtgtattcataagctttgactttatttccaaaaatatacactgaggaaaaaattacagagtataaatatgtgtatttacaaagcaatatatcccagtattattcataggaaaaaatagaagtaacttaaatgtttaactagaggaaattggataaatatgttacatctgaagcataggatattatacagtgcttaaacttacatttttgaaagcttacgacatacaaaatctttcatgttttattaagcaaaatggggagctcgcctgacaaatagatataaagtttatagactgaaatgtttaaagaaacttgaaatgcatgttacttttattttttattttgctttccggtttctcaaatcaatgttctaaaattaacacatatttgtctttgaaatcaagtttaaaagtagcgactatcttttacaagtgtaaatattaagtaaatttccctgaaaattttcaatgaaataaatggtttctaggaaaatataattgatcaaaattgattcaagacatttcaaaactatcaaaaaaattgcctgtgaaaaaaatctccagggctagcctgtcttattatgaatactttcacatttccaggaggggtcaaattaattccactagtatcattccaaagttagaaaaagaaagtttcctgatagtaatgcaaaatataatgaaaatagaatagatatctatagcccagttgcacttataaatatagatacaaatattttctaaattttaaaaaatgaacaaatttagaccaataggatgttaaaatataacaaacaaaataagattccaaattttagttatctcagaaattaaacaaagggtttaacatgctgaagttgaagctccaatactttggccacctgatgtgaagaggtaactcattggaaaaggctctgatcatgggaaaggttgagggcaagaggaggagggggcaacagaggatgaggtggttgaatggcatcactgactcaatggacatgagtctgagtgaactcagggagatggtgaaggacagggaggcctggcatgctgcagttcatagagtcacaaagagtcagacacaacttggcaactgaatgacaacaacaataacaagatgaaattttatatcaataaatcaaaggacacaattgtctaatcaattcaatagataacaaaaaggaatttgatcaaattcagtatccagttcttaataacctggaaggagtaacatatttctttactgtaggaaagtctggggtagtagataaaagcaaatgtcagtaccaaatttcatggatatgaatcctggcttcctctactcactagaaacaaagaacataatcctgactgtgctggaagttctagcctcagacatttttttttttttttttttttgcaattggcatgatgtctatctggaatattcaaaagaaaactttatagttttataagacacttttgaggaaaaggtacttgggacatgagaaaaaacaaaaattcactttgcattgcaaatccctttctactgctgagaactttaaaaaaatgtttatcataagcaggt

SEQ ID NO: 59817 - DNA, 1876 bp, Bovine  19866880954937
  misc_feature (1)..(1): n is a, c, g, or t
ntgatgttaactcccttagctgttttgttctttggagtagaatgtggagccatttcttaattgctctatatttagctttgtttaaaaatctataatttaaaaaccaccaagggctgggctggtaattcagcttccatggtccatttactcgttggcttttgcttctgagccagcccaccaaggtgacagcgtgtgccaatcacgatggaagtatttgttagcagaacatctgctccctgagagctggtccagatctagttgccaaaccccagaactaatctcaggaccccttagtttagtttcctgaaaaggagggctggagagggacagcagaacagctggggcctagtgcaaggggtgggaatcatcattacatgtccaggatcaattcatgtctgggttgtgttacttattttttatttttttggccttgccagtgacatgtggaatcttaattccctgttgtttagttgctcagtcgtgtccgactctttgcgaccccgtggattgtaacctgccaggctcctctctccataggattgtccaggcaagaatactggaaggggtagccgttcccttcttcaggagatcttctggatccaggggtcgaacccagatctcctgcattgcaagcggattcttttactgtctgagccaccaaggaagcctcatagttttattgtctacatttatataatggcgagtaaataagagcctactttagtgtgactgaagttctgagctccacaagaaagatgttagcattgaacaggtgatacataatgtattaaaaagcaattatttttttctttccttctgatggctggtagcttgcctgtttccccttaaatgtatctatttcctacacgatagctctcaaaaaataataataaagctggcctttttaaataagaacactgattatggaggatgctttgtcaggttcgcaggggctgcaaagtgtgtagaaaggttatgctggtcaacatgatgcaaggtgggtggttatttattcacataagactctcccagaacaatccagaaagagaagcctcaaagacacacttgaaaggtgacggtaagagtggaatgcatcagccaacctgcgagggacaccatcaccctgtctccctaattatgggcctgttgcaagtctgaagagagagttctctgtataaaacactcgaatacagatcaacgctggagcctgtgacaccccccttctcttcccccacactgcctgatcgagatgcttctgtacttcagcagaacctggaggcgggaatgacacttcacatcactaatgaacctgtagccgggcatctcagactctcatctcctctgcctgctttgccccagtccctgtccagccagcttggggacagtggagtagtcgctgctgtgctgagtgacaggcttttggcctccaatcagccaaccagtgatttgaaacagaaaaaggtagtcttgagatttgaatccaggacttgctacctccaaagcccatgttcttcccactaagaaaatcccatgggcttccaatggtttaggaaaaacaagatatgtcagtagcctggcattcaaggtctcagtttccctgacccttcttctatcggccagcatctcaaatctggcatggacagcctctgcacttatcatttccagaatgctctttgaactaccttgcaaacactctgtatctggaatccttgcccttcatctctcctcccttatgctgctcatagcttaacataagctctgggaagcctgttctctcctcttcattgggaggtatacaacctggtcctgtgcttgaccgtctgcttatctgaatcactccatccccaaacatcacagagcaagcacatttatagca

SEQ ID NO: 59818 - DNA, 2560 bp, Bovine  19866881038089
  misc_feature (1)..(1): n is a, c, g, or t
ntacccaagctcaccaggctctctggtggtgcaatggtctggcacagaaaatctatttatggggatggctgccatagataaccctggggaaagaggctgacaaaaggaaggaaattgcagtgtcttcaaaaggccaggtggtttaggacaaagttgaaaatcatacacaatgatgtaaatcaaagatctttgcaaactggtagttcttgggctgaacttgacctccaggattttgtttaatccacacttggcccaactcaagggtttcatcttaaaggtgagtgtgttgccactaaataaaaataaggaaagttcacagaaaaatctctgaattgccccatctcaaaatcagaagatccagctacattgtgtccactcctcctcacggcagcagtctctcggtctcaattcctgccagctgcccctttgtatgtgactcacctgacctcagcagtaatttaagttagtaagccctaatttcagcaaaccctgagcttataccatttagtatcacagacctaaaccggttttataatagttccaggctacagtagaattgtctcttgggtggctattttccagtgagtaatcagcaatgaaacactgatataaaatcaggatgagtctttagaagtctagaatcaatgacccagtaaatgttcacattctctgccaataaaatcaaatgaaaaatgtaataatctataaaaatgacagtaagagaagctaactaatgacttaaaaatcttatattcattgattttttttctcttttttttgcctgccattgtgactagaagcccggtgaaggcagggactttgttctgatgaccgccatatgcccagtgcctaaaacaatgtctagtaccctgtaggcatttaccaaatatttgttgtgcaaataaacaacagtagtagttgagccattgctctgagcagtttataagtaagatttcagagatgctctttaacagatgaggaacccgatataaaaagcaggtaaccaacatgcccaacgtcacctggctggtcagtggtgcagcagaccacggaccgttcctggctcctccccaacctcttactgcagctcaatttctcagactgaaactgactaacgaaggctccctgagccagtccaaacctttgaatgtctttctggtgcaaagtacacactcactaaaagctttccaagtttgtgttattaaaagtgttatttccctgagaataagaacaggagggctcttaaagaaacctgtgatctaacaaaaaggccagaagtcaagaagttaaagaccctctcagggatcagtttcaatttctgcttcctcttccttaagccttcgtaggttcctgttttcccatctataaaaattgggaaaatactttctctgacctccttttcacaggaacgtttgctgggcaaaatgtgatggaggaaaatgcaaaacgtgtaatatttataataatacacttacttgacaagtttaaaatgtggtttccaatttcttatcttattgtccccacttctaagaactctgttgatagaccatggattgttaattccataaaaataagaaaagtgaggctgaaaagtaattatcacttgccaaacatcaccgagttttattgtttagtcactcagttgcatccaactctttgcgaccccatggactgcaacacactaggcctccctgtccttcaccatctccctgagtttgctcacacctcacgttcattcagtcagtgatgccatccaaccatcccatgctttgttgtccccttctcctcctggcctcaatcttttccagcaccaaggtcttttccagtaagctggctcttcacatcaggtggtcaaagtattggaacttcagcttcaccatcagtccttccaatgaacacccaggactgatatcatttaggatggacaggttggatctcctcacagtacaagggactctcaagagtcttctccaaaaccacagttcaaaagcatcaattcttcagcactcagccttctttatcatccaactctcacattcatacatgactactggaaaaactatagccttgattagatggacctttgttggcaaagtaatgtctctgctttttaatatgttgtttagggttggtcataactttacttccaaggagtaagcatcttttaatttcatggctgcaatcaccatctgcagtgattttggagcccagaaaaataaagtcagctgctgtttccactgtttccccatctatttgccatgaatgatgggaccggatgccatgatctttcgttttctgaacgttgagaattaagccaactttttcactctcctctttcactttcatcaagaggctctttattcttcactttctgccataagggggggggtcgtctgcatagctgaggaattgatatttctctcctggaatcaattgatattgattccaggggtgtgcttcttccagccccagtgtttctcatgatgtactctgcattataagttaaataagccaggggtgacaatatacagcccttgatgtactccttttcctatttgga

SEQ ID NO: 59819 - DNA, 1444 bp, Bovine  19866881099864
  misc_feature (1)..(1): n is a, c, g, or t
nccccttgtctagatctgttcctccagtgcagcctaagtacaacctccaggattgggtcctgctagtctataatctctctcccttcctgcttcagttcttggatttggcacaagctgccatcttcctagatacagtctaggtttagccttaagcattctggtacccattccccacatcccacaggaagtgtcctttcctggattatcatggcaagatgccatgtacagttgggcaggaagtacactgcacaaagacttccagctggagctatgagcaaggctaaaaccagcttgggcttcccatgtggtgctagtggtaaagaacccagctgccaatgcaggagatgcaagagacaagggttcgatccctgggtcaggaagatcccatggagaagggtgtggcaactcactccagtatttttgcctggagaattccatggacagtggagcctggtccattgggtcgcaaagagtcggacacgactgaagcaacttagcaaccacgcatgcacaaaaccagcctacactgcaagccggaccgtgtgttcttgcaaggggtttcatctgcccagaggaggggggaaccttctcttcacacaaggcaccatcagccttccaaaccatatccgagttacaagttaggagtgatgggtcaggttttcacactactcacaaaggtactacataggctatagtcacagcagggttttagaagagttggattcaagtcctggttggtataggacttgaggcatcacttttctgagttgcctcagtttccctgaaagtcattcttatcatcacaaggaaagtggggctacagagtaggaactctgacccttaccaagcacagaaaacagcacagcctctctgatttcaaaggtaaaagccgacactgtggcctaattattttcctgacctgagaatggcatttgatatagccccactttcagagaattcagactctaaagcaaagagagagaatgaaacttatttccaaggaaggcttggaagtttctgcagcttccccgatgctattgctgattgagatcattcaagagcattatttattcattctctggggttttttggactctgaattcaaaggtttcatttccctccttcactctctcactcttttttcttctctcttatcctctcccgaatatttgttacagttgcatttttcaaaccatttactgtctagagggtaagtggagtgacacagcttataatgtgcaaataaatgggaactaagctcgtcagctcgagtggaatgaattactgtcgccagtgaaatgcagtgatggggagcagccgcccgggagacgggggagggcgtgggcaggtactgctctggagtggccggaataacacttactatgatttatcaaagagcacttgaaagccccttagaggctttaaataggcataaaagaggctt

SEQ ID NO: 59820 - DNA, 2288 bp, Bovine  19866881130376
  misc_feature (1)..(1): n is a, c, g, or t
nagaaagaacttaggctcaggactcctgtaccaactctcagcccacagatatcactgaggaagttcatcctcatctataaaacagggcctatattcgttatgaaagtgctttcctaccttgtcaaatactgcacaactccggtggattatttgtgtttaaaagattatttgtttaaacagatctatccatctatctgtctctaatttacttaagtacatcaatatcaatatagtaaatttgaaaaggcagaaaagcacaaaaaggaaatgatcttctacctgaagattgtcaccaggaatatttatccttctggacctttttctgtcttttcctaacaaaactgagatcatattgggcttattgctgtgtaatctgcctttgtcacttactgtgttctgaccatttccccatgtgatgaaacattttttttaatattccagtaatatacactggaatattactcgttcattaaaaaggaacaatattgggtcgcttatagagatatggatggacttaaaagtctttcatacagaatgaaataagtcagaaagagaaaaacaaatattgtgtatttgtggaatctagaaaagtagtacaaatgaacctattcgcagggcaggaatagagacacagcagcagcaaacagacttgtggatagggcagcggggcaggcaaagacagggtgggactaactgaggaagcaggattgacatgcacacagtgccatatgtgaaatagctggcgggaagctgctgaatagcacagggagctctgctcggtgctctgcgatgacctagatgggtgggaggggaggatcacgagggaagggggggctatatgcacacacatagctgattcacctcattgtacagcagaagcgaacacagcattgtaaagcaactatactccaattaaagaaaacccacatataacccaataaagcagagtgttcatagatgtaaatgccacctatggatgctaaggatcgtaatcaagcttttacagattgctccagctgatgtataacagtgttggcagactgcagccctagtggccgcaggcatgtttcactgggctgttgcatcacatgcaaatccaaattcctgcctggacccaccacattcctgcctggcagcagctgacggggctgagtgatggtggttctctgatgtggagacagggcctccaggttaatcagtgtcccacctctcccaaaacgtgtgcgtgtgtgagaacctaacccacttcactcgcgttacttggctgtcctatggccattttcactcgggagccctgaaacatagcatgcccaaatgagtcacaggagaggatcgatgcctttctgctataatatctgtgcatgctaagtcgcttcagccgtgtccaactctgtgaatctgtggactgccaggctcctctctccgtggggattctccaaacaagaatactggagtgggttgtcatgccctcttccaggggatcttcctgacccagggatcaggaacccgcgtcttctgcatcagcaagcagatactttaccactggtgccacttgggaagcatactatagcatgtgctgtgctgtgctcagtcgctcagttgtgtccaactctttgcgagtccatggactgtagcccaccaagctcttctgtccatgggggttctccagcaagaatactggagtgggttgccatgccctcctccaagggatcttcccatgccctcctaccagagatcgaacccaggtctcccgcatggcaggcggattctttaccagctgagctaccagggaagccccaactatagtatacacatagctattttcagcatttgctctaatatctaatagtggatccattcggcccaacaacctaggatggttttggcaaagatggtgatgcagatccagagctaaaggagtacaacagaaaatgaggttggaaaatgctgacccacgccctgtgtcaggcagtctttgaaatctaggaaccatgcccagtcaaaccaggcccctagaaatccaccccctgccaagatcttcctgtgggtggtgtggggttcctacacaccgccgtgcaccttggccaactcaggcccccagcacgtgagagctgccagctctgtcgccgttctcaccacaaacctggaatgcatgtcttcatttattttgaaaagcttcaggactttttccctcccagatgttaaacattaaatggcagagctgatagagacggacccaatgtgactttgattttggcataggccataatgctctcgctgctggagga

SEQ ID NO: 59821 - DNA, 1061 bp, Bovine  19866881136035
  misc_feature (1)..(1): n is a, c, g, or t
ntagggcttaggtctttactgcctagaacagtgtgcatggtaagcggtggatgaacacttgttgaatgaatgaatgaatgaatttctaggccccaggacaacctatagtcagtgctggaaactatctccttgtctctgtgtgtgtgttagtcactcagctgtgtctgactctctgtgaccttatggatggtagcccaccagtctcctctgtccctgggattatccaggcaagaatactggattgggtagtcctttcctcctccagggaatcttcccaacctagggattgaaaccaagtgtcctgcattgcaagcggatgctttaccttctgagctactagggaagcgctctcctcttcccaagtcataattcagggacaaagaaggactcatttcagtcatgctttcatctgacttagtctcccggcccagggaggggaaggacccgatgtagaattaaacatgtgcagagcccagaccagctctttaaaatgctttagacaaaagcccaaacagaacagaaaccgtctaatccttgagcttatcctctcccactggccttgtcctctttcgaggagagagtcatttataaaattcagttcaatgaggtttccagctaattgaggctttcctgaatatcctatttggtgcattgattaagcacctctctgtgctttgtgccatggagggctgggaggtaaaatagcgaacaagacgaggcctgtgccctccaggtgctgacaactccagcggggagggagacagacacacaggcactcataacccagggcagagagaaaggcgagttaagcagagctgacagctctgtgcttggggccaggagggtccattacatcaatgcttgttcggtccaatttattactgctgctcttactaatctaataataataataatttctagtaggcttgccatctttgatatcaaagggttatttttctaccaccaaaatgaatgataaaagaaaaacaactccctggaattaaaagcagttgtgcttgctgatgggagagagatgcgcgggctcttctggggagaatgag

SEQ ID NO: 59822 - DNA, 983 bp, Bovine  19866881203628
  misc_feature (1)..(1): n is a, c, g, or t
natctttgaaatttattttctccttttagcctgctgtatttttaatgtctgagtgaaagaacaaaggaaggtgaacaccagacaagatcgtttcattcctccaacgagctgttgtgtagcccagttcaagctcagccaacataaatgtttcaaaattctgcctttgcacagaacaagtgctggtctagtcatcaactccaaagtcaggccccttgtttctgcctttcattgggtgacataaaaggcccctgcatcaatcattaacaacctattaacacaagcagcccagagaaggttccctggtccagttggtcaaccacagtggaagaaattcctgttgcccagctggctggccatccgcgtgatgcgagctgtttttcagctttgaaaaaggcctgctgatttctctttcatctctctctgagtaacagatacctggtaggcttgctttccttccccccgccactgcaaatttatctacctgcctcctcggcttctggcgttaagagacgcttgcacaaacactgacaacattgattctgtgcaaccggcgtgccaggctgttaggacgtctgctcagcatgcgggccagaatcaggtctgtttcatccacacgtgttagggtgagcagggttttgaagcgtcttgagaaggcagtcgtctgcctaatgtttctgactcttgtatctaattggttttgatttgaagcaaaaccaaatcaacatgaacctggttttttaaaaaggctgtgtggcttagccagacacaccctggaatcttgcggacccagagaatcagattcagtcttaatttttatactggttcaccgtgtgacctgaaggaagccattggtctgtgccaggcttgtttctttcctttttttttttttaaattatgaaagtatgaaaacacatttacaagaggcttggaaaatatagcacaaagttgcatatagttccacatatatattacaattatttttt

SEQ ID NO: 59823 - DNA, 1800 bp, Bovine  19866881213313
  misc_feature (1)..(1): n is a, c, g, or t
ntgagctccccagttgcaaacaggccacacagcttgggttcggtggattatttttaaggacacaaagagtgagaaaggggaagagacacgcgtggtccttaggagccaggtcagcattggagttacaaagtgagggtgatggggtgagtgaacaggagagggagtggcttgagacctgaatccagaggggagaggcagactagagtgctgagctaggtgccctgggcacactcgcccagccttcccacttgaccttccccaaggtgcccttccacctcctctggggatctgaaaagacggacctctgccagccactcccctcctctgagtgccaggagggccattcggagtatttctgtatgtctgtctcttaggcgaagtgagagccccagaccctggtgaggtctcttagcttcttagtgtggaggtgagttccaaaaagcagggcttatttccaggatgcttctgctaattgcagccattgcgctaacctgctgagagaggaaaggttgattaaaacccgaaggccactcaggggctattcctaggaaatccaaggtcggtggtgtctcatcacaagggaatccaaggtctacaggcaatttgcttgccaggggtaacatttggaccctgttaggtagaagttcaaataagactgtaacccaattttctaagctagtagttaatcctgagagaaatgacttcaaagagcagaatctgatggtaattgctggaggcttccaaatgctttgggaatgtccctttgtggggtgaaattcccttccaacccaacacagccagtgaaccagtgaaccagccaggtgcaggagacagctgattggcagtcctacccagcttggtaagacggccctactcagacagcactcatctgaactacacccctagggatttcagtgggctgcacagagagcttctggccttaagcactggccttgaacagactataggtatctggcctttcccctgagacttctgggaaagcccttgtgcctgcctggccctagcaaactcttggtacaagaccatcaggggagccagctggcctcctccaaagggcaggcaggggacaagaatgcttgggctggagggtcatgacggtgcccacctggcacatctggagagatctaaacattggagagaccttctcctcaatgactttctaagtgtttcctaggtaagttactgtctcattctagcataatctagtatttggttttaagacgattcaggagctagaactctgatctctaaacttctgtttcaaggaatgcggtgagacacacttgagctaggctatgtctgaacctgggcagagagcctgtgcagcggctgggtaccccagagctggggtacggggactggggtgagggaaggtggggaggggaggggtcttggtcagacacgcccagagccattgggggcccactaccttccgctcctgatgggtactggcaccgcaccgccggctccctccgccgcgggcagggcgcacagttcagcggcagaccctgtagggcaaacgtggggtttccaaaggctttggctactcggggagactcttggcacgcggagtctctggggaccgcgggtcgcgcgcccgggcctggaggctgtccgggaatcagatggtgctcaggacttcgtggctggggcaggtttggaggtgccccttcgacgacgctggcggccgccgtgtgcgccagagaccagatgcgcggtggtttctcgctgcaggggtagtgcaggtcaacgtggggcctccggctcggcccggaggaa

SEQ ID NO: 59824 - DNA, 1978 bp, Bovine  19866881233515
  misc_feature (1)..(1): n is a, c, g, or t
natctatctagaaaattagcaccatgagggtaagattttatcttgtttattacaatatccacagcgacatagtgggaggtcattaaatagttgcagaataataaatagatggagtgtaggtagagaagcagtggaatcaaaatgacctcagccttttaaaagttctctcaagattaaaatgaaaaagacagatgttgctagccaggaaaagaatatgccaactaatactccaggtatttacacaaattaaaggcagagccctggataatgacttgccctgggagctgccggtgggcctgagatgacaggaagttgctctgtgactcacagggcttgggctcatgcaccaccttgtactgtaacctcatgtctcagccgagatcattgccccagatgtggactgtcagctcacttgacagatgaagcagcagcattttttcaagccgagcagtgatgggcaggaccttgtctctgggcttccggtccagtgctctttgtactgcagcagagtttctaagggaactaacatttctcagatactgttaggcattttgcatgtgttattattccattcatatatatgataattaaatatcaatacattaaatatagcccatctaacagatggtaaaactgaggctcagagaggagtttgccaccctggagccagtcaggcctgagttggactcccacttagaaactgggtcccctttttaagcctctggtatattaaatgagtattatgtagtaactgtcataggattgccataaggattgactgagaaagtatatggaaagttggtaacacactgtttaaacgtcagtaataattataagattgtttttacgggactgtcccaagtcacctaatgagtgagtcgtgtaattaggatttacccaggtctgactccctgcccctcagctccagtcaggggcctccctgaagggttagagctggcctcccaggctcacccaggagccatcagccggatcctctggtcacgctggggcagggctggccttgagggagccccactcgttcaccatggccattctccttgcagatacaatgaggtgaagaagaaaatggatcctggcttccccaagctcatcgccgatgcctggaacgccatccctgataacctggatgctgtggtggacctgcagggcgggggtgagctgcccaggcctctggccgctttctaggactccctgcccccagccagggccctgttcctcacaagcacacactccctcattgtgtggggaggcaggcggcgcccggggaaaacaaaccagccccttcagcccagcgctgggaaggcatccagacccctgacctctgttcactcagctggctccaggcagtaagacccagaaaggcccctcacagctgcagagcttggagccagagagcggggaggaggggaggcctgccgggggcgagaaacctgggcttggtgccctggattcattctggggtttgatccaggcccttttgggttccacaggaggccttgtgaccgcctcccattagcagaaggatggctccatttgagacaggaccaactttgtcaggccctgatgctgaggtggcaaagatggcccatttgtctctgttcctttgctgcataaaacaaccaaaccagcaagggctagaatttggagtttggaaaccagattcctgaggagtcttctgggaggtctctagggccctggaaatgagtccagtttggctttttagaggagatttcaatgaaatttcacaaagatgctttttgagctcctatcacatgctaagcacatggccctgactaaacctctcacatgtccaagaaaaagcagggtacagccaggtgtcaggttaaggattttcttcagaaagaaacatctgttgagcacctcctgtatgccagggggtttgaaaaagaagtaaatgaggtcatatgtgtcaggagtaagaaattccaaaacccta

SEQ ID NO: 59825 - DNA, 853 bp, Bovine  19866881237298
  misc_feature (1)..(1): n is a, c, g, or t
ntcccagcttccctaaagtagtgggccccaggtggcacaaaaaagaaggctcctggccagttctaatgctcagttttaaaagtaggagaaaccacagtgaaagagaaaactggcggaatgcagctaatcagacaaaatgtgtgtggcttgaagctgctcgtattttaattgaagccttaaagtctacgacagtgaaatactttagggagaagaatgacaaaatagcatccttaattatggcctattagcaatgatccagttagagagttgtatgcaaaaaggcacagtccctggctagaatcagagccagcgccaaatcagctccctttcctactggtcttggccatggaggtctgttccctaactgtacactcaaaaccactcttggtggtttcccctggtgcaaaggggagaaagtacacagcatcctatcctagcaagcctttatatgttgcctctttcaggtctttgttttttacacgcatttttttttcccccaaagactttggcttctggaactgttccctggctttcaaatccatacatctcttgttgacttcgaattttaattccttgagattccttgagctgtcatgagaaaaatgtcaaagataaaaataacgaagaatttctacacataaaagctgctttgtaactgagaagttaatgcaccaatccccccagtctactgatgcaaaaacaaagattaaaatatatatatacaaatgtaaataatttggttggtaaatagatatagatatatataccgatccaggaatcaaaccccgggtctcccaactatgtatataggagacccgagttcgatctctggctgggaaagagcccttggaga

SEQ ID NO: 59826 - DNA, 1026 bp, Bovine  19866881263683
  misc_feature (1)..(1): n is a, c, g, or t
nactagctctgttacactgggcaagttaagctctcttaggatccaacttctgtaaaacaaaacgaatgatttttaatatcaggtagacattacaaccaaactgtaaactccatagggacagaaattttcatcgtctctttgaactaaattcacagcccctaagtcagtgctcttaaaaaacaagaactcagtgaatacttggcaaaggaatgaatgaaggtataaaaggttcttaactttatgccttgagtcttgtgagcattcagtaaatactaagccactttcccaaagtattacagtgctagataagtgatttcaggatgatgcaaataatatttaactcatttgaatgtaaccttcatgaggcagggaacggttttgtccagttctgaatcctcacctcctagaaccatgtgcagcattcagtagacactcagaaaatgtctactgaataaatgatttgggtctttcttcccagacaggccatgtgctacttgaagggaagaattttcttatattctcaccccgactgtgtgtacacaaaagatattcaaacattcaaagcagatgagttcagtggactatcaggggctcaaggtttcttagaaccaccacgatctgccaattacatgtaagtgtcatgagggttatacagtacttttgactccaaagtaatggaaacatcttctattgccctggaaactcttcctgcagacagaattttgaaagaaaattgcacaagaaaatactgtgaaatttcacaacctctgtcactatgaaaaatgtcatggaaaaggatttttcttataaaacagcaacttatgaaagtaatcagtgctggaaagctcaaagatagatgaagaaaacaagaggaaccgatccaacagctctggttttatgaataggcgattccaccaccccactcatttgtaagattctcatgagatcttttttttacagcaggttatgaatcatcttcatgatatctttaaatgggatgatcaatactatattttcccataaaat

SEQ ID NO: 59827 - DNA, 1801 bp, Bovine  19866881307288
  misc_feature (1)..(1): n is a, c, g, or t
ncagttggtgatgccatccaaccatttcatcctctgtcatccccttctcctcctgcctttccatctttcccagcatcagggtcttttccaatgtgttagttctttgcatcaggtggccaaagtactggagtttcagcttcagcatcagtccttccagtgaatattcaggactgatttcctttaggattgactggtttgatctccttgcagtccaagggactctcaagagtcttctccaacaccacagttcaaaagtatccattcttcagcactcagccatctttaagatccaactctcacaccctttcatagctgtattttaagtaatgtcttgactgtggtatgacacaaaatttacgttgttaaataacctctctgattgttacattatgtggataatggatggcggtgggtcaagagagataagctgcaaaaaaaaaaaaaagaaaaaaaaattactccagaaacccaggtaagtgcagatggactcaggaaacagcagaggcactggagagacgggatggactagggagctgctttgaagggaaacagcccagaagggaggtctgttactgtgaaatgtgggtgaaatacaaggtatgatcatcaccattgtcatctgtactcctttttgctcatcagtggggctggctagcctggcaaccaccaggcccatgcaataagctttgcagaaactgccttttcagttcaaatcacttacaaaagctcaggctgcaattataaagcttcatagctgtgcagcatccataaaaagaggtaattttaatatttggttcaacttcaaacgcagtaacttagtaattatatataccccattaaaatataatgtttctcccccaaactaatcaaatggctaaatcaattgttggtggattgccagtggcctgaggatcaatgggaatagaaaatgtattctatattttccttgttacgtagaagttagagaacatattttattaatgttcatcctttagagaccagatttgtgtgttcgctaaaataaatactacaatctttaggacttggttagatggagagggcaggattctaagggcaaagaacgattcacaaggaagcagacattccagagcccttgtggggtgatgggacttggatccagggaacttgagtcttgcatctcccactcacaatgtgttgaatggctttagaatatgtcctttctcttcccagttgctccatttgtcaaatgaggagtttggacaaggtcagtgaaggtaaacaggttttggactaatttaactcaattagtcatcattgcatggagccttccatggggaaggattgtgaagctatgactgagttcagagggagggagtgcagcaattgattagtcatgtcttctatgggcattggcgaggcatcctgcagtccaggtgtttgtgatccttgtactaaatggattctaagatcccttctgttctaacaggttgaataaaggtctattagtctgaataggtaatctcctctatgacttgtaggatcttctcaggccctccgtggatggtctctctccctgccctatggccagctttggctagactgggaactcactaagaataatagattttaaactgtgtgcagtaagtcagttgatacatttcaatgatgcttactatgcaccaggcactgcagatctaaaggtccataagccatgactgcagcctattattaggctatagagaagggcatgcaatttaaagaagggctgacaagtaacataaagctgtaagatggcccaagtttccccgaattttccatc

SEQ ID NO: 59828 - DNA, 1045 bp, Bovine  19866881312137
  misc_feature (1)..(1): n is a, c, g, or t
ntggctgatgggggagagcaggagggggctgaagttattgaaatgctattttaaactccaaagtcaatgttaagcaaaaccttgaggctgattaaacacgaccttcgggccacagggcaccagctcaaaaaggcaaacagcttccaccctctcagcagctccgggcttgtttattggtttgaaagcccttaaggggcttgccaagcagaggggcgagcagggggaaactttaatatctaaagggagagatcaaaagcagttgacatttctggcagagagcaagcgcgtatgtatctttatatgtataatgttatagctgagcagaagggaacaggcatttcttctctgggttaaatcacatcaggccacatgttcctgatcttgactgtgttgtcttataatccaaccaaatttaactgacattgagcatttctgatctgaacagttaacatggaaatttggcccaaataactgtatatacattctgaacatgaactcggttcaggcatcagaaatgatgggaaagacccctcccaactaccatccagggagccaggcagggggcccctggtgggtagggctcctggctcttcatcatcccttttgctgatgtagttgctagggagaccacctccacaggtgggcatactttttccatgcctaaacctggggctctgggatttgttcttgggaaccccaaagaagagaggtagccttgctttggcaaaagcatctaatgggccatgggagttgatccctggaggatatttctcatatttatctaccttgaggtacctggtaaccctgatgaggaaagtttcagtgaagtgctgggtaggaggcaggatggctttggactataaaaaatagtgcctggcacagagtaggtgcttggggatttgtggaatagatgttgaataaatgaatgtgtgatagactcagggagctgattgctcaagactcatccttcttttcttgggcttcccttggtgtttcagatggtaaagaatctgcctgcaatacaggacaccttgggtttaatccc

SEQ ID NO: 59829 - DNA, 1194 bp, Bovine  19866881354501
  misc_feature (1)..(1): n is a, c, g, or t
ncctggtgggctgccgtctctggggtcgcacagactcagacacgactgaagcgactaagcagcagcagcagcaaagccattccaactttgacttttagttctgtaattcctttactagaacccaggtgacttggacatgtcctttcccacttgtagacctcagtttccccatctgtaaaataaggaagttggacctgatggtccttaaacattgttttgactagaatatgccatgatttcatttttccaactccgtcctttctgcctcaacttcgatggaagttgagcttgggctcacttgaatgcagaatatcacaccactaatcttttttttttttttaatgtggaccatttttaatgtctttactgaatttgtcacaatattgcttttgctttttttttttttttttggccacgaggcagatggaatcttagctctccaaccagggaccaaatctgcacccactgcattggaagtcctaaccactggaccaccagggaagtccctaccccactaatccttgattcaaggagcagctaacatagatgtgggactggtgaggcagcggggcacagagcaggggtcatctcacattctttccctctttgctttaatgaaattgcccacttcacagcagagggctgaggggtaacattaatcctataatccagttggctctagatttcttttggatggcccataggcacacactattggccagttaaggaacaaactagatgaaagcttaaaacagcatcacaagctctctctagtctttctttggaagatgctgggatttcatgctaaggagcagggaaggtggggatgttcatcttatctctcagccccaggttgccctcttcatctggactattatcctttgtagcccttgtcacatgatggccagacagttaactgcaaactcggcacaggatttaggtttgatattgcaaaaaaaaaaaaaaaaagcctgggcaatataagagaaaacattcttgttttgcccagtatgaatgtgggctgggccaagtgaaagacatttgtttatcatcaggagagaaatcaagagtggattgtggggagagttcctatccactgggctgggggaaaaagtcttgagattgttctgggcaaggcacatcccagccattttgaaaagaccccatgctgctcttcagcatattaagattgat

SEQ ID NO: 59830 - DNA, 1601 bp, Bovine  19866881568243
  misc_feature (1)..(1): n is a, c, g, or t
ncccgcttgaggtttgtttgctaaattgttttgaaagcttatgacgaattttcaggattacttgcagtggtagggacctcggtggaggcggaaatataaatttagagatgccagttggaatctattaatttgcttgcagcccattaccctaggtctgctgcttcactggctgtgtgaccttgggccagtgaattaacctctctgaactttagtttatcctcatctgctccatgggaggcgataggcatagtagctaccttatgggattatgaattggaaggaagatgatacatgtaaaatgctgaacacagggactggcatgtgatgggtgctttgtaaatggaattgattagtctttttgctgaaatgaaaggaaaaacatccccatcagacagccctgggtgtgtgtcctggctaggtaacttgctatctcagtgaaattgggagatatatattttctctctgagcctcagtttttaagtctgtggggataggattaataacagatcatgaaaactgcttgaggcaccacacgtagttctatgtccaatggtcacgttggctgccactgttgttactgcacagtggccttggctgggctacttccatatgagtttgagccctttactgtctacgtctgggatggcacatcattctgtctcctgtgtctcttctgatcttggctggagcagcttcttcagaaggagctacgtagggaaaatggattggtgtctgctggaggcgaggatcgaggcgtgaggagtagggagacccaagggtatttgacgactttgttctagactctggcagggaagatattactattgcctgtgcatattcgctggtaagggaagaagatgcacagggtgaagtcgtcagatagagggaggccatagatcatgactgccaacctccaaatgttgcaaaccttcagctggaggtttgcttgccctatgctgctaagtatcttggggaacatgttgcagggaatcccaagggaaatctttcatttggggttgcttttctggggtaagacagaaaaagagacagagataggaaggagagagaaattacaagagcatgagactaagaaggacacagggagaagcaggcaagagacagagagataagtaacaacagataggaagatgaggagacatagaatccaagagacacggagaaggagacaaaatggaaagaaaaagggcttccctggtggctcaggggtaaagaatccacctgccaatgcaggagacacgggtttgatccctgatccaggaagatcccatgtgccacggtgcaactaagccacaactactgagcctgtgctctagagccccggaaccacaattactgagccctccagctgcaactaccaaagcccaagtgcttagagcccttgctcctcaacaagagaagccaccacagtgagaagcccatgcactgtgagtagtccctgctcgccccaactagggcaaagcctgcttggcaatgaagacccggcacagccataaataaataaataaaattattttaaaaagaaatggagagaagtagggatacacaaccccagactcagagaagctgagacagggaccaag

SEQ ID NO: 59831 - DNA, 1325 bp, Bovine  19866881648694
  misc_feature (1)..(1): n is a, c, g, or t
ntgaggaaactgagacccagacaagttttgtatatgacctgcccaaggatttaaactcaaagcccaggtttctgagcccacaagagagtcagtgtcagaggcgagaccgtgtggccagcactgggggtgtggcagacacctccttcactcctgagggtaaccagccaccgtttagaggtgaggaaactgagtccagagaggtaaaggccggctccatcccttgaagctggtgagtggcagaggcgacgctcgaacccagagccactcactcactctactgcagttctttcccaagtcctgtgctccccacacctcttcgctccagaaccattttcatgatttcagccttgtctaagtgctgccagtactattacacgttgatttattttaaaaaatggagtcactttgtaaactctagcctcattgcaagcattaatatacataaatcagtggttccaggtactagctgtactgatcctactacacgttaaaataaaagaattgtttggagaactagaagttttgcactcctgtatcattaaggtcattccaggtgctgggaatttctaccctgtatttagctattaatacttctcctggattctaaacctcacttggatgcgtaaacctcattgaccttgaggccagaaagttacctttctcagctgactcacctagaaaatggagagcccatttctgccccacctgccttgcagcgtggctctggggagccaagtgaggctcagacactggtgttatttggaaaggaaagggctgtccaaaggccttagagtaatgctccaatatccccagaccaggttaatactgctgcccttgtctcctgcagtcccagatctggctggttccccccactggcaccctacccccagtgacacgacctcccccaatccctgccccagggaccccaagctgaggcttaccatagagttcttggatgccctggatgtcatcatgggacaggcggaagttcttagtataggtataaatgggcgccatcagggctccagggtcctgtgagtgctccagccccattgcatggccaaactcatgggctgccaccaggaacaggctgtaccctgagggccatagggaggggaggcaggcagaacgacagggagagagataagggacaaagtcagatcaggggatttccctggtggtccaatagttaagactctgggcttccaaatagggggcacgagtttgatccctgattggggaactaaaatactacatgtgactcggtgcagccaaaaaaaaagtagtagtagtcaggccggctctacaatggggacatatgagga

SEQ ID NO: 59832 - DNA, 1856 bp, Bovine  19866880203014
  misc_feature (1)..(1): n is a, c, g, or t
natggggaaacagtggaaatgtggctgactttatttttctgggctccgaatcactgctgatggtgatcgcagcaatgaaattaaaagacgcttgctccttggaaggaaagttgtgaccaacctagacagcatattaaaaagcagagacattactttgccaacaaaggtccgtctagtcaaggctatggtttttccagtggtcatgtgtgaatgtgagagttggattataaagaaagctgagtgctgaagaactgatgcttttgaactgtggtgctggagaagactcttgagagtcccttggactgcaaggagatccaaccagtccatcctaaaggagatcagttttgggtgttcattggagggactaatgttgaagctgaaactccaatactttggccacctgatacagagagctgactcatttgaaaagaccctgatgctgggaaagactgatggttggagaagaaggggacgacagaggatgagatggttggatggcgtcactgacacaacggacataggttggatgaactctgggagttggtaatggacagggaggcctggcatgctgtggttcattggggtcgcaaaaagtcggacacgactgagcgactgaactggaactggaagaatgctggattttctaaattaattaacttttcaagatgttgaattaaaaaagaacaatgtaacccaaaataaggggctttcccaggggctcagtggtggagtttacctgccaatgcaggagatgctggttcaagccctgggttgggaagatcctgtggaggaggaaatgacaacatattccagttttcttgcctagagaatcccatggacagaaaagcctagcaggctacagtccaaagggtctcaaagagtcagacgtgactgagcacgtatgcaatccaaaatgaacttcctggtttcacacatattatccatagctaatctcttctccagcattaagaaaacagagagtttctttccattcaaataatcttctctacatatttcttttaatactagcattttattttcagaatgaaccttccaaaacatgcttagaaaagtacatggtaacaatatattgaacacttgtttaagactattggattcttttacaaatataatattcccagcccattaatgatgaggcctgtcatcatttttgtccagcagggcggacaactagactgaactgtctttagaaattctttcccttaatgactctgtgaccacattttcaatataacatcatctctaaattaaggcaaggtcatagataagccctttaagtattttttttttaaacatggatatagatttagatatctaagaggttagttaatttagcccattgaagtgggttaactaatacatctaacactaccaagtacctatgctggatactgtctacattaggttatgtgactatggaactctttaaggctccgcaattgtctttttttttttttttttttccgcaattgtcttaacatataaagctgtagaagatcgcacttgtattaataaagtctttgattaaacctaaatacacaatctgctttgtggataatttgtaaaaatgggcataatttattaagctgtattgggtgagcctgtaccaagtattacaactatgtagaatgttttcaatttattctaagtcagtcatattctttggctcaattttttttttttttttggtattactttgaggtattagtcacaatgactaatactatatgacgcaaggtgagcaaggttacacaacttttgtgacaactcacatgcaatcaaattgctactgctgctgctaagtcgcctcagtcgtgtccgactactgtgcgacc

SEQ ID NO: 59833 - DNA, 1075 bp, Bovine  19866880367529
  misc_feature (1)..(1): n is a, c, g, or t
ngcactgtgtcaagtgctaggggtaaaatatatattcttcaccttaaagagcttattctgcagagggaagaacagagaggctggagaggagttgatagtgactgttctctgcactggtcccttgcacatgctccataattcaactccactgaacaccagacagatcccaactgcactgctagtctttctccaacctcagccccatttcatgttcaacagcaggtataagccaacagactaacagaaattagctatgctgcatctaaaactgtgtttctaaaatttttttatcatttgtgaccaagtcacagtcacctacaaaacaaatgacaataatgtatagatgtatatacactcctaatatagatgtatatatgcacgcacataccgaattctgcacaaaacatccaggctttctacattcctcagtcttgttatgatctcaaggttaagaactgatattcagctgttaatccaagcccatatctttgacagaatcataagagattggtcccacagaaatgataatacatgttttcacagacacatctttaaacagtgtctgctatgtataagggacaataactgaatagggacagaggtggctgctacagataaaaaaccagagtggacgtagggggatatatcaccaaccacactgctcatcactttcctgagatcctctggggaggggagaggtgcagtacagacatcccttcaaaatctgtcagcaaatactgtgatcttttctgaaacctccttgacaagctaagtcagtcctacacatgaacttcctagtcacatcgtgctgtggcaaaattacaaattatcacatactctggacctttggcttacatgcagtatgtacgaaatttcaaatgttgaatgtgtgagtgctaaaggtctgatgttcctgatgagtactagttcatttgtcgtctattctgggactgacaagtttcagcctctcagcttaaatctcttccttcaacctctgatccagaaaattactacaagtatggggcaaggttacattctaattagatttcttaattcacattcttaaaactgctcg

SEQ ID NO: 59834 - DNA, 1661 bp, Bovine  19866880373731
  misc_feature (1)..(1): n is a, c, g, or t
nggctataaatcttctgtaagtttaattgcctgcttagaacaatgctttttcttttactacagtaataatgctaacttacatctgtacagctacttagctcctgtatagcatttagttctttaatgatagggaccaggtattcatttgccactttttcttgagagttcccaggatactttaatatataaggaagagatatttattgaaaaacaactactaaattgggagattagggttgacatagacacactgctatatataaaataggtaactaataaggacctactggctcaaaaggtaaagaatctgcctccaatatgggacacctggattcgatccctgggttaggaagaccccctggagaagggaatggctatgtactccagtattcttgcctgaagaattctatagacagagaagcctggtgggctatgatccatggggtcacaaagagtcagacacaagtgagcgacacacacacacaaagatgtactgtatagcacagggaactctactccatactctgtaatgatttatatgggaaaagaatctaaaaaagtaaagatagaagtatatgtgggcttcccaggcggctcagtggtaaagaatctgcttgcccagcaggagacatgggttcaatccctgggttgggaagatctcctgaagaaggaaatggctacccactccagcattcttgcctggcaaatcccatggacagaggagcctggcaggctacagtccatgagagtgcaaagagttggacacgacttagcaactaaacaacaacaatataagtatataactgtttcacattattgtatatcagaaactaacacaacactgtaaataaactatacttcaataaaaattagttttaaaaaaacaaaggaaattctgacacatgctacaatgtaggcaaaaccttaagactttacagtaaaagaagccagtcacaaatgagcgaatgctttatatttccacttatatgaggtacttaaaataggcaaattcacggagacagaatgtggagtggtggttgccagggccaggagaggggaatgggtaattatggttgaatgggtttgatgtttcagttaagaaaaatgaaaactgttcttgagatacatggtcctggcagctgcacatcactgtgactgtacttaattaatgccactgacatatttacttaataaatagttaaaatagtataatattcattgtgtacattttactacaatgaaaaagttaattgttctcattaaaaaaagacaactaataactattagttggagatgtcattaaaaaggaaatgcttcacactaaaagaaaaaaaaaaaaaaaacttctagatcatagttctgcctatgtcacagccatgtcttacagcttaagtggtttctcactgcccaaaccagggcacccttcaaaacttagaattcactgacctctcacgggatcagtctcactccaccttcctcatcagtcttctctggacctccccacatagagctactcccaagcacggcatgaaagcttctgttccacctgttctcttagtatggcatgtccactcttccctgtgaaattaagctactttcaacatgaatacagtacacactggcaagggggagtgccatgaaggggatttaatactccctca

SEQ ID NO: 59835 - DNA, 1142 bp, Bovine  19866880403071
  misc_feature (1)..(1): n is a, c, g, or t
naaaataaacttaaaacatagacttgtctatgatgtttcctttttcatatggctttccttaccatcttgaaataaataatggatagcaatttataaagatctggtaaacatagtctgtaaaacttgtaatggttgtctatagcactaatagatctaattctctaagtatctacatattacaatcaacaaaattgaaagtcttttatgctccttttttggggatagtaatatttttgtgatagtaatttaacatgtgtcaaatattatgccagccaaaataattgtgactgtcacatataaagagagcataaatgtttattctgaaatactgaaaaagagaatcttacaaagttgaaatgaaccttaatactgcatcccccaaaaaagttttagtgttttgaaataagattgattactttaacaaattatagaatttgcttttaagtgaatgtaaaaatgcaaggttgatgattactaaagagtaggtatctgtctgatacatagaatttattatgtcttactcattggaaaagactctgctgctgggagggattgggggcagaaggagaaggggacgacagaggatgagatggctggatggcatcactgactcgatggatgtgagtctgggtgaactctgggagttggtgacggacaggcaggcctggcgtgctgcgattcatggggtcttaagagtcggacacgactgagcgactgaactgaactgaacaggagaggttatgagtgggataaagaaatacttgcaaactagaaaaaaagaatccataaagccatcctaatttttttaagctgaaatcttattgtctagactaaacatttatattccaaaaccctctgtataaaacatatgaatgctatctatcagcatgtggatatttaatgcacttattaagaaacatttgtattatgttctaggtacaaaactgtaaaaatatattataaaaggtaaagataataaagtttcaatggttaaacaatgttgtagtctgtttttaaaagtctttgcaacattatagtaaccctagaatgtgaatgctttggttttagtgtttctcacatacctaaaaatgtactataaatctgttattatataaaaagttatttctttatggtccatttga

SEQ ID NO: 59836 - DNA, 1895 bp, Bovine  19866880429992
  misc_feature (1)..(1): n is a, c, g, or t
naccctgatgctgggaaaaattgaaggcaggaggagaaggggatgacagagggtaagatggttggatggcatcaccgactcaatggacatgagtttgagcaaactctgagagatggtggacagggaagagtggcgtgctgcagtctatggggttccaaagagtcagacatgacttagcaaatgaacaatttaatacagttaagcaaatactattatagagccaatggagtaacagttttctttgatctcagcctcagtgactgaatattagtggttgtcaaatatacacaaaataatttttctccctttacattctcacagctttaacttcaaataaaaattccccagaatcctgttgagaatctaaacacaccagcacctctgtacacctcctgcctaaaccacccaggatttaaagatgtgatcagtcagccactttcactgagcattcatatctgaaggaagtaagagcaaagagcagaaacaatttgaatagttcccaatctttaaaaagggagttcatatctgccattttatgttccttgattctttggggagggataatttgttttatataagcatcataaaaatatatgtaaatacatgcaattcagtgtgaatatatgatgttacgtacaataaagctcagttgggattcagtggattctaatatgcaatttttttaattgcatattcccaaggaaaaaaatgtatcctaagaatactacttattaatcagtatatattaacgtccaatgtaaaaacattttacaatttataatattcataccacttaaagagaaatttctaacttttcaaaaagcaacatattttatgtttattgttaaaatagtccatggagctgtttttctctttcacttaacacagcagtcctaagtattaagagagtctatcttggtatgtaaagaagatcccagactacacatgaaggtgacgtgatcagcacagttgagactgtccagaaagaaactgtatgctggtaagtggagcggctgctctggagagtcaagtaaaggaatgaccatcctcatccttcaggaacttaggttcctatgtggagagatgtgtccccatggaaacactataatgcaacactggaaaaacaggtgtcctagatacatagtcagctgtaggggaagtataacttggggttttgaagggtaaagaaaggtcattgagcaaagagaactatcaaggcattgtagattggatgggctgtgtaaccaaaacagtagagaatgggacagcacccctcagaggacaaacaagtgaactggtgtcaccaaagcgaagaattctcacaagaggcaggagatggggcaagactccaagggcagttagtctactagtacccagacacaagacactgagctgctgacttcaccccctccccctcagtcagagttgttttgtctttaatgtatccttgtgctggctccaggaaaggctaataaaccaacctaaaattccatacgaagccctgcacatttgaacttttgttggggaagatgtccagaagaatttgcacttcataacctgaacaaataggtgattggtatcctccactatttaagtcacataaggagtccagtttgcaggaagatgatcaattctactttagacatgctttatttgagatggcaatgagatattcaagcaataatgttcctcaaagtgtttggagataagcaataaagcacgagatgaggactagactagaactttcattacagggagaaaagagctgaatcctggaagtgaatgcacagatacaatgaaatcctaccttactctagaagaataccaggatggctttttttgtcacagtaggcagactatatttctcagtcttgtagtaaggagaggcatgtttt

SEQ ID NO: 59837 - DNA, 944 bp, Bovine  19866880455455
  misc_feature (1)..(1): n is a, c, g, or t
natttatcttgttcaatttcatttcaattttatttgaaaactgaagctaccagggaactgcaggcaaaaaaaacaactactggcaatatacctccttgaaagcaatcacaggtctaaggcccgctactgcaaaagagatgatggttggaaaaatgtataagcggctgctggtcaatcatgaaaatagaaaataaccgagcagaatccatcaaaataggtgatgtgtgaaaatgagaatttcccaacttggttcacaaaggagcgatttgaaatgaaaacccatgaatgcatgaatgaatgaatgagtgattgaagaggtgcttagggagctaatgtcaaccaactcgatctcagtaaaggttaattgagacaaggcagctgtctcatctgctggggggtgcagcccatattgagaggcttggcagcggccatcatttgcacaattttaaagtgatcagaaccattttcagtgatctctggctttagaagagcctagctgtgggaccatccagtgtagaaaggtgcaaagggtcacactgaatatcaggatagaatcccagctctgccatttactagctgtgtgcccacagggaggttgtttagcccctccttaagcctctattaaagaatatgtaaaatgaacacaataatagatgctgtctcctaggattgttctgcagattaaatgaggcaacacacttaatgtgtttctcacagtccctggccatatggaagaaattgataaattattagctttctgctaaggccagagcttggtgctgaggataaaatagaatctttgcccttgcagagctcagagtctactgggagacacagatccataaacaggcaactacaatgtgtaagaagtaccataacaagagtatttatggggatactgtggggaaaagaaaagggaatgacaaactctactctactgagag

SEQ ID NO: 59838 - DNA, 2260 bp, Bovine  19866880491677
  misc_feature (1)..(1): n is a, c, g, or t
natactggagtaattgccttcccttctccggggatcttcccaacccagggatcgaacccaggtctcccacattgcagggagattctttaccatctgagccaccagggaagccttctaagatctagatctacacacacacacacacacacacacacatatatatgagggaaaactgcctgattttttaaaaatactgtaaatgtccaagtataaattatctaagctaatatatggataatgtaaaccaggaaccaatcctcaaaagcagtaaagtagccaaagtaacttcatacactcagatgggttgtgtgctctgtagcccttgggacaccactaacctgactcataggtagttgatatgaataaccccctcccactcccacagggagctgggcaacatggtagactatggagtaactaaaactaaacaacataggtaactcacaaaagtaatgcttttcaagctacacttacaaatagcatttaatatggctgcagaatactgagtgactataagcattgtgggctcagcatgatacacagcgcatggtcagaatacatgatggactgaatgaataaagtgagtgttttccaaaatgtaagctcacaacatttcaaacaagaaaggagatactcagtctaggaggaactggtaaactcttaggcaagtgtattttatacttttactgaatatttctctcctggattcatagtcaagatggagaagactggcctcaaagtagcagctttttagatcactgcttatgggtttacatctttgctgaaggaggagaaggtcatgggaaggaaagagcctctatggaagctgacccaagtgtagagagggaatttccatctgcttccactccagttgtgttttgctaccctcagaaggagcagagttcaccctaagattaacaaaggaatgaaagctttccactaggtaacagtgcaaagaagaaatggatagctcgatttttccaacattaatgggaattcacagtattcactctttagtaattgagagttgattgtatatataaatacttagttgtaactgttaaagtgaaaatttaggttaaagaaaatcactgaagcaatcaacacaatttattattcattacattcctgcaatgtatgtgttagttgctgttcagagaacactgaactagtttatatgtaatttttactgtctacattgtaagactcctttattttcaattatgttaggcattttaagttaaatttaggggaaaaactgatatataataaaagggacaatttttaattggttaactcatctgtcttaagtccaattacctgttttctatccagaatcctttctcatcatgaccagttcaaagcactcatctccccatgcattcttgcacttctaggttactatgtaatagttctgaataataagatgtaaacaaatcttctgaggttaaatttctggaaagctactgttttctggataaaagaagcaggaacagctattatgtcttttgcatcttcatctatcctccaccctgcctggaacagggaagggcagctgcctttttgcaaatatgaggttgaaagccacacagtatggatgaagcaacaggaggtcagaaggagcctggagatatggtgacttgtttgagcacctataccaatcctggccagattgcttttgcccttcttgatgcctaagaaaaataaactcttttttggtgaaaccattgtcattgactccactagttgaaacaaacacatcctagtaaaaacaactaattatgaaaatgcaatggtccttacatgtaatatgttaaactctacacatttcctgctactggtgctgtttgttcatgataagttcaggacagtttagttcagtcactcagttgtgtctgactctttgcgaccccatggactgcaggatgccaggcctccctgtccatcaccaactctcagagcttactcaaactcgtgtccattgagtcggtgatgccatccaaccatctcatcctctgtcatccctttctcctcctgccttcaatctttcccagaatcagggtcttttcaaaagagtcagttcttcccatcaggtggcctaagtattggagtttcagctgtggcatcagtccttccaatgaacacccaggactgatctcctttaggatggattgggttggatctccttgctatccaagggactcaagagtcttctccaacaccacagttcaaaagcatcaattcttcggcgctcagcttt

SEQ ID NO: 59839 - DNA, 1863 bp, Bovine  19866880538307
  misc_feature (1)..(1): n is a, c, g, or t
natgtacagaattaaccatgtcctgccccatggtgcactgatatcttcattgtaattctttctaccccatgttataatttcccacattttctatctcccttacaatactaaactccttgtgagtggatcaaattttctttcacatacccaaaatgaaatatctttcctaaagaacagggggcacttataaaaggtttatagaaagaaaagaatgaaatacattttcctaatagcctatttaaaccacaaagcactttaattgcagtcttaatagcattaatctgtatgctaggtctgccaacagatggccacgtaacactacccaggatgtcaaggaaggagggcctttctttgctcagttccaagttcatgtcagatgtggacacttcattatttatatttaaatatggtatttcatctcataaaaatctgtaagttccactttatttaccctctttcgtagatgaagaagctagtgctcaaagaagtcaattcatttgccccagattatataactaattaatagcagggctagaattttcaaatatgtttccatccaaagtataacctcttttcattctaccaaaggttagccttggaagtagcaccctagagtccatacctttgtcccattgatgctatctatcattgttcaaatgcttagggcaatcttcatttgaaaccgccttaaagccagtttatgagctgcttccttaaaaaaaaaacatttcactattttatactcatgggttatttttctcccataaatggtattctatttgatgacaaaatttatattgtaaagttcatctcaagtaacttgactgtttatacaatttaaatatctctatgcagcagaaagataccataaaaaaaaaagaaaagaaaagtaaaaagaaaaaatctgattcaggcatgaagaacatttaaaggacatttatagaagaatagattcaaatgtggtttagaagcagagtacagagttttatagccattctttgtttatccagttgtctcatggttaagacaaccagtttttatccctaaatcatccactggctctctgtcaatgtagacaagtataattttgttctctgtctggaaaagaagattatcttctctcatgctcacagtggaattgtgaagttaataccttttatcttgagtatagcatttaggagaatgtgggtgcttaatatatgttaataatagtgataataatgaatgttgataattagaggtcttttataattatcaaatttctaatgtgtgttaaatataattaaaggggaatgatttaaattaatatgcacacatgcaaaaactagagctagccacagattttatttttagcttcttaacatcatgaatatgaatcaagtattaagaaatccagttatgattcgtgtttcactctggtcatgatggagaacccaagcaggatctggaaactagaatggcctctgtttgagttgaaaaatatagtcatgaatggggatttacaaagagctgttgtgattggagcttgaccacatgaacttgtgaatcagacattattattataatccatcactataacactgagttccatgagagaaaggcacttttcctagaaactggacaccattccaggagtaggtaacaaacaaatgcctggaagggccctagaaaatgtaggtggaatagaggaaacaataatcataaataatttcccatgaaattcatcttggagattcattcttcaactcagttatttcataaggtacaagaaagggtaggtgagctgaggattgtgagaggcagcaagctgaaataattgagaacatggactttgtaagtttgaatgccctgggttcaaatctg

SEQ ID NO: 59840 - DNA, 1423 bp, Bovine  19866880579320
  misc_feature (1)..(1): n is a, c, g, or t
ntaaatattttttcttgatactggtgttgatatatgaaaacagtatccttttagaacaaccagggttatatatttcagtttcaaatactgcttgtggattcaagttttattaggtaaagtcttctgaattaattaattctggaaacacaatatctaacaagtggcataagagggagacttattagggagcaataggtggaaaagctacaaatgaaaaattgtagcagtcccaatgaaatcaaggaactaaatgccaatttgttacaggtagctttggaggcctcagaaaacaaatgcaatagatgtggcaatacctataaccccctaagtaattcagtgacaaaattacatacactttttgctgataaaactctgagtctatacatctatagcccaacctgaattcacaacacattacctaagcatgggaaacatggctgaagggtacttgacggtgacaaacaagatctttcctgatccctacaatgtacaaccaaaattttacactatgcgaagccagggaaatggagatagcaataaaaaccttatgaaaagacatcatacattacactgtttatgaataacgtcctgaagagatatcttttcagtaatataaacagaatgagtatgtcttaatattcattcagcatagttggtctagctgatcttttaagggctcttccatatgaaactgcattcaaaccacaccagagggaacacactttatgaaacttaataacaacaactctttgctttccttgcagttaacaattgaatatcttttgtcagtctccattctgccaaaacgttttctgtatacatgctggcaacatcgggcaagttgtcttcttctttctttccaactcttcgcatcggtagccaaaagtgtctttgttgctcaaatagtccacgccatctgccaacagtttctccatcctgctgtaccatctgccagcctctctgcttctgagtccaggctgtgttgcctgtatgcttatcaaatggctctttcaccagaagagaaagaaagagcaaaccagcaccttttacgtttaaccactcttggtaatcatcccaaccctgttctctaacccattgcttcttaacaggacaaaaagctcaacaatttgaatggaagcattttcctttgactttttttccctcccctgtcgcaataaagaattagacagttatagtacattaatagaatcagtcattagtataacaaatttttcatggccatgttccctttttgtttgtcctaaggtattcttaattatgaagaattatccttcagaaatgagaagcaaagagaggaaaacaatccttattcttacagttaatcctgattattttaaaagcaacttctggtaggaattaataattcagtgaattttattaacagtataatgttaactttatg

SEQ ID NO: 59841 - DNA, 1722 bp, Bovine  19866880581126
  misc_feature (1)..(1): n is a, c, g, or t
ntttttttgattgaaattgcatctttagacccatgaacgctcccatgtgatcgttcactgaaactcaaggtccttaacatgtgctatctgtggctgggatcctgaagagcggtgtgtctgcaaaattactctgttagagttcagttccaaagcctaacagagaactaacgtcttacttaaatgaaaccctaaagtgggctggctttctagaatctattctctcctcaatgtaacatccaactgaattttgccaccgtcctggagtgcaggacctctctcaccctcttccttctttgtagtagaagactgtttaccattttagaagttaaatggttaattttagtttctctgcgctgaagagcatcctcagaatgaaagtcttaagacaagtgagaactccagatttcttatcctgcacttttcctgctacacttttgatagaagtgaccttcctaggcaactgtttttttcatggattttgctttttattttgtgccactgaggtgggtacaagcatgtacagtacattaaagctaatacatcacccctgtcagtggcaccttccctttggtaccccttttccttgctgatttaaaacactcagtccccagtgcttatggttgagtagcaggaagctaaatgatgtattccaaagctcttaacatactgcctggtgtaaatggtccatgtgagtatttcagaaacgaaacggaagagaaaagaacattgaaaacactgaaaagattaacacctttttccagccttcaaagaaatcggagtgcactgtatatatccagaataaaaccatttattctctcccattgagactttttattcagattttcaattctatgtgcatagcatccacatacttatggtttgtttcactacagaattccacggaggaattagaagatggagaagttatgaatggtatgcagacagaactactgacatcaccaaaaactatggatgtgttgaggtattctatttatgtgaataagaatattttatttcaattgaatgtttttttaacttatagttgttttattttatagaaaaaatcaagataagaatacttgagtgaaacctgattctaaaattaattgctaaattacttttctttttttacatgagaaattcctgacaaacacgtacaaatgagcctcaatccttccaaactttttctgcaacctagatttcttaattgttttttttcttctgtttgagctacagcttaaagtgaacatttcagaattcattgtggtgtggtgttctactttgacattagctctttgaatactactttgcactgcattttaacaatcttgcaatatttactctatgtatataaaatgaacctagcctatcaacccagatttttatgtttttaatgtaagtaatttgtatacaaaatcagttgttctcatggttatgggcacttgctttgctctgtgataatttttagctcgtccctagctactgcctgggttcaagttccagctctgcagcttattagttctaggagcttaggcaagttgctcgtcaatctgtgccttagtttctgttacgtaaaatggaaataaaaataaataaaaataaaataaaaaggaaataaaactccttcagagttaactgttaactaaactgttacctaaagacaaattagttaataaagtgctgtgaacagtgcctgaggcagagtaagccctgttgctgtcg

SEQ ID NO: 59842 - DNA, 1427 bp, Bovine  19866880587200
  misc_feature (1)..(1): n is a, c, g, or t
nttaggttggtttaacttataagactgaatataatatttctccagctgaaggtgatcatgcattttcttggtcttatacattagggcctgaaggacttggtttcactgtggttaccagagattcttccatacatggtccgggtcccatttttgtaaaaaacattttaccaaagggagcagcgataaaagatggccgcctgcaatcaggggacagaattttggaggtaagaattagaatgaatatcttcaataaaatatttctttgtgtttaagtaaatgaaatttattaaattttaaattaattatattgaaaagtgttcttgtagacaagataaggacttgaattagaaaactggttaatcaatagctaactttgtaagtcctcaataagggcagtgatatggagtcaaatattgaaaagtttttcctacctcctctttcttacttccacctcttagagttcctgggggatttgagtcatatccatcagttcatcatatattcagttagagctaagaattgcaaagttgcactcaagtgcttgtaatagtttctttaaacttctctaagaatgggccagtcggtgttagttcagtctatgcatatggagaagtatttgggatactcaaaggaagaggctttcttttttccatttatttttgtttaatagtattatcttcttgtctacatatattgtcaatttacctttcaagaaatcatcttcatggaaactggttcggtttaacttgcccatggcatggaagcaacaccagagctttgttatagttctagatcatgaaagaaaatggttcaaatgattaatgtagccccaaattagaatctccaataatgtatggtaacctagttaccataactttctaacatagagaacactgtagaattataacaaaaactcatgtctgcaagaattgaccatgtgataaaaatccatttctcctgtttatattcagtggagaacggtaccagttaagcatttgaaatcagcttactccctacttgaggaatgattctctggtatctgtcagtttgatttgtcttctctaagaatgtgatgtcttagggaaaaactgccgatgccaattactgaatgtctgagactgtccagtgccatagtaatgatggctggcatattgctagtatcataaacatgattggtttggactcgcatactcagttttcagcttcccagaatttccttgatcatgagagcccatttgctgcatgctttcaaaaaccgtctagggcggacaggctggcagtgttgtaacttggctgcttatatgcctgtctgcattaggtcaatggcagagatgtcactggacgaactcaggaagagcttgtggccatgctgaggagcactaagcagggagagactgcatcgcggtcatagcccgccaagaaggaac

SEQ ID NO: 59843 - DNA, 1070 bp, Bovine  19866880592341
  misc_feature (1)..(1): n is a, c, g, or t
ntatagccctgaaatgttatgatagtgttacattattcagaatgcagttgttcttactgttaaacactgaaggtggtgtctatctaaagatagacttcaggttgctttcttcaggaacataatatcattgttttgtccagtaagagatttcacttacattgtttccacttgcaaagctttttctcagattttgtcttattgaatggaattctacactttgcagtagctgagaaacaacatggctttcagtaagttaactgtattttaaatttatttatcaatttcttggaatgataacttctttataatattttaaaggctgtattgaaattgtttagttttggtatatgtatccatagtagtagatgcccaccaaatactagttaagaagaagattgtcggctttgttactttaaggattttttgagagctggttctgtattagaaaggagcttggaaatagtatttttttttttttttgctattgctctgagttgagttttgtattatatttttgtagttaaatattgatctcttttttgaaattcttaattgcttatagatttttaaagttgatctttattttatggttctttgctttaaatgttccacttaatttcaaatggaaaggatttaaaacagctctaaactaggacagactgcatgtacatgttgtgaaaaatgttatcaagttttaaagttgtaatgccactatgatggcatttactggtaaggtttctcatcatgtgctcaggggaaggaagcaaagaatcttactgtattgctttcatgaccttgttacaaaatgcagggacttcactgggcttttgtgttttaaactagaaaactcatttgggtatctgacattatttttattgtttctccccatagcttcctgagtggcctttcaagttgtttttctcttatatcatgatactcttacataccacgccttcacaagaggggtctgtcactacttagacactacctgttaggtgctctcagacccttctgggttcctctcccctcttcttcacctggcatttcagaagagctagtgtgatgaggca

SEQ ID NO: 59844 - DNA, 1247 bp, Bovine  19866880606035
  misc_feature (1)..(1): n is a, c, g, or t
ntgagtggttctgtgccaagtgctttacacacagcaatacactttctctccagaacaatcctgtgaggtttattgcgaggcccattttacagatgaggaaactgagggtatgcaacatataagtatcatgcttatagttcaaaagacctatccatgttggaacttgtggagtccaggcagtatggtgcctgtgatagactcttaactgctgtagtagttctcaacttctgcaggccaccgtgactagacctagccacatgaaatcccaagatatatttctacagtggcagtaagatgtcattcaatttcacactctccacttaactacacttacgtttcatctttcttatgttgtatgaagtgcaagtcataattagtagtctaataatagcaaacttctcaatggtgagggaagtcattacagtagttaacacagccatgtcctctgttagaaataaatgttccctttatctaatgtaccaaaaaaaaaaaaaaaatcaatatgctgaatgcctctgataacattggttcaactagtatctcttaaaattaaactcaaatcttgccatacaacactttgtggtggtggtggtttcgtcactaagtcgtgtccgactcttgcgacctcatgggccgtagcccgccaggctactctgttcatggggttctccaggcaaggatactggagtggtttgccattcccttctccaggggatcttcccaagccagggattgaacctgggtctcctgcactgaaggaagtttctttactgactgagctaccagggaagaccacaacactttatagcaggatagaaagaggaataaagtccttgtaagggccctgaatgaaggcccttactgagagcatgagcccaaaggcagcagcacattcctaccttggactctccctgtcttgaggacaagagctctttcctcactgtgctaggtgtgttcttcactattatgccccactctttgtgaccccatggactgtagcccaccaggctcctctgtccatgggatttcccaggcaagaatactagagggggttgccattcccttctgcaggggatcttcctgacccagggatcgaacctaggtctactgcattgcaggcagattccttatcatccgaacaaccagagacacccatggcaggtatatcccttgctttttctacctacaaatatccagaaagggaaacatccagaggctgacacaggaagagaaattgtgtaacttca

SEQ ID NO: 59845 - DNA, 942 bp, Bovine  19866880642287
  misc_feature (1)..(1): n is a, c, g, or t
ncctatcccttctcctggggatcttcccacccacgaatcaaattggggtctcctacattgcaggaggattctttaccagctaagctactgtagcttggactatacagacctttgtcagcaaaggttggtttgtcccaataatggcttttatatttttaattagctgccatatttttttaattaaaatatttcacctaaaaattggaatccctatttctcctaaagcatcagatgatctggcaaccagactctggtgaaggacctgctggagtgggatggaggccactgtctagacaaggcatgtcttctccagtgagccccacacatccctgccacccctacattcagcatctcactcaatccagccacacctgcttttccaggcttttgaattgatgtccctgacttatagtacatttgagaagagggaaaagattcttagaggttactgcttttatttgtcatctgtctgtgtccttgaaatcacactatccagtgattctcaacctaaccttctaactctgtaagaaagggtttgttgcaatctttgtacaagaaatgacacaggccattatataaacgtgtatttaattttcattagacttatcctaggtagtgcttgaactttaaatcttatatagcagaagcaaatgtgtgtttgaaatagaaattgccagaagaaagaacaaggaagacatttagataatttcctctggacgtgtgaagtcagagcaagatccatctttgtattatctgtaagttgggagccacctgttcttcatgactgactgatgcttggaatttgaggccctgagtttaattaagttacacatgtgggaggaacaagctttgtagcagcagcagttagattattaatggactcctatattgaagtgttcacatgttgaaaggctaattataatataattttagttttaaaat

SEQ ID NO: 59846 - DNA, 2262 bp, Bovine  19866880720244
  misc_feature (1)..(1): n is a, c, g, or t
nccccggtatttagtgcatgtagatttgctgttttggtgtttagtttgcattttgtctccttgttgcattttattgaaaacagtattttttatgagattttgagatgtgatattcctgttttgatatttttctttcttccaaaggaagactatctaattattgaagtcattcttccagtagcaaagaagtaattgcagtttctggtctccttgatatgtgcagaaagttaacctttatggtactggtgagatttattatttattgggactggagcttataagctctcttagaagtgaaccccgataaagcaccttaatcaaactttgcacatgtgtatatgattaatggggtgaatgtgatgaaaacgtgagctgaggaagttgctgcatttggtgattctggcttagcaggaagttactgatatgtgtcatgcgttcattgcatttatttacttaattaggcagtgttgggagatctttccagagcccctgactccttttttggtgcttgactatctgtcttcatcatctaagtaaccgctgaccaaatgctgaaatatgtgactccacttatgagtttgcattaccttggaactagggcaggggctgagcttaatgtagctattaggttttgcatgatgtcttacagtgctccacacatggtctgtgctgtctttgtactggtagcttggtcattatgactggcaaattgcactgagtgctcttcaaagaatcatattgttaccatctggtgaagtagaagaaaggagtgcagaaattctctgggtctccatacctctatgctaaagagtttaattcagcttgcatttggttactaaattgtgcctattttttggataattctccttagagctgggaaaatgctcctaaaggtcagaatagcttgagtaatgtgaagtccccaaatgagacgtcagtcgtctaaaccattagaaaataaagcatagtgacttatgctaatttataccagtggacgcccttatttcccatctattcatcttggtgagacatacacttcccttccggcttatcctcttcagtcacctataaaggttagtgaacaacaagaagaaatgtttcaagtctgcttatctgtgcaattttgctatttgtacgttctgaaagagtatgttaaaaagtaactgttctccccagtgccccatgctaatccagatggtttttctcaaggctttggaaataatagaatatgtggagaatagaacaatgtaagaatataacttgaatagaatttaacttcttgtcatcatgagtggtaagtaagcattgtatcaacctggattctgaatttaaaaacttgttttgcagattttttgttctaaaattaagataagattccttgatagttatttctctatcaaactgtatttgaatttagcattcatattttatacagcttaattagatatgtttagcgctaagagtctgacacgactgagcaacttcactttcacttttcactttcatgcattggagaaggaaatggaaacccactccaatgttcttgcttggagaatcccagggacaagggagcctggtgggctgcagtctatggggtcacagagtccgacacgactgatgtgacttagcagcagctctatataattattcataaatggacacattgcaaaaaaaaattaaaaacgccaattgcctactggtcagcataaaaatctcaacaaaatcacatggaacaagtatttgaactcattttttacagatagttttgactatgaaaccgtttgagtatgaaatcattacgactcccacattgagatataaggaaaggaattaaaaaataaaataagaatagcattttacaagtggctgccctttaacccattcaggagacattttattttttagcttcttgtaacaagttttgcttggcaaaaactgcttgctgttttgggggctgttttcttcagtagtttgttaggtgattgctctgcttttaaattccagaggagtgcagtactctttaattttcataattgcaattatgcagaatattacatttatgtatgtatataggtatggttctagttaaggcttgttaaacttcttgtgataatacataaagacaaaatttaaagcatgtgatgattgtgtgttgcctttggttcagtatttacatgtccatagtgaaaaaaaagaataatgttttttccataaacaaattggagttgtgtgatggacattaagcacaaattttatcagagt

SEQ ID NO: 59847 - DNA, 1114 bp, Bovine  19866880740000
  misc_feature (1)..(1): n is a, c, g, or t
ncatttggtaaatgctttggtctcatatttaaaagtcactgttacttaacttaatatttttataatccagcaaggacatgccttctttattacatacttgctgtggacaattttactcctttggctaaccatttttagttttttgtgtctccttattttctactccaaatgaatatttgaaagatcaaattagtgattcgatggttctgactattgtgaccattgattactcattttgtttcttctttttatataaatcattattcttttcattttccagttacaggccatttaaaatatgtgcatgtatatatagttatacacacaaatacaaatacacacacactgacacccaggtatgtgtatatattaagatatatatatatgtatatatacacacacacacacacacacacatatctgtatctatataaatgatgttatgccttgggttttaaatggttaatttatatagcacagttacactgctttgtaagcaagttttcagtaccatagcatttcatcatatatagcaaaatgagtatgtagttttttacatactcaaatcggtgttaaaactgaagatgaaatcgtacttagctttctttcttaaacttatgcccatcctcctaaaagcagtcttgcaaacagatgtagggaaaaaatagtgagaaagctgttgtctttcagaaggaaaaattgcatggtgatattctgaaaggctctcattggagaataaaggatgtaatctctgtattaaacacagatggaatatttcagtctcagctgtcatcgaagaatctccacattagtttggattgtgcacctttggggcatggataaatgacagtgataaaactacctctttgctgagcaggagtacacaacatccctttatctatgccatctggtgatgcagaggatggcaaatactctctgccatgatttttttctttctttgggatttatacccttttttagcatagaatgtgtttgaccaaaatcagtctttgctccgatttcaggggcaacagattgaaaagagaaaaagaattctaagattaaaagtgtaggaggagcagagaagttagtttgatgtactgttgggatattt

SEQ ID NO: 59848 - DNA, 1224 bp, Bovine  19866880753968
  misc_feature (1)..(1): n is a, c, g, or t
nttgcctggggaatccccacggacagtagagactggtgggctacagtccatggggtcccaaagagttggacacaacggaagcaaattagcacacatgtacacaataaggcaatgatctcgtgttttgcacctgcttttgagaggtcaaactggagtgtatttctcaggtaaatacctaccttggaaaatgaactgacggaaaacacattaaaatagacccattaacgtggtatgcacattttaaaaaaaaaatatctacatctcaactgctaatgatgatgtgttcctaattcaaagactaggtttagtttggtaaccacaaagtatcccctgactactccttccccagtgggtatcaggaaggaacatctgaaattagaatttgcctagaagatatatcatgcataagctttattttaaaaacatagttcaatcttttttcatgtttaacttgtaaaggtcaaagtattataaaaatcaacaacaacaactacctcaaagatcaaaaagaaataaaagagctttgggtaatttgcaatatccatgacctggaataacagacatgatcaaaagagccacgtgctctgcacaatctcacatcatcgacatctcttcaaggactcagacctatttttatactcaaacaaggtaaagctgtgtgtgtgcgggcataggtatgttttgggagtgagtggggtggtgggtggaagtagaatatgaatgccctcgatgacatccctaacatgcctaaatgcttagcacagagcctggtacacaagggaaggttaaacgctgattccttttcctctcacagcgagccttccctgactcccagactgcgtcccacttgacttgtttattcctattctgcttttactttgttgcttctctttaatctcttcatcacaggattgacagaggaacagagaaagtatcgagatcaaacacatcaaataggtaatttttgtttttcttttttccttgctcttcatcacacaagaacacacaacctttagacatgcagtgcagttccccgcctagcagtacatggtttgcgctgtctgttctatttttagcataacttgaagcaatataccaatgcctttagtttttaccctgacgagtaaatattttaataataaatgtcaccaagtgcatttataacagagtccctcaatattcatgatgtggtttgctctgtagacagcctatagcattctgtca

SEQ ID NO: 59849 - DNA, 838 bp, Bovine  19866880896298
  misc_feature (1)..(1): n is a, c, g, or t
nagtgggaattattccattttatagatgaggaaacttgagatgtcaatgcaaatagtaagggttctagatgtgaacctaagtcactttaaactttttaaaataaatcactcaaagtttagaattaattgcatttgacttcagatgaacaaggtagataaattcctaccagatagcaacttattttattatactttcctaatttcttgaattcaggttctcggtgattaaaggtctcgagtgtttttaaaatagcatttagacttttgtgctaaaaactttttgatacttattcttatgaaactaatgataccctaagtatactacttgcaagttattttccaatttctggtttttgtcattagcagtataattcagacataaaaaaggaagtctttctcaggtcatgtttcatgtgtaggagagagaaatcaatgttcacaccttgttagagtttctgagaacttttgtgttcaggaatttatatttaggaaattcattgattgtttttaagttcccccaggggcaattgagctcctgggctgctaattctcaataaccaaactcagacctgacaaacaaaaatgcattagtctgtgacaaggtataattagtaatttccctctgaacagtaataatcattttaactgtcagaaatatttttttcctagtaaaaatattccctttcaaaagccaaattaaaatatgaaagatatttgcctagttgagcaagcaacgtgaattggatcacctgaaaggaagctatatatatctccacttttggaatgcttcataggctaaatattttctagaattcctcctgatactttcaccaatctc

SEQ ID NO: 59850 - DNA, 988 bp, Bovine  19866880994101
  misc_feature (1)..(1): n is a, c, g, or t
nactctgtaccctccaatggtttcctccaatgttgacatcttgcaaaaactatagtgacatacaaccaagatgttgacattgatacactcaagatataaaaccgtttcatcaccaccagtattcatttttaaaactccaatttttgatggctaagtcacctcaagttcagttcagttgctcagtcatatccgactctttgcgaccccatgaaccacagcacgccaggcctccctgtccatcaccaactcccagagtttactcaaacttatgtccattgagtcggtgatgccatccaaccatctcatcctctgtcgtccccttcttctcctgccttcaatctttcccaacatcagggtcttttcaaatgagtcagctctttgcatcaggtggccaaagcattggagtttcagcttcaacatcagtccttgcaatgatgcctccaggacgatttcctttaggatggactggttggatctccttgcagtccaagggactctcaagagtcttctccaacactacagttcaaaagcatcaattcttcagcactcagctttctttatagtccagctctcacatccatactcagctagtggaaaaaccataaccttgactagatggacttttgttggcaaagtaatgtctctgctttttaatatgctgtctaggttggtcataaccttccttccaaggagtaagcgtcttttaattttatggcacctcaaaggaatcaacttaacactgaatgaagttcaaagaagcaagccagaaattcatcaagagaacattgatcattagtttctggctcttaattggaatgttttggttgtcagtcaagcagcaacaccagtagagaacaaaagacatttccaatatccctttaaagtagtaagaggaaaaaaaacaaacaaaaaactaatatatctgatagaccttggttgagtgaataattaaagggtttttatagattataatggactaaatgaaaaa

SEQ ID NO: 59851 - DNA, 1202 bp, Bovine  19866881032028
  misc_feature (1)..(1): n is a, c, g, or t
natgaagggcctgtgggcaccagaaatccagtacactcacaggagtcaaagatgtttacaacgtgaatcagcaattaagagtaacatccccccaccccccaccccccacaaaaagtcatatctttcattcaagcaatactaattatgctgtttagttttgtttttccaaggcaaatgacaagaaaaatgtataaccaagggagtggttgacagaagtgaagaaatatgagacaactaaaactgagaacaaaaaataatgagaaaaatgattaaaagaactgaattgtgtgtcttgctttactggtaatgagcctgaactaactgaagaagttgcatgtacttatggaacctacaggagagctgggggaagcaggttcctcccaatctcttactggattttgttcccaagctgggtggataatataagaacaaggagtgagagggctgccctggggtcaccctcattgtggcccctcaagagaagctggccatgtagacaatttctgcttttccccacctctgcccttagattccaccctgtctgaacttatctggaatttcacacccattcatactcacatattcattacctcactccaccccctttcctcagacctgttgaacaagaatctatcttccacccaacgttagtttcctgcataacagattaccccaaattgggtggcttaaaaccaacagcaactcattctctcatggttctggaggccagaagtctgaaatctaaggtgttggcagaactgaactcccattcaagggtataagagagaatccctcatggcctcttatggcttctggtggctccaagtattccctgacttgtagccacacaactcaagcctctgccctgacttcgcatagccctttcctcttctctctttgcctttctcttatatgaacacttgtcttaggatttcgggcatgctcaaataatccaggatgatctcatctgggagatcatcttgacttactgacatctgcaaagattctttttcagcataaccccacccagaggtttggggtagacacatctactggtgggaagccatcattgaacctcttctaaattcaaagatttctgacaccataggtaagagaacaatcaaaaagaaatccattcacaacccaccaaggcgttttgtaggatactttttcttgcatctccagttttcttataggccaaa

SEQ ID NO: 59852 - DNA, 1569 bp, Bovine  19866881041616
  misc_feature (1)..(1): n is a, c, g, or t
ntcagttcactttgtactctgtctagatctccgacttctaacaaaaactatttgtactagcacagaattcagctgcaacttcctaagaaactttaacggtgttctaagaacactgcgtatgaacaaaaactcaccttttccccttagcattctatgaggagaatctcctaagtcctcttaaagagaaacagatttgggaacttaaaaaaaaatatagaatggtcttttatttttttcactctctggtctatggtaattaatgtcgactcaataccatgctcaatcatctatctcccttgggacagtactttcaattaaaccttttatttcatccaagaatgtctgttctcattgaccactgcactttttatctgcggatttatgataatctaatgcacatctcctcacaggctgaatggccttatgaatccttattgttcttataccagaagagaagtgaaaaacaaaattagctcctgcagaagacaggaaggaaaccgcatttgtttaacacagcgagaggcctttcactacctgcccagtggccttgaccacttcactgccctggcctctcaatgtgctggctgcccttgccgggctgctcctgtctgataagaagtgcccattccctcgagagctattgagaactgagggtgagaggcaatgcgatctcagggttacgttttcaaaggtttgtgaaggaagtaagacatttacatattcttttccaaagaaaccctacaggttaaagaggaacctctgaactgttattgatggcaaagactgggcttaaaaaagaaaaaaaaaaataagcctctagcttgtttataggcattttgcctttactttccagctaggatatacatgatttggttcctatttcagaggtacacaaattatagtggcatgttattaacttaaccaacatgaaaaattgcatacatatattttacaatcgtactcagttatgcagctgcagacaaggctcgatctagcgcacttccatctccctacaatattggaaagaagtcactgttatgtatgttctcacacatgaacaattcagcagccttcatctttgtttaattttcttgtgtgccgagatagcacataaaattatcaagttaataatttcattaatatttatataatttatttaaaatctatctagtacccaagaggaactaaggtgccttgcattaataataacattgaaaatatctgccaagttttcaataagttgttattgttgacacagtcatatttttctaatagaagaatccagaaaccaggtttcttttttttaattgcattaaggatgaatattatcccaaacagtaatgaatagtgtttgtaactcattcatttttctctatgtataatggaaataagctttaaataaactgtgatggtgggtacagaaaaggcaatttctagttagaaaaaaggttttatgctataagcctgtttgtaaatttgattcttggaattcaatttttttttttcctcaaaagaaatgctggtagactggtgtgtaggcttcaattagccagcattatttgctcactc

SEQ ID NO: 59853 - DNA, 1145 bp, Bovine  19866881057982
  misc_feature (1)..(1): n is a, c, g, or t
ntcctggattgagttattggtgtttcagaaatggccatttaaagtagacttcatgaaagtaaattcctcaatttattttttcagatttttcattattaaatatacttatagactacatagataagatgttgacaattgtgcttttcaaacaacaataaaagaatgcttttggttcataaaaggagagattatcaaaaagaatgaactttattaggagaaataaaatttattctaaaaaggaacatagattctatctgcttaagatagagactgacattaaaatgtttaggctaaatattcttttgaaaagtagaggattaatgagaaatacttttaaatgtataattcaggtgtacaaagggcagtatgatgggaaagacgtaaagtgtgcatttctttgggggaaagtcaagaagtgcctttagaaaccgaactaacttatggtaataaaaatctagaagattaggaggtgctacgatgtgttatgaaagtagtttattttcctttcctaaacatgtatgtttctagaatcagttttaagaggctagtttggaatgtcttttgcaattttaaattgaaagccttttctggaaatttcaaaagttaatgtttatcgtatttttataaccatatatatcttcattgctttgcattatgcagcactttgaaactcagaatataatttagatagttcacaaagatgttatagtccagccaaaaatagtccatctttttcactgtatcatgcatttaaatattatatatgaatatgattatttgaatttacatttgtttattctataaacattcatactacattgtggtagttttgcagtaagagctaagaagctctattattcttgcattaaattctttagtaaaaatttactgttttacgtaagtaagtgtattcagacttaatgaattccaaaagaaaagaactaatattagctttgcttcattgtgctttatctccaggatattttattctccttagtcagattctacgtagatacaatcttttatctgtttaaactcacttcttctgaaagcactttaactgtaagaactgaaagaatatatacatgagagcaagcagttagaagcactttaagagaaggattcttcttaagctatatagggat

SEQ ID NO: 59854 - DNA, 795 bp, Bovine  19866881059512
  misc_feature (1)..(1): n is a, c, g, or t
ntgtaagagcttaataaatgttagcaattagcaaaaccaatattaatgatgattttattattacctatagtgtttgcaagagagactaatgacaatgcgacttgagagggagttattcaggcatgaataaaattcctattaattaggaagggagttgagaaatatctatttggctgtgtctaagacattaaataaaggttatctaaagctttaaccattgtcaacatccttgttattctgagtctgagaccaaggctgagactaattgtttgaatgtgataaaattagaaaggctttgaaatttctttgaaattgctgcctggtatgcatatgatctccaacacatcaaaataagtgtattagtagttaattgcctctgtggagaaggacagagttgaaaagattttaacaagtgaagaatgataaaaggaaattaatgtacattattcagtattaacatgttcagtgttgcagtgtcgtagacaatccttttttagtgtttttctttattattttcataaatatatttttaacaagtaaatttatgaggttttttttccacaagttttttagtacttcagttctccaaggcttgttttttttttttttttttttatatatataaaggcttaggtatacaagaatttgtagatttaagaaggacagctgtacacgtgtctttattaaaatatttcttgtttagatttcagtaaaattgccttcaatcagctttggagaacaaagagttaaatcattatataaatattataccttcatgcatttcagtctgtaggc

SEQ ID NO: 59855 - DNA, 4355 bp, Bovine  19866881097960
  misc_feature (1)..(1): n is a, c, g, or t
nagttggactttttaacgtttgtgcaataaatataattatttgaagtgcccttcagcacttccccatagcctccatgaaggggccgtgatagggcttgcttcggggtcttccatggtttctagcttgggaactggcttgttgtagacacttggtatatgccaaagtgaattatcaaaacagaatcctagagggggaggtatgaaacccatttcattttatgaatctagactggatttcagaaatggagttaaggagagtttcaggcaatttcatagtcagtgtaattgaggaaatgggctaggttagcgaggtagtggaagagtggctgaattcttattaaaacttggggtatcactatattgcttcttaaaattaccccctctaggtcttcagccctgagggttcttttgttcttgtctcatggagggagctatggaagagaatatttaatcactcaatgcattgtcagtctggatgatgagaaatattctgtgtattccagcctgtgcttctgcttctgaaagaagttcctctccctctgagtgaatgaattgaggcttgaggatttgggagggcaggtttttttttttttatatataaacaaggttttgttataaaaataaatgcaatctatattttatcatttcaattcaggccctaagcatgcacggtagttacctttcatgaaatgttcttgcaataatgctatttcagtgggctttgtaatgaagctttgatttgcatcgctgtcctgagaactttctgacaatgctcaggtaatattatgaaggcagaaggaaatgaaatgaaatgatggtaatgcatgtccattgtgaaaaatgttaagttgccaaggcgatgtcatatcaataatattttcataaattaaattaagatacatatggcaactaaatattgcatttctctttactatcacttcaaatacatgaggataactattaggatgaaaaccagaaattagacataaagcgtctcagccaaaatgagagatgtgctattcatcggttcaacctgatgtgctctcaagattcccgtcacgttcacttcaggcttgcagcctctccccctccgtgttctccagcagcctctctgctgtgctcccctgcttcctgaagcagaattgctgttgagaattagtgagagtcagagtaattctattaagcctcacttccacgctgcaaaagcaaccctctggtttaagttcttctattccttttaaggatcaagctggttttactttctttccttccttcctttcttttacagggaggtatttattttcagattgttaatggcattactacttaaacttgcctgcttagggcaaggttactgttgttgtttagtcactaagtcatttccggctgttttgcagccccatggactgtagcccgctaggctcccctgtccatgggatttcccagttagaaatgctagagtgttgccattttcttctccaggggatcttcccaacccagggattgaacccatgtctcctgcattgcaagcagattctttagcactgagtcaccagggaagccccaaggttactgtactcactcacaaaaattaagttttccaaggtgagataatgcacttctgttgtctcagtgaaatgggaacagatgatatctaccttatcagtcattctgaagggcaagtgtggttctgcatgtgaacagcttaccacagtgcctggagtcagtgtaaacaatagtatttaacttgggcttaaggatctggattcaaattttatacctttaaatcacttgtttaaaaattaattggttatatagagcaatatatgctcattgtaagggaattttaagataatggtaaccaaaaggaataaagtagaagctactctgattcccaccacccaccaataagcatgcacacaccattttcttattttgatgtatatacttctaaactctacttttcaatagaaatgggatcataatgcatgtactttatatactctctcatccccagtaagtatattaagatttattcaatatcaatttattcttctgcaaaactttttggactagctggcatagaacattccattcaatagtcataacacagtgttaaatatttagacggtaccaattttatgtcattttaattaggatgaataccccaaatgcatctatttcattttaaacgttacatcaaagtatttagctctaatcctacaatataaaaacacgatgtcatataaatctatttaatctgctttatataaataaattcactcagtaaatgtatgtactcttgctgtatgtcaagaactatcttttacttttttcctgtttgtttgtttgttttatcccaatgaatcataatatagtttggatagtaatatttatttctgagacttcttttctgtacttctttactgtaacaatagctctgtgacctacttagaagctgtttcatcttggaaaaatcacttaacctcactgatacaaggaattgtcagctctaaaatagggactaatgttcagatatctcacagaaataatgtatgggggtgtactattacaacaagaaattctaactgctgacttaatttcatttctaccatgtctgaaattgatttgcttgagaaaataagttttgccctgttttatacttaaacgattgttagcttttatatttctcttttgtctctcagtttatttagtctaaggatgaataaagctgatttccatttattgttcagcactggaaaatacaatagtagagcaaccaagtggaaggcaaaggggaggaaatgggttcctcaaaaatgcatttctaaaaatattaatagtaacattgaacgtcagtagagggatgacaaagagaggcacgtttctttaaagacaaagggcaagtttattttgaaggtagggagggggaattcaccactttcatcaaagactatcaaatattaaagaaagctcagaaacattctcattggaagagctggttttcatgtgaatggtctttttccttcagtgaaacaaaaagactatgcctatatagttatggcattcctttactaagattattcaatgctcaatttatcagacaaacatacagcaggttgaaaaggaaatatgttacttaacactataatgtaccaccaagtttgaagctaaatctcattcttttaaaaaaatgcataagaatgcactacagcaccttctactttccttttaatttatttaaaaatataaatagaactctcatgtgcttaaaaagtgatatgttttggtacatataagattaagatcaacatgtctgttcttttagtgggttagtggggaaggggaaagagagggaagtagagcttttattatcacctaacatcctacttcatcatgtttagtacttctaatcttatattcaccttcatttatttgaatatcatcatttctgctttcagtttgtttgatttatatctcttaacccactgcttgttatctttgttcttgaaactttatggataataatgtacaaaagttaaaaatccagtattgtatcaaagtattttgttaatgaaaaagtataatcctggccctaattcctactctctagacaaccattcacaattttttgcttgttttttcctagtgctgatctatttctaactagaaaccgtgtactctttttgatactaatttttcaatttaggacattagctttttcatccttatttatgaaaaatgaggatttactctcttacactaaccatgcttcacttttttttcctcatttttccaaaatacttataataaaattttagttcaatctgtgctttgtacttatattattatttactctgtgtgtgtatctgtgtatatatatttaacatatatatgtaaaatatatgtgcatgtacacaaatatatatataacatatgtgtataaatatatatatatgtatatatataatagtgtgtgtctgtgtgtacatatactacagagagtatgatgtattgtaactttattatcctagttctctaaagttaagtgattaatacatttgtggttgtttagtcactaagttgtgtccaactcttctgagaccccatggactgtagcctgccaggcttcttctatgtatggaaatcttcaggcatgaagactggagtggtttgccatttcctcctccagagactcttcccaacacagtgatctaactcatattctgggaagctcagttaatacatttcaatcaaaagtttctgttaaaaacttccagcagaaatataaaacacccacaaaataaccaagtgtgtatgtcagtgtagaggtttatcttttccttaagtattcc

SEQ ID NO: 59856 - DNA, 1405 bp, Bovine  19866881104437
  misc_feature (1)..(1): n is a, c, g, or t
ncttccctgtcctttgctatctcctagagtttgctcatactcatgtccattgagttgatgatgtcatccaaccatctcatcctctgtcacctccttctcctcctgctctcagtctttcccagcatcagggtcttttccaatgagtgttcctcacatcacgtggccaaagtatttctaggtaggaagagatgcaaagattgagatcatgagacctgttccaccagactgcctggagcacagagtgcctcccctccaccctgaactccctcagggggtgttgaaggtcaacagccacagcagcacatggttcagtctctgcaaaggcagatggcaaatgcccttggcaaacacagatttgtagttgacacaaatttatgagcagatagttagaaatttggcttctcgagcttgtgtcctcgggctcaacgtggtagtgggtaatggtggagaaaataggtggaaaatcaagacctattttcagatttcttttcctaagatcttttaaacagttgtaacaaacttatcaacatatcaccccttttaaaatgtaccacttttcaagattgctcaagaggacaagtcactgcttcttcctatgttttgtttagaatggaagggcccagagttttaaatatcacctcatgttctccttatgatcaccaagaaaatgtctttcatctctgtacaggtgatatcagggagctttgagcaaaacaatcagaataaaataatgcaccaaaggtctagttgccttgtctgtttcccagtggggggcatgtttgagaactgttcacatagaacatttcggctgatattagaaagaagagtaagaacatccaactttagaaaggagggagttttgaagatacataagaatgatcattaaagcacctcaaaactcagttaaacaaagcaaatcaaaggatgaggccagagacagtaagtacaagaccagagtctggaagagctggctaatgagctttcagattaagttccgatcaaaagattagagaatagctctcttcagagcctggcaattatcatgtttaaagctgtgacaaagacaatgatattaacatatctaagggaagaaagtgttaacagaaaattctcagtggggggcagcatgcggaaaatgaggaggggaccaagaacaaggcctgtaaatcccaaccagtgaccaagaaagaggtgccctcaccagattctagtcatctcctcggctggtgctctcctcacaagggggaagaatatatttcaagcactcttagctgaagaacccttcattaagaaaatctaattcccatttgtttgtacttaatattcaccaagcaatcttgacttgtaggttgcatttccatctgtttgcctgagggagaaaatgtgagattcaaacaccacttcg

SEQ ID NO: 59857 - DNA, 1811 bp, Bovine  19866881109494
  misc_feature (1)..(1): n is a, c, g, or t
nctttggcattacctttctttgggattggaatgaaaactgaccttttccgtcctgtggctactgctgagttttccaaacttgctagcatattgagtgcagcactttcacagcatcatcttttaggatttgaaataactcaactggaattccatcacctccactagctttgttcatagtgatggttcctaaggcctaattgatttcacattccaggatgtctggctctaggtggatgatcacaccatcgtgattatctgggtcatgaagatcttttttgtatagttcttctgtgtattcttgccacctcttcttaatatcttccgcttctgttaagtccatgccatttctatcctttattgttcccatctttgcatgaaatgttcccttggtatctctaattttcttgaagggatctctagtctttcccattctattgttttcccctatttctttgcattggtcgctgaggaaggctttcttatctctccttgctattactatggccgaaggttcatgacattgtacaggaggcagtgatctagactatccccaagaaaaagaaatgcaaaatggcaaaatcgttgtctgaggaggccttacaaatagctgtaaaaattagataagcgaaaggcaaaggagaaaaggaaagatttatggtaagtatgttctatccaatataaatataattttgaggaaaataatcagagggattaggggacatatgatctaaaacaggactgtctaagaaaatgtgtgacaaggtgataaatatatatttcagtgttacattttgagaaatctaattaagcaaaactttaccagaatcaaactccttgcctttcattcaaggaatcagacaaaataggcacatcttgttactaatcttaacagaggaagctaatacagtgttaaaataaaaccaatttaagataaaataatttatatgtccaatataatcttttttattgaaatatagttgatatataatattatattagtttcaggtgtgaaacataatgacctttttttttgtatacattaagagataatcaatgaatctagttaatactataaaacattttctttcaaaaccaatgtgaatgcattagtggaaaccaacctggggtttctggtcgatatttgggtcgctttaagaaaacaataggtaacattaacgaggatttgtgagttagttctaaatatcaatatgatgatgactagcaactgtacattttagtaagctcagaaacatcctaaaagagaaactactttttctttgggttaaaattatacacacatgttactggcatgtttacttatatttttctggcatgtttacttatatgtcaataattagagactgaatcatcaaccagtcaatcactattacttatcaatgttatttttttcatgaaggaaattcttccaacattgaggctatgagggtttccagctatcatcctcagtagcaaatgcttgacacttggagtttcatatattctcaagtgactctgaaggcccttgtctggcagcaatctgatattttgctgaggcatgaatctgaatcactgcagaaaatgcacatgacacaaaatccagcttctgaaacctttagagcatgatttttctccacttgtctttggatatacaggaatgcatctcaagtgattatttactagatccaggtaagctataatggagtaatgtaattttatgatcaaatttattttaatagcagcatttattatttttcacagtgtgaagggcttccctggtggctcagatagtaaagaatctgcctgcagtgtgg

SEQ ID NO: 59858 - DNA, 624 bp, Bovine  19866881156210
  misc_feature (1)..(1): n is a, c, g, or t
ncgatgttacacagctcaaaaatggtgtggctagattcagttccagagagtttgattctggagcccaggagtgtcacagatctaggcagagaacagactcaactgaggaatacaatggagtgtttccataaaaggttaggaaatattgcccattgaatatttttaggaatttttcaactgccatatttctatgatgggtaagcatagaattgggggatttatgaactaaagtatttcttgtgaacacagtattaaatgcaataatataccctgagaaaacacttgtgaaaaaatttaaatatttggaaactttatcttataaacatatgatgctcattttatctgtaggctaaattaccatcagtgggctgaattcattcccatgattaatgataatagcttctttgaaagtcatcattctaatgcttccaaacatctatttgtcatggttagtattcagattagccaagagaacacaggaaaattctgatagatgtgaggtgaagggaacaaacaagagctcaagggaaacaggacctgtaacagagctggggacaaataaagaactcaacaaccattccttactcaccctcttagtttttcatatagttttatatagctaca

SEQ ID NO: 59859 - DNA, 896 bp, Bovine  19866881165180
  misc_feature (1)..(1): n is a, c, g, or t
nccttttttttttagtttgtaattggcaaattctaaaagtatcttaaaaatatatgttccaagaaagttaatggaatctaaaaattaaagcaacagcatatgtaatctaaactattgaaaagaatgcccaatattatatccattctgtaatagaaacaaaaaaaatcaataatgtttagactcacacaagcatgagaaagagagatttactaagcatacacaccatttgaatagtagaattcatagattttattcttctgatgagttttaaaaatcattaacttgtcccttagctattttctatatttattatggctgttaaaaattggatattttattccattgttgccccatggtaatcctgtgagatttttttcatttatcttgcagcaaggctggtgtcatcactattatgttttttattacaatctgctaaaaataaaacaagagtatagctacctctattagccaaaatcttacgctatctcctattcctacatttctgaagtcaaatatcttactcaaacacaatttcttcaactagactgataatcataataatgttctagatcaatatctctgggggtttattgagcaaaaatctggacatatttgattttgcttgtttatttccattgcctgcctttagtctgaatcaaaaatgacagtttggtagcattaaaaattcccctgttgaaaataatttcactcacctaccttactgtttatccagggtatatgcacaaaactgctagaacaatgcagatataaatatatctaatatatataaatatatataaatcagatataaacctgtcatgatgtatttataataaatatttatttggtcttaatcccatttctggcaccggcccctaaaaacctgaaatttccta

SEQ ID NO: 59860 - DNA, 1347 bp, Bovine  19866881174510
  misc_feature (1)..(1): n is a, c, g, or t
ncctgaggggactactcacccaggagagcttgtgcatccattgaatcccactgactcccctctgggtctagagtctggagacctgtgaggtttataccataaatacctgggtgacattaacaatatctacctggtggctaaaaagagatcaatgctgagtgaagggtaatgttgcaaggattattctgtggataatgtaaccacccactagagatgaatgagcagtgactgtgttgaacacaactcttcactggtttagattaaaaataattttctgaccaaatttagtcatacataaaggtatatatttagcatttattatgaagcaggcacaaaacaccacatataaccaagtttataaatttaatgaaatttcagcagttggccttttaggttgcatgcagtgttcacgtgaagcagaaatgaccattttctagaggcagagttccattaacctcatagtagatatcaggccctggcatactaagactaagccaatggccaggcacaggacaatctaggaacaatagccctaagggcacaggtcacatggttttctagatttttactctgtttatacaatgagagagggagtctttagaatatgttatacaatccgtatatctttaaattcactatttgcaccagttaaaacccatttctaacatccctaatgcatattgacaagtcattaattttaccaatgaaaatccatttttaacagacattctactaattaagaatactctggtggtggtgttggaaggctaagacaactaaatccttgctaggtagcacccctggagaaggaaatttcttaatagaagactgatgacacatagggttgacattttgattatgggcaaatgatcatccttcaagtgtagcttaagctaactgacatatcctaactttatactccgtataaactaaagaggatgtttaagttatacacattctattaagcaactcatataactaataaaggacaaaatcagacttggctcctctgacccccgagtttgaaagttcttactactattgcatcccaacttgacattaattctacaaacagtccaaactcattaccctaagaagtagcctattctaagttagcctattatcaaaaatttttccacttaaagtaaaaatagcaaatttagttgctgctgtttatcttggagcatcattgtaaatggcattaaggcagaatttaaaaaaaaacagagcatcaggtaatgaaagcttagatttgtaagatgtggtcaaatgtaaaatagttcagttcagttcagtcactcagtcatgtctgactctttggaccccaagaattgcagcacgccaggc

SEQ ID NO: 59861 - DNA, 819 bp, Bovine  19866881175219
  misc_feature (1)..(1): n is a, c, g, or t
natgagattatctccagtcattgtcagatatcccctatggggttgggaacgggtattcctgctggtggagtggaacttaccttagcaaaagacttgaaatgagttgctcaatactagaggtggggagtggataggtggagaggattcaaagatctaatcttgctgcaaaacttagacatatataatggaactgagagagcaaaatgtgaaaaaaaattcccacctgctctttgagaggtgattgacggtgctgtgaattggcatccacaggaccatggttggcatcagaggttgaaaaccactttaagtgagcaactgctgaggtaccacaggcagccaggggcagcgtgacctgtactgtcttagtcacacttccaccatcgatggaaggaagcagtgtggcaatttagacagtttggggcccaaggcgtcaccctactgtgaaatccagagacagagagggcatttcacctatcattttatctttccatccttgtctgcgtgtgtataaaatcaccttgtcaacagcccagcctcagactcggctatctaaattgtcctgctacccagcctcactcctggaacttggagaattcttaggaaagacgtcccgtatttatgttggcatgctgctactttaaattaaatgaaaattagagttgaatcataccctaaataaaattaaaaatagcttcatttgcatgctgccactaatatcatcctgactccttgtgtccttttcaaataagtctgtgaaaaccaggaatttcctgacagctggacttcgagcacagctgttttaacctctctgcaggtgca

SEQ ID NO: 59862 - DNA, 1344 bp, Bovine  19866881267616
  misc_feature (1)..(1): n is a, c, g, or t
nttagtttggaagggcctaaaatgttccagatgtgaagatacacgcatgacatgcaatacagctgtcatggttaagtccaagttttgaacactggtccattaaagcatgtgtattcccatgattgaaagcaagactttggggattgagtgctaaatatttgttaacactaccaatggaagacacatttcttagggatctgggaatgtgagtgagggttgtggagtaaaagaagacaataagactttttggctaccagccagtctttcagaaccattctaagttcaatttcaacctagtaagccaaagcctaaaatgtttaataaaaagcttggctgttgtcttccaacatagttcctagtaaggaaatcagaattcaggtcttagctctttggatttgggaacaaaaaatgttattgattaccattaagaacactattagcaatgctggagatgttttaggaatttttgatgcaacgcttactcagcctatcatataatagaacctttggaaataattgtgcaggtagggattaaataataataaaaaaaatgcagaggagcctgaaggaagcagaaatagcttgtcgctaaaaataaacagacttaagatagtcccaccagaaaaataagtcttaaataataatagcaatgaaatctcacccctttcatgaagcttttcctttgaccttgaccaagtatcaccttccaattacaaagttctgtaacgcctacgttctagcacttttagagctgaaatgggaatcctagaaagcatcttagggaaataatctagccagctagctgaatacaaaatcaagttaataaaaatataatagttttgctacaaactagaaaaaaccaatttgaaaaggcaatagggaaaaaatcccactcacaatagaaaccaaataatacatagcaataagtttaacaagaatatgcagaacttatgtaagtaaaactaaaactattgaaataaatatgaaaaagctaaataaatatggaagatataaataaaggtagaactatactatgttcctaaatggaaatgctgaaaatttcaaagattttaattcttcccaaatgaatccataaattcaaagtaatctcactcaaaattctactgaattttcacagaacttgacaagctttttttttttttttaattcatatggaagcgaagatggacagaattaactaaggcctttaagaaaaaaacagaggcattactctaacagattgcaaaacatatcgtaaatctatagctgttaaaagagtgtgattttatcatagaaatgtattctaaaaatcagtggggtagcttaaaagtgtagaaagagaat

SEQ ID NO: 59863 - DNA, 721 bp, Bovine  19866881284323
  misc_feature (1)..(1): n is a, c, g, or t
ngcaatcatgcaaacaagaaaagtcattttctgtagacatttgtgagtatctagatttaaaaattagaaaagttgtggttcttttaaatttactttatatagctataaaggcatttgggtaataagaaatgaaagagaagtttgagtttgaaaccagttagcaacaacttgaataaaatatgccattcttattacccaagtgtgatataggtataaatattactttgctgattataataagatcaatgaccaacatttggtatttgaataacaagcttctagatacattgtgttgtgtatatgaatttctacacccttgtgggtacttctgtcttgtcttacataaccacaagttgcataaaaccattacactgtgctaaacttatccatctctttgaaatctaacagtgtttatatctataacttcttgatgctgtgaatcccacaaaccatggatactgtaactttcacagaagctttcctaattggttcacaaatttttggctctttaatttcctggaaaaagttcctcattctcttgttattgatctgaaatgaaatgaataagtataattctgacaatcttcatctctctctctacctttttattaaagggcaggcaatcatggcaaggtccttttatatgtaaatcttattttgccactaactattgtaaagctttatagaagctaaaaatttaaaaactcgagtcagatagagg

SEQ ID NO: 59864 - DNA, 1930 bp, Bovine  19866881293951
  misc_feature (1)..(1): n is a, c, g, or t
ntcatggtgcacctggactggcaaaaatggctaaataattccaagacaggtgctaataatgcaagctggtttctagtttacttgaggcagagtcaccaaatactctgggttgcctgggtctaaggggttgcccagaatagtattttcagcattaaaacccaaacaatcccagacagataggggtggttatcacctactaaggggtgaaaccagatgtcagctgtgaaccggattaacaagcggggcctcctggtttaagttccatgccagtgagtcaataatttgccacaggaatccttcagcttctggtgaaaataagaacaatgtcagataccacacctaatcagtacatagctgttaccccatagaaatacacagcgtggttctgttctattgctttctggctagctgagttaaagacaggcgatgggggattcactgaaagtgaagatcgtacacagggttggtcctttgtaactgaatatagcaaggctgcacctgtcccatcagggacccttctgtttcacccccttctcttccatccctgctcctgtcccctatatgaacagtgagagagaatttctcaaactttcctggccgtgaaaatcagttaaggcacttattaaaagtagatgcagtgaaagtcactcagtcctgtctgattctttgcgaccccatggactatacagtccatggaattctccaggtcagaatgctggagtgggtagcctttccgttttccaggggatcttcccaacccagggatcaaacccaggtctcccacattgcaggtggattctttaccagctgagccatcagtgaagcctaaaagtagattcagagacaaacgtatttagaatctccagggaggagctggaagctacatctatatctctatgtgtttactagataaagttttaagcaagttctccgggtgattgttgggtcatcagaactagcagccttgccagcaggaaactagacacccatttctcctctcagaagaaactaggagattcatccgccaccatttctgtcttcagaatacacagagaggggagaagggggagcatgctagtttctgctcaattcttctgtgtctatttcagagacacatttggaaagacagaactctctttctggatagaactttttttagatagaactttctttctggatagaacttttttagatagaacatttttcccctgttactcggctcagtttgattccctgatagccatgtttttggcaagcaaaaggagctggggaaggaaatggaggtagtttgaggagggggtgccaacggaacctcagtacagggcaggtagagaggcgtcagactcttggtgtcgagcttttatctgggtggaggatgaggagggttccagattgttaactcatggcggctggcagctttatttttttttaattaaataacccccagccagaggagcgcacaccaatcccccacctcctcctcatgaaacctcattaagcaagaggactataattaaacctggaatccacggctgacactcctatatctgtctgtggctcatgcgccagctttgggcacaaaggcagctcgctcctccgcattttatggggcagagggcgaggaccagggcaaggccatctttatttatcacttaatgggcaacttggcccttcctccagggtaaccagatgtgccttttgtccttagccacctccactgtgtatgggtgcccatcaaataatgcaagacatctactcggaagggccagtttacctcaagcaggtgaggactttgatttctgagagccagagaattttccagacattccattgcccagcgtttgggcccgttatgtcaggaatatttccacatgattggaggtggagagccatcagcatttttagcttaggcctattctgtcttactcag

SEQ ID NO: 59865 - DNA, 1108 bp, Bovine  19866881350281
  misc_feature (1)..(1): n is a, c, g, or t
natccttgaagaaagatgttgaatttctcaatgcaagtagataagtaattttcaattaattccacacttcctgcattgtatttgacagtgttgcacgcactgtgccagtttttcctcccacttttgtgccgaaacagcttaaccttttatttaagtgtctctggtccaaaaaacattaaaattgggcagctctaataaatactactacataatgactcgctccagttctctgcagtaattagtactctggtgaggaaatgtgcctctaggttcaaaattttataatgttttgacagttggaatcttaccaagcatgaaatgaaaccaataaaaaattctttttttatcattctctaagcattcggaaaaaatatattcttaaaatgtaacagtagtaatctaagaaaaaaatagtgacccactcagattcaaggggagggtttatgtagcattcaaatgaggagaagataaatgtaaaatctcataactaaaagccgagagcaacttctatttaacaggcaagtgcatctcaatcaccttgattagcaaagaaagataatatgcattaaaagcttcatgccagtcaaaaatctcacaaataccatattttactttctatgtttaactctctgatgatcatagtatctttaatcattttgaatggttcttcataagattgtttttatgtgaatgtaattttcccctcaatatccttgcctcccaaagaaagaaaataagcatgaccctgacaagatttcaaaaaatgggccaggatttcatttgtatcagtaaatgtcatgttattacctaaaataacaaaaactacaacctcaaagttaatttttacacaaattgaaaagtcaaaagctttaaaggtactaagcatcactacaagcccaaacatattctcagtgatacctgaattatattactgggttggctaaaggtgcattcgggttggaaaaaactcaaacaaaccctttggccaacccaatatttaaaattaaaaacttttattatgaaaagttctggagatggacagtagtgatgatggtacaaccatgtgaatacatttagtgccaggaactacagacttcagaacagttaa

SEQ ID NO: 59866 - DNA, 688 bp, Bovine  19866881357138
  misc_feature (1)..(1): n is a, c, g, or t
ncttaagattttagttaaccaatgaattaatacttgctaacacttttaaagaattattacttaatttaatctgtgcaatcttgtggacaaatccaagtttcaatatctcctttaagcagatgacttctaaatctgtattgctaaccttgacctctctcttgagtttcaaatgcttatttcaaatgcctcttcctcataatttggattttcttcatggttcctttcttttgatcaaaggcaccaaccttcttcctgatcttcaagtttaaaagtctcagataagtgttgagtacctccctaactcttgtacacaaatacaggaaattctcaagtcctatataccctatgtctgcaacatcttttaataacacatttattgattatcctactctaacaattgtcttcaacctcccattactgcttacataaaataactcagtaatctagttggtccaaaaagaaatactgcttaatcaactaacactaacatttcttctattttttttctagaggctttatagttttagcttttacatttagatctataagtcattctgaatagatttcttatcaaatgtaaagcacaggtataggtccttctctggttatcaagctattcctcgtcgaaggcttcaaagaagaaaaatgacatgatctatctagggtttcagttttgggcttcccttgt

SEQ ID NO: 59867 - DNA, 725 bp, Bovine  19866881510417
  misc_feature (1)..(1): n is a, c, g, or t
naaaaaaagcctaaaaattaaaactgattagcaacaatacataagaaaaatgaataatcgcccattaaactttctttaatgaaagtagctataactaactgttcttttaagatgaacagaaacaaagcataaagaagagtgctttggaaaatccaaggtaatttatcaaggtttccagtacaagtagtacctaagggaatcctgaccaagaagagaacttagtgagccctgttttaagcaaaggcactgtcttgttcttgttttgtgccaaaaggactatatatgagaactcaaagtcagaaagcctattacttgcatatgaaaaaaagaatatcactatttcttgccagaagaaatttggaatttactctcagatcatataagtgattaggttagaccaacaagtcagtcacaataggttaagctccctccaaagtcctatctggtcaaccaatttacttccatcatgcccactttctcccacagattatcatgaacttgatcattctaccatcctgccccatcctgtattctaactcccttccagtaagtgacttacctcactgcccttttttgcccattgccaatttccagcccatcagcaattataagaaagacaatactacttttgatttcccctgaaagaagaaactagctttaaaccaacatggaacagaggacctcccttcagaatatgtagtaaagtgctaagaaaaaatcattta

SEQ ID NO: 59868 - DNA, 622 bp, Bovine  19866881533318
  misc_feature (1)..(1): n is a, c, g, or t
nctagaatagttccctctctttctcctccgatctctctctatatattcctgacaagagaagccaccaaggagtgaggggaacagaattaaatggtcaaatagtgctgtctaaactcagtctgtgacaatcacttgacccaggtcctcaagaagcagcagctctaatattactaataagactaaagcactcacttgtgtattcagagacgtcactctcttaccctggacagagcaggctgcacactcagaactgtgcctagaacacaatggcacacaccgcagagtgagacaacacagaagccacaaccgtctaaattgtttaatgcttatcggctctcagtaggagaggtggtagataacggttaggtattcgccctcactatgtgcacaagcttctctggtcagcctacaatgtgggactttacaaaataatactttgcatgttaagagggagggcacattgaaaaaccatacatgaaacgtaaaattggaaacacagacagtgcttttgaagagcagcccagaaggggaaattcgagtcaataattccacttgtgtcgagagtgatttgaggactacaacgtaaaggctcacttcacatttccaggtatttcctcattta

SEQ ID NO: 59869 - DNA, 939 bp, Bovine  19866881648725
  misc_feature (1)..(1): n is a, c, g, or t
ntagcgacggaccaccaatataatgaggattaaaaatactaatatctgaacttgaaagggctacactaaaatgggaaaacagcaaaactctctcactcatgtcatcaagggaaaacaaggtgtactcttcttagtatcatacttgctctccagaaatcctatttactacgagggcatcaagtttgactagactggataaactcagcactgagctggggtggcctttcagaattgctattatacctcagtggccacaatgctgagactacgtcacttgtaatacagctgaagttacattgcttttaacagtgtctcaagacgtgacaatacttagggaacagattctctaacgtaggagagatggagaaaggctgggaagtctgtaagaaaggagagattagggcaaaacctgagatataatatcaggtacttttacaggtgaagaacagggcctaggcagaaatgaaacatctcctgggtgaatgggtccctcagccctagatgatgggcagcagcactcgggagatgagcagtgctcggaagtggtacgtagtaggaattcaaaatgcctccgctgttataaaaacaaaattctccttttaactttactgaaatgatgcaacagctataaagttacctgaacaaacaagaaacatgtgtgtgtttaggtgctctagactccgcagaaacagaacactagcagcctacgtgcccagagatctgagcagttctgagtcacaatcatttcacagtgcctggctggaaaatgtttttgagtcttattgctattttttgtctttattatattgagaatgggagcaaaatgcttgcaattttcacagtatttaatactcagagtatctatattatgatgaatataacctttcattgtattggtgggactgtcatgtaccatctctaaacaacttatttttagaa

SEQ ID NO: 59870 - DNA, 729 bp, Bovine  19866881662940
  misc_feature (1)..(1): n is a, c, g, or t
nacgacaatgatctagtaatatctctaagaaaccagaagtattattttaatgtaatttaaaataagaaatgtttaatgaaaaaagtttgatatcaagtgaaaactgtgtgaaaaggcaaaacaaagtaaaccaaaggttacatgtggttaaaaatgtgcatattttcattaaaattataagttttaagtagaaacaccttatttcgcatagcattacagtgaattagattagcagttaatttacactttaaagatatctactattaaaatgatcaaagattttcatcactcatattttctgtctattaaaatctcagctttaatttcaaaactaaagaggcaagcatttgaaggcacttggccctaattcctcaactttctgattcactaggctttgaaaatatacctcagtctataaatatttcacattagacttttttgccatgaaagtaattactgcactaaactattataacaaaatacttcaactgagtaatccacaagatatgctttttgaaaagtttcattagagtcatgtatttacaaaactaggtcagataataagtatgaactgcaacagtataagacacaactataaatatactctattttcaaaactgttcaaaagcaaactgtttcagttattcagctgttttctctccactggtctataaattctcccaaggtatgttttattcaatgactgtaaatttcatcaaatgtgtcttg

SEQ ID NO: 59871 - DNA, 1574 bp, Bovine  19866881676104
  misc_feature (1)..(1): n is a, c, g, or t
nattttgattttcccctgtccaggatttccatgccagagaatcttgaaaaattatttgaaagttgatcattctttcactttgctttcattgacaaagttgggacatgttacaaaagtgaatgtagttcttgttttcattccttaggagcctgcagaatgtggggcattttctaagccctgctttgagaactgtcaaaatgctgtaaccacctccaggagaaatgataatagtacattgcatccatttggcacatatagtccacaagacaaacagaaaggtaaggctctctactgaaaattatctactgcaagtggtgtgagaaaacacaagtgtttatttaaaaaaaaaaaaaaagaggaacaaaggggaattaattagactaagtgcagactttgttactctgagtcctgaacactgagagaagggtgggggagctgactcacaagttgtgaagcagattcctggcattgcctccagtttaagtgacagtttctgtgcttgctgccccaaacatggagggttatgtataaaacaaaccatgcctgcagaaacaaaatgacaaaccattatttttgtttaagaatattttaatatttggaagttaccaagtgtaaataacaattcaactcacgatatatatggactggtattaaaccatggagtgatcatagcacaatttgcagatttatgcttatttttgagtggtaaatgccatgaaccatgaccatgattatcttgtacacgtcacatttctagtggagttttacatgtaaaagccttagattttcctctttctgttttcaaaaattatgctttaggccaccaagaaatttatttccctgcttctcctttctgtttagtaactttaatttttttttgtactacaaaagcaatagatattcatgacagaatattaagagaaaggcaataaagagaagatttaatgtttctcatgtgtgtgtgcgctaagttgcttcaattgtgtctgactctttgtgactctgtgccatagcctgccagcctcctctgtccatgggactcttcaggcaagaataccagggttggttgccatgctctcctccaggggatcttcccaacccagggactggacccacatctcttatgagaaactgacttgactttctgtcagtatgtcttttcccatcttaatacaattaaatattttcttgacaaagcaggatttcctcctgagtccttctgtcacaaaggcaggaagaatctgggtaaggaacagcaggttcccctcacaccagaagtgccttctcttgaccatgtcccaataatgaccaagaacgtttccagcccttatataacttgactggcatttaattctcaagcatcacgtagtccagtgacaatccaaattcagggttttattccttgtttaatatgatgttcaaaggaacattggacacattccctcctatcttgtttcattttcagtgcttgtaaaatattttgctgaagtgataattacgtggtatatttttagaggacattgagacactcaaggaaatgggataatatctctaggaaggctggcagaggcaaa

SEQ ID NO: 59872 - DNA, 1560 bp, Bovine  19866881683696
  misc_feature (1)..(1): n is a, c, g, or t
naaattctaatatgtagcataaaattacaaactgttttactagtctaatgagtctaatgttattttactagtctaagttattttcccattagtcaattcaatactacacacatttaagtacaagttcatattagctctaagcctaccgtgcctcatataacacctcccttcctttcttccttacatatatgccaatctgataccagcctaatttccattttgtaccatggcaagagaggtccttttattgaaggctttcaaagtgtatacttgtccatgttcaaaacaacagtaacagaagtatatatcatcatgactaatgtaatggacatatccaggtttgcctgtgtttattacatatatatatatatatatatatatatacatgcacatatatgtgaatatatgttgcattcatatgtacatatttacaaagcagctttttatttctttgatcatctttgatggtatctctgcatctgtacaaaaaattcactttatttagactgatccttacttgatgttactatattgctgtcttgttttttcaatggagatggggttaattgtttcccaagagtttgggaaaatttgagttcttattcttaatttgacaaataatgcctagtttggtaaagcattctaaaacagtaaagtgaattaaccaaaacattacacagttgggtggattcccatagtctgccttgagcagagcacttgaaatgcagcgtgatttcttttaatgaggaatattcatgttgttctacattttctcccaaaaggttttcattataacatgtggcatatgttttgattaaccctttagttttcttttatttcacaacatgtaccactctgttgaaattaaaaaaaaaacaaaaaaaaactaacctaaaatgcaagctgcataagagcatgtgtgaaactgtactaagaggtaaaggatgcagttctatggatgcaggattagcaacaacctgcatcccaggctggccaccattttagacaaagatcttgcggctctgggaaaagttcaagtagccacaagctggtcccgacttcgccagtggccagctgttgtgaccttggaatatcagtctcctctttgggcctcagtgtcttacctacaagatgaagagttagatgaggtgactttaatgacttccaactcttcgattctctggttccatgaaggtcatgagtctctctgacactaaaaccatatcatcacaagagatcaaaggatgaaaactaagtgcaaataaaggtcggataacacatttaaaggcaagtgcttccaaaacatcaaggttcaaaggaaagctcacattcaccatggcatctcagaattcctctttaaagtgaactaaaacaattaaaatattctattatgccaggccagtcagtagcactagtggatcaggattttatgtttgcagttaacgtattttgccaccatcactagataccccatctaatatgtttgacatcagtagctttcttggctgagaatgtagccagacaccaagaaagaagccaaagcggggaggcgggggaagg

SEQ ID NO: 59873 - DNA, 1740 bp, Bovine  19866881882617
  misc_feature (1)..(1): n is a, c, g, or t
natgctctagggaaattgctgcattgggaattttcctacagagggattttactacacacaataatttaccttcaagggaaaaagtagaagatgtactaaacttaagcttttaaaagacaaggaccataaagacagccccatggattcagatcatctatcacaaatgtaagcaaagtcttccacagacattttctcagtggttaaaaaagcttaaatgccttttcacttttcaaaacaaaatatcataattgcttcaatttgtcccaatatacctagttctctaaagaaaagctaaaatttccaaagcatgttccttatctataaatattatacattttcctagatatcaccctaaggaccccaattcaaatgatttaggaatccatgtagattaaatgtgtgcatgctaagtcgctccagttgtgtgcgactctgtgcaacccttggactgcagtgccccccgccccaggctcctctgtccttgaggattctaggcaagaatactagagtgggttgccatgctctccttcagggggtcttcctgacccagagatcaaacccatgtctcttatgtctcctgcattggcaggtgggttctttactactaaagattaaataatcccatgtaaaacgtctaatataaatgtaatataaaagcaagcctgggaaaaatacaacttggtgaccacattacagagaaagtctcctcctgcatagttgaaagtcatgctgaatatgacaacaaattttgaactcactatcagttaggcagctaatacatctttcaagctatggttgttaggcataacaatagttgctaaattataagggaaacataaaaaaagttgctaaacataagggaaggcaatgaaattacagcctagatgccacaataagcaaaagaagtaattatcagtaacagtccaaacaccacgtgttctctagttaataatgatgtcttcttgccatgtacacaaatggcgtgcgagaattctctccccatgatattcattcattcattcacacacacacatacacaccctgcatgctcaccaaggagaggagaaaacaaaggatgaaaatgggctttggcattctagctgtaattttcacttttctgtgatatgagagttgttgtggccatcaaagccagaaaaatctgagcttaaatgagctgctttctcacagagatacctattctagaaccctttacagagaagagaggaatggcccttttcacctctttgactaaacagttacagtcaaaataatgcattgcaccctctaagtttagccacagaaaaagtatttaatcaattacccagttcaggcaaggaataaaaggtactgctacgtgacttacaaattgcaatcagaaattctttaaaccaaaatcagagtgatggccacaactgctcttacagactagtcccctttgcctgccatctgatttggaaagctacctgaattttcattttcttacattaacccttaaaatgtcttagtcttttacctgttgtccttgttcctctctattcccattgacttagtaaggttttcatttccaggaatgttttcaggtaccaaatactgtggaaggtagccactggccctcaagagtaattttttatttttttttaacttattaacctatttacattgtgtgctgagctcattcaccttgaaccctttaagtgggtgacagctgcccagtggaatctaattttaacattcgcactc

SEQ ID NO: 59874 - DNA, 1177 bp, Bovine  19866880465618
  misc_feature (1)..(1): n is a, c, g, or t
ntgtttgacacagtatacttgctgagtcccagataagtttgtaggatagcagttgcaaagtgagtggtggttattactctaaagggaagtgtatttatatccatgtttaaaagcgttctgatagagaggtatcgctataaaatagaggttagagaatggcctggaaagaattggctataggatgattaaaggcagtgatgaaagaataaaagatgatggtaaagagaagccctaggttttgcaggatctgggagaagggaaagacagataaaaaagactattcatagggttttggcctctttgccaaaatgcaaattagaaatttgggatttaaaagttagggcagtcacagaatttggtttccacagaattcttacccctgaaaagaatctgtttttgtttagttgctaagttgtgtctgactcttttgcgacctcatgaactgtagcccaccatgcttctctgtctatgggatttttcaggcaagaacactggagcgggttcccatttccttctccaggggatattaccaacctggagatcaaacttacatctcctgtgctggcaggcagattctttaccactgagactccagggaagcaaaaggaagtgtaagaatcccagaagatatgcgatggggagcattaaatttcaaagtcatctcttaattattaaagttatattttaattttctaatataaattgcaaattaaaagaaatgggttccaaatttgtgacagataacataaggataaagcctattaaaatatgaattccatctttttagaaatcaagcacatgatttatcaatatccaaacaaaccttcaactagttgtactaatttcagaatgttacttattgatgccaattagcagtacaatatctctgaataccacatagtcctaaaattatttgtgcaatttgattgtcagtaaaattggtctacaagaaatattcatgctctaatttataggggcttcccacgtggctcagtggtaagaaatccgcctgccaatgcaggagactcaggagacacaatttcggcccctgggtctggaagatccctggaggaagaagtggcaacccactccagaattctttcctggagacacactacagaggaacctggtggtctacagtccatggggtcgcagagtcagacatgacttagtcaca

SEQ ID NO: 59875 - DNA, 1392 bp, Bovine  19866880492273
  misc_feature (1)..(1): n is a, c, g, or t
nacctagatagtgccttgcacatgacaggctctttattatgaatactacgttgcataataaaatgcaataaggaggccaacatctaatatatatacatttttttcattttcaacttcactgacaacgtaaatcaacattctatagtataaaaatgcatcattaaataataaagttgctaattctctgatggtgtcaaaaaaatattaataagtatgactatttaatgactacaataatatagcccatcaagtaccttttaaaattccccattacttctacattccaatgattcaagaaagttaacaaccctcagagccagggcgctcagttcatgttttaatgtaatatataaaactacacatgctccagtgttaaaaatgtattttaaccaatacaaatctaatcaaatcaaataaatctttaactctgctttgtcttcaaaacaaacagaactactaaggaaagctactttcacactggaagaaaacatcaacagttggcatgttttgatcaaaaaaggagctccttaattaatactaaatgaaaaccactctgacagtaagttggtcagttctctttcttcctgaaattattgaactggttgttacaacatagaatttcaatgttttaaaaacattgtgcttgacagctgcttagagacatccaaattcaaaataatgacactatcctactatatcagttacaacctagtagatggttctatgaaaacacagatttttcatagaacaaacataaatttgctaaaacgcagttggtatacactattctaaggcacctctctaagcttcacgttacgtctggaatttttgtctgttataaagcaaacaggaaaagaaactgaaacaaactgtgttgtggactagactaaaagtattttaggtcttttcttaatagctaattttaattctaattagcaataatcaatacaaacgcacctagctgtctgcttctctttcttccccaaggcttttaataaaaccagttttatggtaaaatgtgtgcacattatgttaacagcctttcttaggggtataaatgtgttcgatatctgtgggaaggtattcaactgtaaagatattagaaatgaaagctgttgaaaccaagtagatgttttgtctgtaagtattattggtggcctgaagaggcaagagacgtgataagtacacacaaacataaaaggcaaaggatcagtaacttgtaaaaagcatgtttttttctacctgtaaaatggcaagtgattttctgacttccttcatctcatattcaaggtcccacgagaaagggggtggggatggaatagaaagcagaattgcttctaattctgagaaagaagaggggagagaggaattagatagaggaggagagggaga

SEQ ID NO: 59876 - DNA, 901 bp, Bovine  19866880603799
  misc_feature (1)..(1): n is a, c, g, or t
natatctgtcactagcatgatcaagtagggcaaaaacttaagaatgttcttatgtgcaccccctatatgcatcttttagaacattccaataaaactcatgttatcatccatgagaaatttaactaggctaattggctacatggaacaaattagtgtgacacctcatttatttaatatagtcatgaaaaattgaaaatgtctgttttgatgatctgacatagaaagacacaaaagtcctactagagaatttttaatgggacatataaccagttgatgttttaattaatatttagtctgtatattatatatatgcacttatgtatatatgtacattaaaataaaatgttggctaatagcaaatactataaaaaatatcagcttattaattaaaatccaatttaaataatttaattctaaactatatgtatatttgatctattgatttttatgaagcctatgtttaatataagtttctcaataatctaatcatagttattattgtctttaataatcccatgatataataaatacagaaataaaattatcattattattttgcccttaattagtagcaaaattacagtaaaattttactaatttgcactagtgaaagaggaataacagtaaactgatggaattttgaatcacaaaaaatattataaagaattatggttttattgtgctcacatagatataaaaataggttaacaaaatgatatctaatgtccagagaagcactaacaacagataaaagggaatgatttatacactttctcatttatcatgacttattaattattaataacatctttagaattttgttctgttaaacagtttagatgtgctccttggaaacactattaccaaggcttaacattcttttttaaagctagctgtattg

SEQ ID NO: 59877 - DNA, 1144 bp, Bovine  19866880636859
  misc_feature (1)..(1): n is a, c, g, or t
ngttgggggaagggaagaatggggagttattgtttaatggctgaagtgtttctatctgggatgatgaaaaagttctgaaaatggatagtggtgatggttatacaacattggtaatgtacttagtgttactaaattgtactttttaaaatggataaaatggtaaattttatgttatgtatattttattacacatattttaatgggagaaatttgaaaaaagtaggctgagcagtactctcagctagtgttttcggctgcctgcctaagatagctttcattttagaaagtttgatgagctgattttagttcaaggaattcatcttccatgtaagtcacagtgcctgtgtgctttcccgatttttagtccctgtttggttttgaccctggactactgcacaggttcttgctcttgcaatttcacagctcttactgtaatgggaacaatctcttagctttggctttcatcttagatgtcaattctctcccataatcttgctgatcttgtgacatgctccctagtttttcacaatatatagcccaaaggtgataaatccagtgttaccaccacatgacatgattgcaatagttcagtgttaggattcatagaattcactttcatataaatgttggttaaaaagtatagaaagaaaactatggacataaagcttagcagtttttcttcagtggactcatgcgatctatattaaaatttgaaaccaacttaaatattcccatgagtttttaatgaatgatacttcattattcgataaacactcagaccatttccctgaaatgatgtttaattttttattcttatgttgagaccgaagatcagagactattcatctttgtatcttccaagtttagcaaagtgctcaataagtcttaattgacctatgccacctaataataatattgtatgctttatacattttcacatgcattacttgttataactgttaaaagaactttgaaagttagacattattattatttagatatgagaaaacttgatcttggggtagttttgacatcttgaaggtaaaacaacatctgaacagtagaaccaaactcttaccaatagcttttcatttaagagttgatgcatgtttggtgtggagaaggcaatggcagcccactccag

SEQ ID NO: 59878 - DNA, 1474 bp, Bovine  19866880759924
  misc_feature (1)..(1): n is a, c, g, or t
ntaaattaaatatatatatggagaaatattaactgttatttcataaaaatatttctacatgctgaggaatgaagcaccaaagatgagtatgcaagaaaactaaagacttcagtcaatatttctctgttaatctttatcctttttggtttatttctctttttcttcctgaagtgttagtcactcagtcatgtctgacaccttgtgaaccccatggactgtagcctctgtacatggaattctctaggcaaagataccaaagtgggtagccagtccctgctctagtggatcttccagacccagggatcaaacctgggtctcccacattgcaggcagattctttaccacctgagactttctgaaagctttatttaattctcttctcccattttcttattctaaaattttttcttatctttttatttctaatttgctgatttgctctagtatgtcacttactattctctcattggcaatgcaatagcatttttccagattgcatgaatgaaacttacttgaaattcttttgaccctaaggtgaatagaaaattacacttaaagtctttttgtatacctcctttctgttcttgaccctttacctcttacctaggtttgttttcacttcttgcacattcaggatctggcctggagtgagtggcaaagagacaaccataattggatgaagtactctgcctcaaataggacccaacacacatagaatacccttcacttcctcttgtgtgagtgtgtgtgtgtgtgtgtgtacgactctctttttgctggtactttccaaatcaggaacagtcaatgaaatagaatattacaatctccacattaaatatgcaagatttaatactttgtaaagagaagagacccaatttcattaaaatataatgcaatataaaataatgccttataatttgtaatgaaaacttttagcatcgtattttaaacccttgggaatgtactgtgtaaaatgctactgcaatttttattgcggttactccactttagtcaggatcatgattgcctcaatctgcctcttgattatggtgatgtggtggcaagggacagggtttatattaaaaaaattgacaactaatttggtatcaattaatatataaatcaatataaaaatcaaaaattaagaatattactttattttcttaagttactcctggaggaggaaatggcaacccactccagtgtatatgttatttatattataaaactatataccaaataatataaatcataacacaaatcagtcattgtatcattcaaataaattctaagcaatttattaatttctataaattttgatgtgctcttttttttttggcatggatgacaccagctaaatgatctccccatcagagatatgatttaatataggtaactgcctctgtctgttttaaagacttcttcatcagatttagagccatgagtgacagaaatctcagtaagtttataattt

SEQ ID NO: 59879 - DNA, 3073 bp, Bovine  19866880767926
  misc_feature (1)..(1): n is a, c, g, or t
ntgaaagtgaaagaggagagtgaagaatttggcttaaaactcaacattcaaaaaatgaagatcacggcattcagtcccatcacttcatggcaaatagatggggaaacaatggaaacaatgagagattttatttttggggggctccaaaatcactgcagatagtgactgcaaccatgaaattaaatgacacttgctccttggaagaaaagctatgacaaacccagacagcgttttaaaaagcagagacattactttgctgacagaggtccataaagtcaaagctatggtttttccagtagtcatgtatggatgtgagagttggaccataaagacagctgagcaccaacgaattgatgcttttgaactgtgatgttgggagaagactcttgagagtcccttggactgcaagaagatcaaaccagtcaatcctaaagaaaatccctgaatattcattggaaggactgatgctgaagctgaaactccaatactttggctacctgatgcaaagaactgactcactggaacaaaccctgatgctgggaaatattgaaggcaggaggacgacaagaggatggaatgcttggaatggcatcacctactcaatggacatgagtttgagcaagctctgggagttggtgatgaatagggaagcctggtgtgctacagtccatggtgtcgcaaagagccggaaatgactgagggactaaactgactgagagccaccttgaagcccctttcttttacttagcctattttaaaagatgttcataatcactgagacatatggcaagaacaaagttactatatgttaaatttatagaatctattgcttttcttataaacttatattccttaaaggaatataaattcattagcacaagaatcgtctctgttgaaataccaccaaatatgtcctgtaaatcatgatatactattttcgtaatagcaacttagacaattatgcctgatagcagatcctaatttgccacactaaaatatttcttagtttatctgcatttctaagctacaagatcaagatacatatcttaggcatatttgggatatcaaagagttgagaattaaatgaacttatggccttcctgaaaatacaaatattaattccacattgcaattagaaatattttaatccactctatcatcttccaagtgtatgtagaacacagtgagaaagaacattttttttttgtaaaattgtaattttgactgtgcaacatagctttggatcacttcctcttaggaacttatgctctttctctgtcaaatggaaacaatcagtcctgctcttatttgttgctaagattaaagttctaaagaaaactgtacaatgttttgcaaatatcactcattattatttcaaggttaccaatcaagtatacattttacttctgttaaagccagcagacgtagattttctagaaatctgaaactatgaaattacaagcaatgtcataaatacctgaacatttttacaaaatgaacaagttatttaattaatggatgaatgaatgaatgcaaggtataatatattgatagtaaagaaataatagttaaatgttaagggaaattagagatgaatgaaaaaaatgtgccagaataaaagatagtgatattctttctattatttatcctatttttatgaaaaattagaattaaaaaacttcataaatagtttctatgcaaatttcccatccacagttaatatccataattgtctatttccagttacatgttgttaattcctgtaaaaatgttcatctcagttactgttgctctattaggaaatgttacattgagttacattagatttcctacacttttaaagacagtattcacatgttggttaatataagtttcattattaaaacttcagcaatttttacttcttatgcattttttagttatttggtttaattccatctctcagatgttattttttcaacaaatgaacagcttctgtgtggtactgataatttcctggagatcacagttcttttatatccatacagtgatgatataatccattttccattaaaatggtttaggattcagctactcaggttacaatttatctagcattcttacctatttataccagtgctgtacagtgttgactaatagcttggccatgtgttcagattttggatagcaaagcatcttacggagctaaatttcagaaaaaatgagattttacaacctagtaataaatattgctgggatatagttccgtctctgaaaattagcttccacaacattaatattattttataaccacaaacataatgtgcctataaagaaatgtgtgaagcatctaagattttatcctataggtaagctaatctttagcccaccacagtttcatatttgctagaagaagacacagactcttgggttagacacaaaaaaactttattcacatcaatagcaatagctggagtgtcaatatttgtgagtatgtgtgatgatttcctaagtgccaattcccacaagttaacacaaagagagcaaggtgatgatatatgcacatgcatagggttgtatttcaggagacaaacctcatttgggatgtgcaagtaaaatgcaaatctttgataatggggagtaaacatatctgccatttgttaaggaataagacactatctcccacttctgttcactattgaaagtaaattgaaagtgaaagcctctcagttgtgtccgactctttgcaaccccaggtactctacagtccatggaattatccaggccagaatactggagttggtagccattcccttctccagtagatcttcccaacccagggatagaactcaggtctctcgcactgcaggcagtttctttaccagctgaaccataagtgaagcccctgtccactattaagtatgagtaaaaaactattttggcacaaacgcagtgcctctccttgcaagcagtacagaagtatgagaaatctatgtgaatactgtgtcttaacaacatccaactattgtctatagggtcttaacttttggaaaatgtttccatcactacaacatcctgttgactgctttgatta

SEQ ID NO: 59880 - DNA, 1059 bp, Bovine  19866880785258
  misc_feature (1)..(1): n is a, c, g, or t
ntcactgaagtccatcgtatttccttcatgtctttttgtccaaagaaacttaattctacagttctagtgtgtactacctgcaactgattttttccccctcagacttaccaattaagaagtgatcatcttgtaggaatgccagtaattttttaaaatttcataagcaaatgtagtcaagaaatatttttatttcatgtcattaatgtttagtcacaaacttttatctttttagagatataaaagtttacacagttaaaatctatgtcatttactgttgtttcttatttctttctccaggcctaaagtccaaaagcattaatgatctggtaaaagaaatagtaagagaacaatttaaaatttttcaaaatgacatagaagagaccgtagcgcagctcttcaagactgtatcaactgtctccaaggaacttgaaaatgtcagacaaataattcaacaagttaatgaatctgtaatttcagtagcagtccagcaaaagtctgttttaatgcaagaaaataggcctacttcaattgatatactggacctgaaagatcacattgtaaatataagacaagaaatgacccttatgtgtgagaagcctgttaaagaactagaagcaaagcagactcgtttagaagatgctctagaacaggagcgctccagtagaattctgtattatgaatccctcaacaagaccctttctaaaatgaaggaagtgcaagagcatcttttatcaactgaacaagtatcaaatcagaagactgttccaattcctgtatcagttagcaataacttcactgaatacgtatctactctacatcagaatataaagaaacaaggtttgatgttgttgcagatatctgatgatttgcatgcccaagacagcaagataaacaatcttacccttgctttggagatggagaaagaatctgtcagggaggaatgtgaagacatgttatccaagtacagagatggttttaaagttcaaattaaggacacagaagagaatttacaagttttaaaccaaacattgattgagtttctctttccaaggacaataa

SEQ ID NO: 59881 - DNA, 883 bp, Bovine  19866880789273
  misc_feature (1)..(1): n is a, c, g, or t
nttacttgtttgcaagacacttttatctgtaggaatcattgccatataacaaaaaagccagcagttcagtagtaggtatgtttacacaaagcttgaaaattttagtcagcatgactttgaggcagcaatatgtcattacctttgcaaattgttgggttataaaaaacccttcacctggctgagtgatgatgatgggggagggtgatcaaaggataagatttgtactttggtttctttgtggaaagggaaacacattcttcatttttgtcatactactaaatcacagctgtgcagaatttatgaatatattcttctgagacaagaaaatggccaccagaggaaatcagcaacttgttcttctcacacacggagaacagaacgagaaacctatccatcaatgactttagtgttgacctgtggagtaactcctgttaggaagacaaattaattcaatgactatcctgcttaatctttgacctttattttctaagagatttttccatatgacttactgagctgtctcaattatgtctgtatgtcccctgagaaaggtgagacaagaccacaaatatttcttagcacaaagtctttaattggggttatataccaacacatcaattaaatatgtagaatgtaagtcattctcactaatagcagagagcatggcagaaaatgctgaattagggcagttaaaaatattgaatagtaactagtattttgaactagcttgcagggttccatttaggatattaaattgatacctgctgattgtgtatttatatgtgtgtgtgtgttcatgtattcatgaatggggtgattttcctgaggtggggattcagttacccacagaggctactgctggcattatccttccaccttttca

SEQ ID NO: 59882 - DNA, 2250 bp, Bovine  19866880797613
  misc_feature (1)..(1): n is a, c, g, or t
nttaaagaaatagagctggctgaaggcagagaaagcattatggaggtccccagctacaggtgaactttctcctggccaacagaaggttgcaggttccttattattaggtctgttatttaaaaggtctgttatttaaaagatggaaagtataccttgaggctgatagaagggcatttttagcagtaatgatcagaggtgtgatgatagaatctaattaggtggttgctagaaggttggaaacaaaaggaagatcacttgcagaaactaaaatgtattaataccaaattagatgcttagtcaatataaccacgaccgcatgtggtaagtgcttatacctcacagaagcagttaattatctctcttcaatttactagtctccgcttgaaatccaacttcagccatatatttaatgccatagttgaggaagatgtaggttgcccccaccacatatgaaacagaatcaatctatttcttccccagagagtgacatttaatcacccctgtgttactaggcttatgattgggattatgattattattctcattagctttggaggctttgtgctttcaaagactttatagcaaatcacatacccacacagagatgtccactgatcaccagttctccagcatgctttatcaagtggcccctgaacaaacttcttaatatttcctagtgcatggttttaagttgtttttattctatatggaatagatgcaggccacacacaaacacatttaaattttaattgtacatctgaatcaacatcatacatttgatatctaaaaataacactttggtcaagattgttggtttttgaaatatcctcttaattttatatgctttaaaaatggatgaaaattacttgaaagggataaataatattgtctgatgtctaagaatttatgtatacttaaaggaaatccaagagctttatatgtaataaaaatatcaatattctaagattcctattgtgttccatcactaagttatgtccaactctttgcaaacacttggactgcagcatgacagcctcctctgtccttcaccatctcccggagtttgctcaaattcttatccattgagtcagtgatgctatctgatcatctcagcctccctatttaactgagtcactattgaaagactaatgtatcaaataaaacatagtagaaaatgcattatttaattctgtcagtaaaaagtttttctttcatgtcttttaggatttttttttgacaattcaattaatatttattttatcacctacaaagcactgtactagtgaatttaggcatctgggaataaaaatatctcagtagtaagcccttactctttggcaaacattgcactaagtgttttatatctcattttttcttaaataacctcagagtaagtattactattatctctattcatttgtgggaaaattgagacacagaggatttacccaaagtcacacagattataaatgatttatcctgtctttggacatcaagtagtataactccagaactttactgtttttacttttgaaaatgaatctactctcttccattctctatctaaatttagtttttcctatttctgctttttaaaagaagatctgaaattataataaaccaatccaaaataaacacaaacactgaaacattcactgctagcataatttaactatttgctatgttttctttggtaattaattttaaaagtcatttatttgttcaaaaaacaacatacacacacacatacacacatgttccattgttttgggataatataatatagggcaaacatacactgtcagctacattaatttgtagtgcccagtgagaaatgaaactatgaagttccttgttcaaaaactaagaattttaagatagagacagatatgtattaaacaaaaagagactgcataggtcatatgcccatgatgctggctctagcaaaacaccataggagtatatatatatatatatatatatacacacatacatatatatatatatttaatgccatagttgaggaagatgtaggttcccccccaccacatatgaaacagaatcaatctatttcttccccagagagtgacatttaatcacccctgtgttactaggcttatgattgggattacgattattactctcattagctttgggaggttgtgctttcaaagactttatagtgtatatatatatgtgggggggtgggtatatatatatgtacatatgtatgcatggtttgtatatttt

SEQ ID NO: 59883 - DNA, 1719 bp, Bovine  19866880807708
  misc_feature (1)..(1): n is a, c, g, or t
natacatatttgatatatacaggaaatttcttttgtatgtgaaattttaatactaaaactaaaaatttccaagagactatcttttgcaagaaggtagtctcaaagtatttagtcttcaagtgttttgaagaactctttctacaccttaaactactaagtagtcttttggaagaaatatttttctttttaacagtgttactcctaaaaagtgctgctgctaagtcacttcagtcgtgtccgactctgtgcgaccccatagacggcagcccacaaggctcccccatccctgggattctccaggcaagaacactggagtgggttgccatttccttctccaatgcatgaaagtgaaaagtgaaagtcaagtcgctcagtcgtatccggctcttagcgaccccatggactgcagcctaccaggcttctctgtccataggattttccaggcaaaagtactggagtggggtgccattgccttctccaactcctaaaaagtatctctgtgttaatagataaggacatttcctttatgatacagattttaaatgtggaccgccagagggttaaaatcattaatagtgaaatatttatctttaaaactacttcatagagtataatatacagcaagaactttacaaaaagagcaccagcattgtccatttttattttaaccaacaaacaacatatcattctaaacactaaaatataagtcaatggcaaagcaatgatgagttcctttgtaaatttaatccgtttcccaagacagtatctgattttccagcttatcatagatttcatgtttgatatgagaatcagctgtgatcactatatccttagattaaaaaacaggaactggaaacccagaaaccaagcctgatgacttccaaagactcaggaaagaaagacttaacttctctctggcctactcacctctgtgggcagtgagtgaaaacaaaatgagcaaacaatgatggacttcctaaaatagaccaaaaattttagtttttcgtttttaaaggaatgaataaggagaaatatgttggtagcaaggattggagtcaggctagccatctgttttcagggttttgtgcctttttaaggtttttttttttaatacctccttgataatgaaaacaagatgtgcattccttacaaatacctaatcctatcctgtgacctcgacctggtcaacagccaaactctctacctcaaccaaataaatgcaaaccccttcagaacaaatatgcctttgagtcaggaagacctttaacattactgtgcaggtttacttgatgcctgcaccacctacattagtcatcactgcagtaggttaacctttgtcctgctccttcagataatggcagtgttgaagtaatttgatccagcacttggataaaccccttagtttagctcagaccccttagatagtcagaatcacatataaagttggtgttgatgctgttttctaggcctggagataacacagatcaggaaaatgaaacaatatgtgtaggtgttgcactctactgctctgaactttttttagtgttgtacatgacaagatttttatatcatatataaatatacatcatggggaatattcatttcactccttaaataggactgaattatttaaattatcattttatttcctttgtatctatttgttataaagtctaaagctagtactctgtaatctatcgaatttcagaaatattatag

SEQ ID NO: 59884 - DNA, 2107 bp, Bovine  19866880851772
  misc_feature (1)..(1): n is a, c, g, or t
nctataggtaatatgaaataatcacctatgtccagaaacaggcatcatggtgtcaaattcagtgaaattaacttaatgtattaaatggcttggaattaggatctcagttaccagattaatagccagcaagataattgttggtcattacctagtttccatagagataatatttactttatacagtttgacattaaggcaactcatcatttctaaatatgaattaaccagggtaattatacttttacccttttgcatgttatttcttttaagaactgcctacattccaatctgaggtccaccatttgctaagagtatgatttcataaagttatttaacttaatcctaaactttgttactaaattccacataaatttttggttagtattaaataaaacaatgcatggaaactgcttatcacattttgaggcacatcagtatcagcatcattatcattcttataattatattatagttaaagaatgaagcaagtatcaccaaaaacacaaataaggctacccagatcaaaaattgaaaaaagcaggcagatgtgtaaaaatgatcttgtatctaatgtgaaaaaatattaaaacaattggaaaattaattcatgactttaaaactttagaattgctatattcatggacagactagttaaacaagtcagataagcttataattcttgatattatataatacataacttcactgatcacaaattttatttaacattttcaaaacattccatataatgttttcaaaggaggttaggtcatgttatgtactacaacctagtcactaagaggactgatctttgcatttaaatagtttaatctggctatgccactagccagttgtataatccctcagtctcagttttcttatgagtaaaatggggaacatactagttagtacctatctcataggaattatatcataaacaattactcatgaacttagtggctttggacacattacttaacctatctgtgctcccaattatcttgcctgtacaatgagttacaataacagtaatgatttcaatcacctccagagtcaataaattatgtctccaaagacacagaagagtaaatgggacatattgttgagagaacactaaatgggacttactgttgaaagaactattagtgtgaaagaaagtgaaaatgaagtcgctcagtcttgtctgactctttacgaccccacagattgtagcccacggaattttccaggcaagagtattggagtgggttgccatttccttctccaggggatcttcctgacccagggatcaaagccaggtctccggcattgcaggcagaggctttacctctgtgccaccagggaagccctattaatgtgaatagtagcaacaaaagcagcagcagtagtgggagtagtagtaatcacggtggagaaaaaagaataaaaaataatgaatacagcccatcaacaattttcttgaactgaattttatactgaaaaacaaagtttttctgttaaataacagactgcattaaatcaaccttccctttcatttttttgtgccaaaacatggatcctatttaataataaaaagctttgctaaaatacaaaataaaatttatacaaatttattttataatggttattatttaactaagacataccaatattctatcatgaactataaaagatactaattattttagataaagtaaatggaattaatttccttccactttcttctgaggctcagaatctgaatagcacaactaaggaaaatagtaatatggctgaattacatttcagcatgatacaaatgaagtaagtttaagtacagaaatgatttaaagcaaattataaataggaaagaatattagagagtgaaaactaaggaaaacatagttcccattcatgagatggaataagaaaactgactataaggaaaactataattcatatcatttattataaagagaaaatcagcatacctttggcaggatttgcatcatatccatatgaagttttgtttaaaacatgatgatcaccagaagagggtattatccttgaatctgaaataggatggatccctttcacacgttcagctattgctttatggtgctcataa

SEQ ID NO: 59885 - DNA, 1170 bp, Bovine  19866880878280
  misc_feature (1)..(1): n is a, c, g, or t
ntaattttaatactgggaaaaatgttaagtgctctttccaactgactaaccatgatacatatgcacgtgcgcatgcacacaccacacacacacacacacagacttaataataagtgatgataagtagtagactaacaatcaaacaattcatttttttttaccagaacaaaatttccctaaaataggaaaataagaagccaataattttgtcacatcttagaggaattaatgaaatatggtcattctgaagagacttgattgtaacacacagagacaaaatatgaaagtaattttcctaagaagtttacttttcttaagcagcaggaaaatggtttaatatcctaatttaaataagcttagcttaaatttagagcgatcccagctgctaacaaactctcattagtaataaatttaggaaatgaccagatgttgtaaacagtgttataatcagaacaaaaatagctcacaaaggactttgcattcatctgaaggattcttagcagttgtgatgcataacttattatactcaactccttcattagtagtatcattactgttatgttcccaaaagcaaaactgtaagttgaaaagaagacctgcagaaatgattcagtgtattactcacaaaaatacaatggattgaagaaggtatatagtatttgactggatagaaatataaatcaatgctagtagaaccattatcagggtagtgataacagtactgagtagaataagacatcttacattcaccatgggcagctctgagaaacataaaacagctttaacatttctgtctcaatctttcattttaaaaaggcatataactcattcatacacacataagcatttacacaaaatgaaaacactttcatttcatttctaacacttttatagttaaaagaaatcattttaagaaacaactgtatctaacagtaattctcaagttttgaagattttcatatgtgataactagaaaacagccacattaccttgggtcctttaatatcttagaataaacaattcctatatttaagaagtatgttgcaaatgcatttgcttcaacttcacaaatggaattttgaagtatatatttgccagattgtaatttaaaccttaaatagagaaggaaatggcaacccactccagtgttcttgccggagaatcccaggg

SEQ ID NO: 59886 - DNA, 2726 bp, Bovine  19866880997972
  misc_feature (1)..(1): n is a, c, g, or t
nggtctttgttgtatacagctttctctagctgcagcgagcaggggctactcttggtctccatgtactggtttctcattatggtggcttctcttgtggagcgcaggctctagggttgtggccctagggcttagttcctccgcagcgtgtgggatcttcccagacacaggcttcactgactgaagcttgcaggctcagcggttgtggcccaagggcttagttcctccgcagcgtgtgggatcttcccagacacaggcttcactgactgaagcttgcaggctctagggttgtggccctagggcttagtttctccgcagcgtgtggatcttcccagacacaggcttcactgactgaagcttgcaggctcagcggttgtggcccaagggcttagttcctccgcagcgtgtgggatcttcccagaccagggattgaaccggggtcccctgaattagcaggcagattcttatccagtgtaccaccagggaagtccttgctttgtgttttgatgctcactgacgttttggactctgaggacattggccatatactagagacggcagagctgtggattacatatagctttgtcaactttctggaatacagttgccatcccagcgcttgactgtctgtgaatttctccacaagggagaagttattcccatcttatataagccactgctattttgcatttttctactgtttgcaattgaagggaatcctaatgtgccacgtctgtatgaagaatggaaatcggaaagatggcactggatagctacatttttctagaaagactgatcttcctcattcgtgtatgagcttatctgtcacccgtgagcacctccgcttgctccccctgctactgctcttattctctgggtggactccgggtggtgaacaagatgtcagcagccatgttggtgctgttgccccctccttacctgagtccccctcagagattccaatacatcttagatactattgagttttgtcttggtgttttggttcatttgcttgtttctttttaagaacatcacaacattccactataataatatcctagaattcagcacaacggaggaatgaggttttttgttttgttttaaattctgggaaaatagattaaagcagttaaatgttactcttgatgtgattaaatcagtagagcaaatgtacattgcttatagcacagtcaaaataactgaaaaagccatttgtataaatcagtagagatgtgaaaatagtgaatgtaaaaactacagtggaggtctcttttaagctacccatgcagtgatattttcatacagaaaagagaaaatagaaaaaaaaaaatacattaaagggtattaaaatggtttagttatattcaaaatctatcttgtcaagcatagtaaggatttgaaaagaatgaggtaggaagcatggaaaaggataaattattaatacttagctaagtcacgagaacagagacatttgataactcaacttttgagtggtaaagaaaataggaaaaacgtttttaatggaaaagggtataaacaaggcaaatgggataactataatcattcaagagaatagcttaggctaaatttccaaaatgttgttctaagaaaagcatctggtacagcagcatggtgtgtcactgaggatatggaaagtagaacctaacagcacacttaaacagatacgcacctcagattgcaactctacctccggcactacctggcagccccgggatggaccagaagaggaaagccaacaggttggagctgctgactctaaactctcctgctgataactcatgttcgtggcaaaattctttataaatgaatctgttcttcctacaccagactggactgtctctctattgtgagaacaaacttttttttttttttttccccatctttcttccttctcctcatctcttttcccacatctctaccctagactatagttcttgaatggaaaacaaaaaggcaatttggcaaaattttatattttattttggctttgctggtggctcagtggtaaatagtccacctcccagtgcaggacacttggatttgaactttgggtcagaaagatcatctggagaaggaaatggcaacccacttcaatattcttgcctgggaaatcccatggacagaggagcctgacaggctacagtccatggggacacgacttagcaactgttgctgttactgttaggagaaggcaatggcaacccactccggtactcttgcctggaaaatcccattggcaggggagcctggtaggctgcagtccatggggttgcgaagggtcagacatgactgagtgactttgctttcacttttcactttcatgcattggagaaggaaatggcaacccactccagtgttcttgcctggagaatcccagggacgggggagcctggtgggctgccgtctctggggtcacacagagttggacacaattaaacagcaaatattttattttaccttttaaaatctctgtgtcttggcttcccagtggctacttagtgttactctatttcagtgcagcactttccctcatcagttcagttcagttgctcagtcgtgtccgactctttgcgacccatgaaccacatgccaggcctccctgtccatcaccaactcccagagttcacccaaactcatgtccatcgagtcggtgatgccatccagccatctcatcctctgtcgtccccttctcctcctgcccctaatcc

SEQ ID NO: 59887 - DNA, 750 bp, Bovine  19866881285645
  misc_feature (1)..(1): n is a, c, g, or t
ntacccactcttgatttagagatctggagatgacactgaaagcctttcacttttaagtgtccaaggaacctttcaaataaaaagggaaatcggtaagtttgttgccactgctgctatagctgatgttttcacctagactgaaaagacctgaaaagaccagctgtcagagatcaacatctttatttccatcataaaccattttcccttctcttgccctaaaattacaggaaaatatggtttattttaaaatgaactgctctttgatagctgagcatatacctaacatgactcatattcagagatgatgttcatgatcttgtcattctccatgtgtcctggatgcacagtttatctgaaaatatcatggtaacttctaccagagagcacttttaatatgctgctggtaaagtctgtcacttcagctctgtatacttgattcatgtaacaatacaactctggaacctctctgttcttgttttgctcataatgtaatgctaactcatttctcaagagcatgttgtttcattatggcataagaatgtgacataatagcagcctaactaatttgtacctggagaacaatacagtagcctaacctacattttatttattatattcttcagaattgcagaggccccaacgaaacccaaaaggaggaaacgtgggtccctcctaattgtaaagtctctaagacagcccccattctgagatgccaaaataatttttggatcacaatattatcaatagttg

SEQ ID NO: 59888 - DNA, 760 bp, Bovine  19866881466738
  misc_feature (1)..(1): n is a, c, g, or t
ncccatgagcatttaaattatgttgatacatggaaataattacatataaaatattaagtgaaaatattaaagaaaataaaatataaacattgaatatagctgagaaaattttatcatactagtcataaccatgttaataattcactgtgttccagttgatttctttgatccttaaaataaactttgtaaagtagatatgttattctaattttataaatgaggaaactaagttttaggaaaaaagacttattacaaataagtcttgctaggcaattcagtgcttcttagtcatccacaactgcctctatgctgtgtcacaaaatttataagtgattttaaagtgatataacagttaaatgttcactagtttcttatttttctcttttaaactgcttatattcacagcaatgatcattttaaaagttgtgtatcatatactaccaaaccttttacaaaatctttcttaaaaagagtaactaaagtgatcatgatgaataagaggtttattaaggagagttaaatatacctggtaaatacaggggaaatagttaaagtagaaagccagtggtctcacgagcggaggacacagcctcagccatgctgctgacattgttactacaggattcagcttctcttggaaggcaagcagccaaactctgtagggacaagtctgccaattgtacaaacaaatcttcaaagtgaaataaaatcctcttgatgtctattggactattgttagaaacaaatcaaatatgtaggg

SEQ ID NO: 59889 - DNA, 1016 bp, Bovine  19866881650546
  misc_feature (1)..(1): n is a, c, g, or t
natgcagaggggttttctaggaagaccttttgctggtgagtcgttacattttctcgtttgattactagattagtttctgtatttcccactcagctgaaaactccatgatagcaacaactacagcaattttgctcagaaattctatatcttagaagatcctctacaaatattttgaataaataagtaaacataaatatcacaattttaaactcaaacctgtttgaattcaaatctttgttctcaacttcaaattgggcacactattaaaacttctaaccttcaatttcttcatctcttagtggggaaaataacacctatttatcaaataaaatcttatacatatatcaatagtcaacttgtggttttaactgccacaaatccaaaggtgtggagccttcatgtggtattactcctcttaggtctgaatcaagaatatgattattaaaaatttactgaaaagttctggcatttacttttctcctttgttaattaaaataatgatacctatgtctcatggttcttttgagaaataaatgaggcattaacctaggaaagactttagttcagtttctggagtgttacattttcatttatattactataaaaacttttcagactacacaagaggaaagacaccatacaagtttatagaattgaattatgttcagacaagagttttttaaaaatgattttgctgtgaagagaagaaattgatttatattcttacagtgtatatatatatatatatatatgcatagataagtgtatgtgtagtatacatatacttaatacacatacatctgtatgtctgtgttcctgggcaatattatacataattaacatttacataaattactgttacaaaacacctctgtgaatattctcttgttaaactcagcaacaaacctgtgaggtaggtagtacaaggtataaagaaacctcacttggaaagagctaacagggggtggccaggttctcaggttacgcaccttatcctgttactaacagtgtgcggt

SEQ ID NO: 59890 - DNA, 1070 bp, Bovine  19866882229093
  misc_feature (1)..(1): n is a, c, g, or t
nacattctggaaagaatttgaaataaaaggtctatttctacatggttatgatattttatcaataattattacaatgatattcattctcttcctccttcaagttttagtccatgagtaacctttaaaactactgaaaagataaaattaaatgaatcaaggtgcttagtaaatatgtatggaatcatatttgtgaaaaatttggagatattaacaatatgaatttttacattatacatgtgtttaatttcagcttaattgcctgtttggggaaaaaataacattcctcatactagatctttccatttttctatataacatattgatttatggttcatttgaagttcataatgggaatgtcattatatcaatcatatcttcctcacatctcttccaagtgaaattaattttaccttttagtagagattatataaaatcaatatcattattgctttatttgtatattaaaattctgaatttctgaatgaagcattgggttttacataaaataattttatcctcatcctttcatttgttaagtagtttaggcaaatattacattcaggaaaactgaggaaactgtatcccatttcaaattttaaacagggtcaggtctaaattaagccagagaccattccacaatcaggagtatgagcagttgctaagacttcaatctgaggctagtcaacttccagacccataaaacctttgttttaccataaaaatctcccagtttagaaactgaaatcaagtaaaagtgaagtaaatacactcatcatacgtatttttaatgtagccacttttgttgttcagttgctgaattgtgtctgattctgtatgtgtgtagccactgctcagtttttattcctatgccatatacagatttaagtaattcttacataataataaaaatacctaattcttactaagtgcttactgtttgacaagcatcacagctactaatttatatgcattgtttgattaaatcagagcatagacctataaactacaatgatgttatttccattttatagctaagaaaacaatttaaataacttactcaaggcctatag

SEQ ID NO: 59891 - DNA, 1666 bp, Bovine  19866880395220
  misc_feature (1)..(1): n is a, c, g, or t
ngtctttttccctttttgattgtgttgttttcctggtattgacttgtatgagctacttgtatattttggaaattaatcctttgtcacttgtttcatttgctgttattttacccattctgaggcttgtcttttcaccttgtttatagtttcctttgctgtgcaaaagcttttaagtttaattaggtttcacgtgtttatttttgtttttatttccattactgtaagaggtgggtcatagaggatcttgctgtgatttatgcatagaatgctctggctatgcttaagaggtggtggttaagtggctaagtcatgtctaactcttgcaactccatggactgtagctcgccaggctcctctgtctatggtaatttccaggcaagaatactggagtgggttgccatttcattctccagggaatcttctgacccagggagtcaaactcgggtctcctgcattgcaagtagtcccctgcattgcaggctgattctttaccgactgagctagcaaggtggatggcatgtttaaaaggaagattcttaattgatacaatggttttcctggctgaaatgacaaaccaagcttcacccacccaagactgtggaagtaggggcacatagttgaaataatatagttcaggcccagccctttagtaggctttaattaaacatggtcattcctagagcaagggtgtggctgggtaagggcaccaagtgtgtcctctgcaaaataaaatgtttaatgtcgcagctatgattctgtcttgaatggctctgctaacatttccggcaagtggggtgaaaggccctttcttaagaggcaaactttctgagacaactctgtaatgaaaacatgatcatttctgagttacaaatgtgtgtactaaggttctttgaaaacttgtcctaccttgctgctctccagaacatacttaataggctgctgctaacttttggcctccaaaagagggaatggtgtacaaagatggaccaaggaaatgaaatgagggtttccatggctactgtcttgagtgcgcataagacaaaaaatttttgagctgaaagtcatcaattaatccaaaatgattttcttcctctatttcatttgtttacttggtacgcagagaaacagagcagggaatgttctggtacagatacatagcctgagggagtcaggacttttccagctgccaggaacatcttaaacagagccttgagtgttcaacaaactttggggacactcagaaccagcttgggtaaatttgaagataagtagtgtgggtctcattcctgatcatctctgagtgatgttaggtgaattatcagtactttacctctctgagtttaggtgacccatctgtaaaagaaataaatgctggttgaatctaaaccctaattgagtttagctaacaacctatatgtttccttttctcttttgctttttgcttctcttcttttcacagctatttgtaaggcctccccagacggccattttgcttttttgcgtttcttttccatggggatggtctcgatccctgtctcctgtacagtgtcatgaacctcagtccatagttcatcaggcattctgtctatcagatctagtcccttaaatctatttctcacttccactgtatagtcataagggatttgatttaggtcatacctgaatg

SEQ ID NO: 59892 - DNA, 2306 bp, Bovine  19866880435471
  misc_feature (1)..(1): n is a, c, g, or t
nagtctatgggtgtatgctgctgaggcattcccattgtagagttctggagtcttctggctccctgccatacccccaccccattgctttaaagctgactccaactttgtgggttttgtgattaaacaacactggagactgtgatttctaatgccatccttggaatccatgtcggagatgaaaggccacttcccctgtggaaaaggctttcacattcttctggaactgaacaaaaatgaggaaagcatcccaattctgtgactttgcacaatttaccacgtgcatccaagggatgcaggagaaatgatcctcattgcagatggagagaggtcaagtgtcattgagcaatggcttcaaactcaagtcatctgactcaagtcccaggctctgcccgactgcagtggtctcattacgaagcccaccagccatggctgaggagggcctgtatgtcaccttctaaggtggttgtgtagtggttgtgcagcagtgaggctgagtatgcaacacccacattgtaaataagaaagcaaatatttttatatttcaccctctcatgtataatatttcctctataaataggttaaaactgaatcgagactcaagctagtctctgtagcaggcagggaaagaataaattaagggattttcccttctgcttactttcaagtcgggctaattgtttcatgaactgtttttccttggattaccagttttgcacgtttgtgctttgaactttcaacgatatctcatttccattagtgtaaaatgagagccactttgattacctccactgtcctctttcgtcaccactcctcaccttgccgtgtcccagcaagactcaattgctctcagttcttcagacccagtttcttacctctcttgacattccctgtgtccagacagtctccactgcctaggcgtgctgaactcctatgcatctttcaggtcacagcgtaactgtttcttcctccgatcccctggattaagtaggttcaggcccctgccagacgctctcatagcacactcggcttcaccatcatttaacttatcacactttcctgtaattgctggcttatcctccctgctaactccctaatggagggactatagcttgttactcatcattttaacagatactcctacatagtaggtactcagcaaacatttgttgaatgaatgaataaatgaaactacttctgtggcaagtttggttcacaaagtctgtatttcacatacattgccagactggccaacatttttatgttctacctgtggtcattctcttagcaaagactgagcttttgccttttgaaacataaatagaaagatctttcataacaatgctgttttgccctgtaaaacagagtttgacatttttaacaataatcatggttcagaaatgagaatttatagaccaggaatgcaaaactgaatttcaccatcatctcagagaatcatcagtttatggacatactaaagtgaaaattctgtagactcaaatttcattaattcttacctaggataggagaatcaacttctattttatctctgtagtcctttttctaacattgtacttgttacaggggagatgcccaaccagtgtatttttgtaaatgcccaggtagaatgataatgtttgctaaatttacttagtgctgttctaagcactttacatggattaactcatttaatcctcacaacaaccagaggaagtagattctgttattagtccaattttacagatgaaaaaactgaggctaggcctttggcatgaattaccagtgttggctgccaaggtggcgctagtggtaaagaacctgccaaccagtgctgaagacgtgagaaagccaggttcagtccctgggttaaggaagatgccctgggggagggcatggcaacccactccaatattcttgcctggagaatccccatggacagaggagcctggagggctacagtccataaggtagcaaagagtcgtacacgactgaagcgactgagcatgtaccagtgttggcaaggacttgagacaccagtttatccaatacacttactttaaaaaggcacatgcatattcattaaaactttcattaaatggaacccactatccacactcaaattagccaagtgctttttttcccccttaagcaatttacaatgaataggaggactttttatagttagatttagggaaaggggtacattttactttctttttcttttcttaaaacattttgattctttattttgtcgtcttagtgctttttatgttatttaaaaataatacacagattgggaaaagttagaa

SEQ ID NO: 59893 - DNA, 1428 bp, Bovine  19866880544946
  misc_feature (1)..(1): n is a, c, g, or t
ntgggtcatttatgtttctggaattgagctgtaggagttgcttgtatatttttgagattagttgtttgtcagttgcttcatttgctattattttctcccattctaaagcctgtcttttcaccttgctaatagtttcctttgttgtttaagcttttaagtttaattaggtcccatttgtttatttttgcttttatttccaatattctgggaggtgggtcatagaggctcctgctataatttatgttggggagtgttttgcctatgttctcctctaggagttttataatttctggtcttacatttagatctttaatccattttgagtttatttttgtgtatggtgttagaaagtgttctagtttcattcttttacaagtggttgaccagttttcccagcaccacttgttaaagagattgtttttaatcgattgtatattcttgcctcctttgtcaaagataaggtgtatgacgtcacttttatgtggaatctaaaatataaaacaaatgagagagcatggagcacaagagaaacagactcagagatatggaaaacaaactattggttaccaggggcgagagggaaagagggaggggcacgataggggtatgggactaagagatgcatactattgtacataaaatagataggtatcaacaaggatatattgtacagcataggggattaagcaattatcttgtaataatgtgtaatggagtatattctataaaaatattgaattactatgctatatacctgaaactactataataggcaaatcaactatactttgatttttaacaacttctaaacgtagcaacacttattcaaacatttactgtttgaaacctgacatttaaatataaaatggattgcttctttaaagaacatgagaatctccctgctttagttttaactgcactgatttatcttgaagccgaaggtgatgctttatgagtaaatccttccgtgaaagtagaaaattgttcagttaacaacaaactgcctatcttctaggggccagacactgtgcagcatcctggcagagaaggaagaaacacaggataaaataataaatcccagtccctccttccacaccctgccaatctcagttgattacccttgcttcttagttcatgagaaaaatgaaagcccaagagagaacctccagtattcccaccaccaaatctatcacctttccaacagctggacccatatactccagtggcagtgggtgaaatcagaaacagccaaggcaagatctctacctcaatctcaccttccagatctcgtaagagtgcctctgataggtgaaagctgaattacatccagaactgtagctacaagggagtcagggatcatttttctcccattccatatataacccagcagcaagtttcgatgatcccaccttcaaactatattctgaa

SEQ ID NO: 59894 - DNA, 1523 bp, Bovine  19866880586232
  misc_feature (1)..(1): n is a, c, g, or t
ntaaaactgtagcttctgttagtgactcccagtccacaactctggcttctgctgagccatcagccctttctaattcacgtgcttcgtgtggtgatcccatatggccctttaacaaattcaaaacagaactcgccacccacctcttacagaccacacttccccatttcctctcagatactggcatctttattttcacaacctgagtttctggctacagtccaactaaactttctccttcaccttatacacccaaagcctatttatttcattctctaaactggtatttctcaaactagctagggcaaaagaggaaccaggcacgtatattccaaaactgtttctcataattccaaacaatgtactcctatcttcactgagaatcaaaacttccctgcattcttccccttttctagtcccacacccaccttcatctctcacctgggttcctgtaacaacctcctaccagatcaccctgtctccagtctcttccctctctaccgatcaaccgagcatcatcaaaacctttaatgactgatctcctataattcaatgtctaaattctctatcaaactgaatcaaaatctctcccttttatataattccacatccatatccggtcactaagcaatgcttaagtattcacagttgcctgaatcagtcaagatgtgtcaaaggcttctatgaaacatccctgccttggaaagaactgattcagttacttggaccactccccaaccctcaaccctcgtctacccaacaccagataagccagagctcagctcaagttggcctcctctgggaagtcttccctccccatgactcctttcttctcctcatgctaccctaatacttgcaatgttctgttattattgaactaacaggaccccttaagggaaaagcagttttagccagagtatcaaacacactgctgggttcacagtacctactcaaacattatttctgaaaaaaaaaaaaaatatatttttgaatgaaaaaatgagtagcaattttctaaatgatttcttatttggctgaacgagaagacaggaggtgagaactcagcaaaatttaaaataccatcgcccctaatcctctcttcaatcaagccagctacctggaccctcaagttggtcagagctgcttagactcaagaagcatctccactcttactctcttcaatacttccacagcctagtgcccatttcatctcagctagatcagtgcaagaaaacactctgatggttcccatgaccattcagaactaaccaatagaacagaagtcagctctttatcccacctctcttgtattttcccccaaactgtgtatcagaaatgctcttattccagccagtttagtccttttcatcaaaccccaagactaagcccatcagggtttgggcaataacaacccaatctataagcacagattattatttcccggttactgacaaagccgactctcagacctgaagagccaccagaggtatgccttttaagagctggaatgaactgaaggaactggg

SEQ ID NO: 59895 - DNA, 971 bp, Bovine  19866880590575
  misc_feature (1)..(1): n is a, c, g, or t
ncactgggagggctttctcctcatactgcaggtgaggattgaagatgtaaacctcttctggaatgaggcaggagcatcaagtcactaatcaatcaaaacaaaactcccagtggtgagttgacagggccagggtcacaggcataataataagctttgagtgtaagtctattgaaagcgtcctggtgctataagagagtatgaattaaattcagctttgatcctaaactgggtttgtcagttactagttagttatgtggttacccggtccagtcaggtaacctcctggagctatctgcatttttgctgagctggtggggttgaggtattgctatttttggggaaggtgtgtaagaccctcagtgcagttcatgcccacaggcagtgcttagtaatggttattattagtgaattcctggctgaaagtttttttcccccacagatgtacaggagcctctcaggtgcgaaaaagtctcccagccttttagaccagctgtaactctgcccctcctctccctaccatccccttcacaggtataactgccctggggcatctgtcctccagggcataattccccatgaagctggcacatctaccatgggcaccagtaggtgccagcacaggctaagctttcagaagggctgcttcatttgattttatccttcttccatccccccagtgtgaatcatgaaagcccagacttctttcctttcttccacagcaatctgtcttctccagccttgcttgcttgctattcggagctgggagaaaatgctcagggttgcaatgtcaagtatcagtgaagaaagacctgtttgtggctccttgtaacaagactaatgaacactagcgctccacttgggtggcactctaccctttgcaatgtgctttcataattgttagctcatttaatagttgtaaacttctggcaaggtagtgtgattgttgagggtctgcaaattgcctttacatt

SEQ ID NO: 59896 - DNA, 1606 bp, Bovine  19866880601671
  misc_feature (1)..(1): n is a, c, g, or t
ntagaatttgataaaagtaatactaaaatttatatgaaagaatatcagaataccaagaatatcagaagagaaacaaggtgggtggagttgctctaccagatttcaagtcttataaagctagagtaattaagacaatgtgggtttaacagaaatggacaaagagcctagtgaaacggaatagagaacttaggaacaatcacacatatatggaaacttgataattcacagaatgggcacttcttgtcagtaggaaaaggaagaatttttttaaaaatgaggataattggttatctaaatagaaacacatgatattgcatctctgtctcacagtatatacagaaacagttccaaatggattaaaaatatcaatatggaagtaaaaacttacttttaggcaaaaaaaattgggcaatattttccccacctcggtgggaaaggaattcttaatagaccgaaagtgaagattaatatatttgctccattaaaatgaagaatctttgttcgtcagaattgaaaggataagccataaagcaagagaatatgattgcaacagaaataaccaccaaatgattgtagcacccaaaataaataaaggactccaatgaatcaaaaataagattacccattaaaaattggtaaaataaatagtcatgttgtagaagaggaaacagatggctaacacatatgtgaaaagatgctcaactttattagaaaccagtgaagtacaagttaaaaccacagtgagcacaagcattggaatggggagctaatggaaatgtcagcagtacaaccattttggaaaacaatttgatgtaatatattaaagttgacagtgggtattacctacgcccaagtaatttcgctcttaaatccacaccccaggagaaaatcctgcacgtgtgttagagacatagtttggaatgttgatagtcagtttgcttctaatggctccaaactgaaaactacccaaacgtcttttagcagcaaagctgtttaaatgaagagtgctaggttcataaaatgagacactgctgcagcggtgaaatgaatgaaccacggctataattatcagtctggatgaatctcaaatgttaaggagagaaaattaaaaggttcaaagcaggcacaacaaaaccatgtatcatttaaagatataacataggtgcaattgttataataaggggagaatgagcacaaaattaggacagtggtttcttttggccggtgagggggtgatctggaaagtgagggacccatagggcacctggattttcagaggtgctggtagtgctttctgaaggttggtggtaggtgtgttttgccttcctgtcatttctttaaatgatacaaatatctgttatatacactcatttgttgtatgttttgtaattcagacagtttttttacatgccctgggctaagtcccaagcacagttcctgcagagcggcacccaccttctttaataatcactttattcttcctgtcaaaactcccactcccagtcttacaatgcttttatccaaggaagggaagagggaaatctgccacacagccccaccctagcctggaatgttattctaccacccaccagtcttttcctgtctt

SEQ ID NO: 59897 - DNA, 1649 bp, Bovine  19866880637826
  misc_feature (1)..(1): n is a, c, g, or t
ncatttttatcgctatgaatctacccaacacaatgtcatcttctcagggcccaactccaagcatccaacatccatgcacataggcaaataacaggacaactgccgaaagggtggaatcctcttgattttactggttagagttcagctgccagaggtactgggttttcatatacagaacagccaacttgtttgtgatcagacttcagtgacatcgaccttccgaaacatctgtgacgcaggggggcgtggaggaagaagcagcaggctcagagcctcctgagaacaatggcccaaaacccatgcaccacccctcctcagacgcaaagccaacctgacacgtacgcagcactgcctttcctggcttcctcagggaaacttcagttttgccccggaggtttccatcagagagcaggaagtgaagagcagaagactcagaaagcaggtcagaagaggagggaccggcaggacgtgacaactcgggacacaaacacttcccccatattgtacaggaacacattttgtatcgtgtgcacaacagaaagaatggcgaaagctgtttaaatacagccgggaatcaggtagtatggaaggcggtaaaagttcccagataccacagttgcccccaacagcttcaccaatagagcagacagcagtgcaaaccatcaatgagaagagtgttagtctgtgaaaggcaagccaagctctgcactgcaggtttggacaggctcttggtgacatcacgacaccacagcaaggtacaaacgggctgatgtttgtaatgatgaccatgactcatcaagaaaaggttaaatactctccagtgtactctgtttactaaggcagggaagtgcgtaatatattttagaaagatttccctcaaaaaatattaaaattttaaagattcatcacttaaaagggttaatcctctgttatctgaatatttgcgtacattacctcatttcacaacaatgctagttaatgaggcattgcttttttttttatgtatcattagtatcaaattattggcaccattcagatttaaggagagggagaggagagcaaagtatacaatacaacataaaaatacaattctgatacaaatgtatgagatcaatcccacttaagtggtcctaagaaatggatggatattttacacacaaggaaatacagctactaagtcatcacatggaaaagtgctcagctttgctagcaattaatgaaataaaacaaccttttgagaacaactatacgtacttattaaactagcaaaaataaataaaaatggcaaaacccaatactggcagaactatccggtaaatagaaatgcttatacattgctggtggcatcaaaaattgtagaggggattcaagcattcagagaagatgggaggttgaacttgatgacctttaaggtcctttcaaccaggagacgagatctttctagaaagcaatctgacaatatgaaacaagagctataaaatacttcatgctctttgaccttgtcatctctctttggagatactcccaagggaagaatccaaaggaagaaacattttattttttacaaagacattcatagcagcactatttatgagaatgaaaaataggctataactcaaatatctagtaatggcaacaagtgagggtaa

SEQ ID NO: 59898 - DNA, 1322 bp, Bovine  19866880774018
  misc_feature (1)..(1): n is a, c, g, or t
ncagtgtttacagtctgggagtttgtaggagggtcacctcacagaccccagaaagcctactcctggttttggttgtatctttgttccttgccaggcacctttcctgcctaactgagcccaaattgctgaaaacaaactttccctgggttatcctcatcctgctgggtatcagctttccctaaaaccaaaattgctgttcagtctagacctgcacacttactgttctattttaagagaagcccccagtccatatcagaacagcagaggtgtctattccacattaaagtccttttcccttcggcgtcttcttggctccctgacagttgtgaacccttttttgtatagtgtctgtccctggtggcttctgggcagtcctcagctgctctgttactgcccagggcagcagcaagcacagaaatagcgttttcaaaggaagagaagaaaaaaataggataaatcgcaggtacagaaaagcaagcctgaatgctgagggctgttacaaaggtccacctgttgactaagccgtgtccagggaggcaggggttggggtgtcctccactttttcttttcctctgactccatggactccatttccccttttcactctgcttttctgtctgggttttcttagcgagttggtaaagtactttatttatttatttattttttggccacgcagcatgcagaatcttccggatcagggatcaaacctggtcttaaccactggaccactagggaaggtcctgggagagcactatagttcctataattctgtctcactgagccctcaggacagtggtgtgcagatagatgtttaacaacagactctccaggagaagcagccctggtttgcaatgtttgcccagttccatagtgtaaatactcctgtcatagccaattttaagctgccaatgtgatataactgcatatggagttgggaagagattctcagtagcacacgattatatataccatgtaagtgaaataaatgttagatgacctcaagagcatagatcagtggttggcaaattatggcttgtaggccaagtctgacacatggcctgtttttgtgcagcccgtgagctaagattggtttttacacttttaaagtttttttttttttttttttaataataatacacgacagagactgattgtggccccccaaacctaaaatatttcacatctgtccctttataggaaaagttacctgacccttgcatgaaagtgaaagtgaagtcgcttagtcgtgtccaaccctttgcgaccacatggactgtagcctaccgggctcctcggtccatgtgattttttcaggcaag

SEQ ID NO: 59899 - DNA, 2014 bp, Bovine  19866880921840
  misc_feature (1)..(1): n is a, c, g, or t
nccttgcttatattcattcagagataataggtgtaatcaatttttgcaatattgaaatattttataatagcatatgtcttattggccaaattttgtgtaaccaaccatcaggtttatcctagattgagggacttcgtggaatgcatgagtttgagtgctaacatgaggacagtcctgggcaaaccaagatgagttactctaaaattgaccaagaaaacatgtgctactatattaaaaagatgcatcactaatcatcacttttttttctaatagaattaacgagtataatcattttaaagtgaggataaaacaagatggagcaaagaattaacatcactttgacattgaatgaatgattccatctggtccagatttaactcctttataggaagcctttaggtgtatctttttgagtaatgaggggataccagtgacatatgtatctagtcttcacaattaactatctttatgaaccaaagaaagtaccacacagtggcagtaaatactgactcaagagccatagacgcattcatttcttctagatgtcaaaggaaaaccctgtgaagaccactgtatactacagcactctaaccggtaagcaaattggaaattttaaattattaaaaaaatttttttttctgatattgtagcctggtatggtcttatactgaatattcactaaattattatcttccactgtgtagagatggtattatatatataataggcgtttagttgacaagaatgagtttttcaatgcttacactaaacaagtaaacttgattactcagacatccaaatggaggaccatacccttagtcagccagctactacttcaagtaaccagcccgtgcctaatcgtggaattgcccgagcccatggagagggccagggtggaaacacagatgtacatatgatgcctcagtgctatctaacaccttggtactctccccttttaggggaaggaaattcaatcccattttctccatttttattattgtattcttcagttaagctccaatagtagctgggggaaaaaaatgcgggggaggggtgggtggggagggaatgacagggttgactaaacaaatgtcagctcagctcttcttgtgccagtaggaatactatgttataggaggaagaattataccatgcagtaatattggatcaatttttgcccctcatagaatatgtgtcatcacgttggcaggatctcatccagttcttcaaagtggaaaaacaattaaaagcatttcttatcaaatcagtaccaactgtagcagacttcagaacaaagtctctgggaaatttaagcgggtatgtacctgtatttctttacttaaatcctctattatcagaataatgatagagccagtcagtcttataaccagcaatatatactcagcgcacttccctggcagctagagatgattttaagaatcatcttgaacttttaactcaaagaaattttcagaccaaaaagataaggtatttcaaaaggtatattacctgtcatataggctctgcaccaccatccctaccatccccaggataaaggatggagaaagtgggcctttgaaagaataactctaataccaatataagaaaatattttgtcccttctaattttattaaaccagtatgtcaaattttataaactctagatcaatgcttttttgtcacatattttcacatgtgaatttaaaagagaaaaacacagttctggggtagtgaaaaaaaaatcagtcttaaaatacacagtatttgcttcatatcatttcctattcctaaatcattgccagtttagtacacatctagctatactttcttctccaaatagtgttcagttatataaaaaatgttacctctatcctctacaactctatgcaagaccaatattattaaaggagggtatcacaccaaggacaattcaataccatactaaaatatcctgacaaagcccccagataggaaagtttgagtagatgacttcagttcagttcagttcagtcgt

SEQ ID NO: 59900 - DNA, 1553 bp, Bovine  19866880971124
  misc_feature (1)..(1): n is a, c, g, or t
natatgggatcagggatcaaacccctgtcctctgcattggcaggtggattcttaaccaccgaagcaccagggaagtcctgtactgtgcattctttctcagagccgtagattcgactctgcttgctgtccttctaccctgcccctgcactctccttctccctggccacatggctgcccaactagaagactccactatcaagcctcccatgcagctaagtggtatgattaggttcttgccaaacgaatgtgaataacagggatttgtgcaaccagcctaaaaggtaactgcttgtcctgaatttcctctctttctcatttcctccagcttgaaagaatccatgcaagcaacatgacttccacgtggatgaggacaaagccttagggcatgcaggaacaacaaggaaggaacctaggtctctgaatgacattgtggaacagagctggcctaccagtctagatagtcagactcgtgagagaaaaataagctatcttatttaagccactatacgttgggggtccctgtttcaacaagtaagcatctacccaaccaatctatttccccaagtccatttctccatagaatacagtaagtccaatttttgaactagtcatattcctttccagctaaaaggcaacatttcccagtctcttttgcacctatgtgtgagcacatgactaggttgtggctaatgaagtgtaagtgaaattgtttcatgggatttctgagtaatctctttatagtcagtgaccttcttcttcccacttctttcccgctgtctggaaagtgaatgtaatggctggtgatcaagcagccattttgggccatgaagttacaaactaagagttgtgaagaagcagaagaccaggattagtgtctcagatgaccagttctagactgcctgcttctggatttctttacgtaacagaggaacttctatcttacttgtgttgttaatgtgtgtttgttgtaggtagctaaacttaatcccaaataacagatgcacccagcatcgtattggctgctgggacagacaacatttcaaaccccaacttgattcttagatattcctcttagcagaaaaaaggaaaatcactttccaaacagcagaaataagaagccagtttccattccttctgaagagaatcagcttagcttttgtgctcactgaaatattgcctgtgcagggaggtctgcatgacaaacccccaattgctggacccaggagaccccaacgatggtggctcacactaggggtccatgacatgtgggaaaacagtactgaagggggctggaagtggggaaggaggtgtgacccagctcttggggggctgggcagcgagcaggaacagaacgctgaagttgggacactagccacggcaaatttaggtcaatacagacatggaggaaacaaggcaatctctctttaagaggggacttgggcttcccaccagctactctgatttcacacactctaggccagatgacagtctcctcccttaccatccactaccccatccctgtcacagacagacgctgaaaactgcgggggggg

SEQ ID NO: 59901 - DNA, 1017 bp, Bovine  19866880991633
  misc_feature (1)..(1): n is a, c, g, or t
naatccgtgttacgttttataggctgaggttaaattaaaaagcatttatatgaatctcttccatgcctcatgtctggaaaagaaatggtctctgcaatacagaaacttttagaggtattagttcactagtctaacttgcttttcaatgttccatggacatcaagtgcttatgatcaaaccgcactgtcgtcctacaggatccgcaacagacggggtaagaaagatcaagaactaactgctctccttggccttgttctgaacggaggttttcccatcactccgttcaccatactttctcaaggagccaggctcgcaatctcactaagaaataactttatacaaactgaattcgccaactatgtttctgaaagagcttcacacacaaacacccattaagactgatctgaaattcaaatcttaaaaggaacgtttgcttttatgaagctggcattaaaaaaaaaaatcccaagcttaatcataaatacaacaaagcagatgccagtttatctgggaaggaccacagtcggttaggacacaggtgggcaaacacgaccctcagcctaaaccccactgtctgttttcataaataagctttccagaacacagacaggcccattcacttctgtatcctttgcggctgctttcaagctattcagtacaataacagggttgagtagttgtgatagagatcacaaagctgaaaatactgaccatctggacctttacagaaaagtttactgaccccaaggtttagaaaaaaaattcaccatcaaagaaagcaaccctctactccatccttggtggaaaaaaaaaaatcctttcaaaaaagtcccacaacaaaaatccctgagctttaatctgtcctgaattctcaggacagaaaaatgttacttaaactctaagcaacatttcaaacagaaaaccaaatcccaaatacctgaagttagactgactaaaacaaaacaaaaccaaaaaaaatcccctcccagttcatttttatttcatcaagcataagtt

SEQ ID NO: 59902 - DNA, 1565 bp, Bovine  19866881107535
  misc_feature (1)..(1): n is a, c, g, or t
ntgaactgtacacttaaaaatggtaaattttatattgtgtattttaccacaataaaaagtactggaagacagcagatacccgggactccaagatggcatcactcacatcagtgaagaagaaactcatggatgttaaaacaggggagctgccaatctggatatgaggtaggattttgcccctaaaggcactgctggagtgtttcaaagaggttactagtggtatgacaagtatgtctacgtgaagaaaggaagcactgctggggtttctaccatgctggcagcttacaaacttttcaactactgcctttcttagaaggaactcaaacatgagcagctaagcgagtaccactggagagggcccagtgcaggggacacactctgcttccctgaccatgacctctgcccaacactcctccctgaggaacatgatcactgctgaatatcctaatttgcaacaatgaccaataaaagataaccagtacagaaatgaaaaaatacattggaaaactttttttaaaggacccctccacatatacacaaatatgagactattacttacagtatctgcataggaatgatgttctattaaataccacgcaaagaagaaaagaaaccaagtctagtatcaaaaagttttgagtcaggtaatcccaaggcttgggaggaaaatcttatgacttggtgggtagccaaaggcagaatcaacaaaataatgccaagtactaaaaaattaaaagtcaagctttcgaagcagtccagtccagctggcctaacagggcagatgcacacgatgggaaaggctgaccattttttcccctccctacttgaggacgttttccatgagagcacttctcagctggaatttgctttgctttcataaaagttacctgtcattgcctagcgtaaaatatgagtgaaagatgatgacaatgaccactttccatagctttgtctgaaggggagggtaagctaggaaagcacactctttaattaagagacaatgaatctcgaaaacacaccaaggaaaagaagagggctggctatttcctcagattgttttaagcctaaaattgtattttatgcagcaatattatagagcaatttatctaccaggtataggcaggcaaagtcttgattcaggaatttaaaaataaacagtcaaaaatatctctagaataatatacaaggaagagagagagtacagtagttcagggatggggtgacaacttacttttcactgtatactcttttgcgccttttggatcttgcttcatgatctcatatttcatactcaaaagttaatttcaaatattttaaaatgaaattgattttataaaaatgtgactcaaacagtaagtttaccttagaatcaaattaacaaaatatttcttgctttaaaaaaaaaaatcagcgagagtgcctttacgtttctgatttttaaactttcattgtattggatgtccataaagtgtttttaattttattgagttgcttttgaataaattattttaaacatttaacacttagaatttttaagcccgaaagcaagtcatacactacactaa

SEQ ID NO: 59903 - DNA, 989 bp, Bovine  19866881134885
  misc_feature (1)..(1): n is a, c, g, or t
naaacaagtaggcaaagagatcctacaggcgttggcagactttttttttctgtaaagggccaaggcgtaaatattttaggcttttcgggacatatgatctgtatcacaactactcaattctgtctgcttttttctgcagcctccaaatagccacagacaacatgacatgaacaggtgtaggctgttccaataaatctttatggaacaggtggttggatttggttctgagccgtagtctgccaactctgccacaaaaaatgatacagtatgggaaagctgctgactctgccatggcggggattttcttgaatcccttaacctctgatcctatttcctcatctgtaaaatggggataacgtcttcagcaaacaacataatataggggaaagcttagtaaatcaaagacatgttgtatactgtgagactcaattcaatattcggactttcccctctgctctcctccatcccattacgtgtcattctcatgcaaaaatgacaacattcaacaaagttttgcaaactcttctctcttctctcttccaaggtaactgtaccaatgaagatcatttcataaaaacagacatagaacctaggccattcatctctgtttgtcaaaattacatccaccatcccattacatgtcattctcatgcaaaaatgacaacattcacaaagttttggcaaactcttctctggccatccatctctatttttgtcaaaattacattcttactttgcccactcaggatgatttgctagagtttcattaatcaaattgcttgtgacttcaatcatgtgtacactctcttgatgtacctgtattacggacaggaaaagagtatcaataaaaattaaactcaatttaacatttatcttttatactactctaggaacaatgctttaagcgtcaagtaattagatatctgagttgtcagttaacttaagagaccgcactgaacagccactatccataacaaggcaactctaga

SEQ ID NO: 59904 - DNA, 1050 bp, Bovine  19866881197880
  misc_feature (1)..(1): n is a, c, g, or t
nccaccacgcaagtctcaatgccgctgctgtcccccaaagttcacaagatcagctcgcctcagaactcagaaggcaagggccagctgtccccaggggccaaggtacgcgagaagccttgaggagcagctctccttgctgcagtttctgcataaattcagtgtgtggcatctgtacacatttgagcttcgtgtcatcaactctgggtgctcctaaagcaacagtaacaaccacatgttttttttaatataatgtgtccctgaaagataaccatgtatgagagataaatagtatcatataaaagcatgtattctgtacttaaagggaaatttaagaggtttctgagggcagttctgattttagaatatcatccctacaaacgctattactccaccatgaagacagaaagtgagaaatggctttttacccgccaaagtggaaaatctggagaagtaaaagcctagaagtatccccatctcgttccttatgggagatagcctgtgttgattgaaattggtcaatattctatctgtcggcttgaaatttcaggaaattgccagtggtgtgaatgggctgtggcaaaggtcttacacaagacatttctcttggttttgtttgagtgatgcttggttgcagtcactcttcagtgattggtcttgctcgccaagcaaatgctgggtcaaatgttgcttggtccctggaccccactgaggaatgctgtgtgcatgaggaggggccccccaaggcaagaccagagccacacagtctattcccaattgcttctttcaaatacctatggctgctttaaatgagaagccactccatggaccttgtttctctgagcctcagttttttcttcccaaaaatgggagtaaaatctactaccctgcccaacccatgggtccagtggagattaaagtgcttgtgcaaacagaatgcctgaggcttctgtggctccagggagcacagttcccagtaaaatcggagtaacaacagcccaggccacatcccgcttgcccatgggcagtctttcagggggtctgttcctgggg

SEQ ID NO: 59905 - DNA, 1143 bp, Bovine  19866881222698
  misc_feature (1)..(1): n is a, c, g, or t
nattcacccttcttcccttggggtttgtaagttgtctctagaatcatttataagatttacgtgacccttgaacaagtcactcagtctttagggacctgtttcatagtctgtaagataaagggttggcattagttattttctagggccctgatggttaaacaaaatcttttgaattcttaacgttgtttaatttccaaaggaaaatgcattttaatgtctttgtttcttactgtaattattctcacttgagttcatgagtgcggactaccctattgttaattttgtacagagtcctgtaaactgaattgacattggattacttccaggaaaaaaagaatcactttgtacaaataggcttaattaaaaatcagattaaaaatgatctctttctagtgagcccaaaataacctgtcataactttttttttttttttaaagacaagataaggagaagaaaagattttggagttgattgtacacagagatattcagtgagagtgaaccatgtttaaaatcccttccacctaatgttaaataaagccttgaggttttcattattattttatccctcatttctcctgtgacctaggagttagagcataaagttctggatggcaatatagatgaactataagctccctgaaggaagatgttgagtcttagttttcatgcatgtccagcctttaggctagtgcctttcctgacgtaggtatttaagaaaatttgttgaatacatgtttgactgtatctcacaatggtgctttcccaaatgtctgtttagaaacacattgatgatcatgaactgccgtttgattgtcctctcagtatacagaatgccagtctcttcatagtgttctgttttcgctaactttaagagcagcagaagcagttgaggtaagagagaagccatgtgggaaagagctggttgataataggatgaaaagaggtccaggctactctgccagggtgaccagttcatcttctgcaaacaggattactgccaacaccaggggactcaaagatgtcagttctccttcctgcccttgggagaagttgcaagctcccggggctttgcagttctactgttaccacaggaaactttaccctttccccctcagcagatcaggtgggcggatctgaggtt

SEQ ID NO: 59906 - DNA, 1430 bp, Bovine  19866881393425
  misc_feature (1)..(1): n is a, c, g, or t
ntgtggtcagagggaagggcatttgctgtccagggggagcatccagccatgatatgcctgtcagttaacacagggccgtagccatctggctcataaaccctgaaattgctgaagattttacaaacctcagacagcagtcttcagaaggggtcgtggatgttttaggatccctggggtcattattagtacatattcttgggtaggagaggatgcagggaaacttcagcattaaatatttaatgagcacactggcagcctttggaaaacactaatgatctaggattctgtataatgatcttgggtggaacctgggtatctgtgactgaaatgtgcagccagggtttaaaaccacagctccggaaatgatacaggcggggcctggattaagattagagtttgacagtacagggagaagaacagtgggctgaaatttattctattccaaatatgataaggagacttgagaaaggaaagaaatgggacaagctcctttaagctctgagcctccggggctaataagattagaggttggttgtggggagaaccgttccttgcctgatatggataaattcatttgaaagtgaggcaaagaacaggtttagtcaacccattagcatgatacttactttggcaggaaagtaaatatgttgctttataagtccttgtatgtcctcttcccaggggctaagggtccaggacttcagcttggctaaggggcagcaatgagacttcactctaatgagacaaatgatcatcaaaaaccacctgataggcaagtggtaaataagtaataaaatttgacaacctggcaggcccaccccaccacaccctccactgtgaaaataatattctctttaaaaggaagaaactatgcagaaaagtgaaaaagaaaataagtagacgtcattcacagtcccacattcagaaataacctctataaatttttatggacatgtgttgctaggaaataataattttctataaagggatccaacctgctttttttttttttccatctcacattgtgctgtggatctcttgccacatcaataaatacaggcctaaatcagttttaaaggctgaatagtatttcactacatggaggagtcattttttaatccgtctttgttgatgggcatttaggtcatttctcattcagagctattaacaatgagatgaagcatcctgtgcacaagcctttgagataggcatccagctgtggggatctggggcttttatcactcagttgcctcgctgggaagcaggatgacaaagccgatgtctcccattgcactgctcacagcttattgggttataattcatctcttatttgcttttgggttgccttatccctctcctcccacagagtctcgtaacgggctctttggtgaggggtagagtacactgtactcactcagtccctcccattt

SEQ ID NO: 59907 - DNA, 1359 bp, Bovine  19866881651245
  misc_feature (1)..(1): n is a, c, g, or t
nactcaaagaaaaggaggctttctcaaacaaagcagagctgtctagatggaaagtcactgtctagctgttttctagctccagtctatcacatccagatagaatactactaataatcaggcactagatctgaaataactagctggacactagaatcagtgcgtactgactagctaggatcatatagctatccacagtcatgactattgttttaaaaaggaattgggtcttagacatatctgttgggttgccccaaatgttcgtttgggtgtttttttccgtaagatgttatggaaaacccaaatgaatatttgggccaagccaatattattgcctgtcctgcccacacccgcactgaatgaacagagacaaattctgtcatgtaattcttcttcatacaaccaactggttagacccccaagtcaatggcatacagtcataaatgaagtcataaacgaaccagagaagtaagttctagggccaaggggcgtgagacagctcaaggcctttaaggctgcaacctgggctggcctctggaaataggttacattcgtgctgaagttatgaggggtgtgggcccctggtgagagtgaactgcatgcaatttaaatactaccttgagaagcaaatcaaagtcttagctttaaagttctccaactcacagatctaccaacctaaagcagcccttagtctttccacagtcatccactttgattttggcaaatggatccacaggaggagcagtagggaaagggtaacctggccagtgagaagaaataaagttagaaaatccaggaacagcgtttccaatgagaaaagctactttttagtaggttgactattctctatcgcatgagtctagaaatggtcaaagcctcagaaaagagctcagttgatgcctaatcaccctcttcatgagggcaggtgtggggcacacatctttgaacccagcctatgtgttaactgagaaagggctttctcctcacttacaggtagggtgcctggggtactgaaagaagacataatatcataagcactggctcaccagtgtccattgaaagcatgaaaagagagttttattccatacacctgctctaagagaaagaatgaacaattctctcttcgatagcagaggctttccatttacagctatatattacaataggatctctctgtttctgtgaacttgtttttcatcaagctgtagaggacattttcatatctcatagaaatttgttaatcccatcatttcatgcatctttcttgtaagatgacttaacgtcataatgctttcaaccacaagtcaaaggagagcctacactgcgtttccagtttgtgcccacaaatatttttattctagg

SEQ ID NO: 59908 - DNA, 1026 bp, Bovine  19866881809071
  misc_feature (1)..(1): n is a, c, g, or t
ncttgctagttgaaggactttacatcacaatcaacccttttcagaatagtatgttcaattaacaaataaatatttgttgcttatgcagtgtttactatgcactgggtattattctagctactggggacacagcaataaacaaacattacaaatcacatttctgctgctaatctagactagatatcaaaatttagcatttcaagtttgacgaagataacgatacatgtaaaatggtttaatgttccttaaacagagcacagcagaagttatgggacagttgttacctgatggtatgaagacaatattgatgccaaatatagtatgagtcagccaggtatacaatccatagaagccggccattttgagggaagcatcaaacacccctctagaatgtccaaagacaaagtggaatcaaaataaacacagtatcatactgggactcagaaaaatcaattatttctaggcttctagattttattccaaatctgataacagcttccatttttccagtggcctgagaatgctgttttcattttatttcaataaaatatacaaatcttctatttaaaccttgcaatagatttactaaactgttctttaaatttcactaataaaaagataacagaaaaaccttaagataccctattcactgaaataactcatcagcttttcacttctgaagcagattactcaccaccaaaataaagagaaagaaaaaaaagtgtgattatcttatttctgaggaggtaattaaattctgagacatccaggctgtgaccagccctccccttgggaggagcaagtgagggataatataactggtacttcatcagtctttcttcttttgttaacaaaatgtttccacatttcttaaaccatgcaacccaacttacaaggtaacgtctaaaaatggtatcaaacaatgtaggtcacttggagagaatttacagaatataaatcttattaattccaaagtaacacctgagattaaaatataagaggtgtaaaaacaggcacacatattca

SEQ ID NO: 59909 - DNA, 1123 bp, Bovine  19866881866198
  misc_feature (1)..(1): n is a, c, g, or t
nattgtgtggactgcagaagaaaagttgaaaacctggagactaagagaaagaagaccaatcccaggcacataatccattaggctgactccaaacagctagcacaagcctgctcaatgaagatgtgttgattgaatgaatttaagtgccattctgaaggaagaattatttttccagccaactatcattgagggtagtactgaagaaaaaagtaggtgaacaggatcttaaagttggggctcaagagtgatcagagggacccgaggcttccctactgcggtgggtgaaggggatggagggtcttctgagaaactctggaagtctagtgtaggctagagtgatgtctagggtggaggaacagcccagataggaggtataatgttcctatgttcatcaacttgggtaaggaatgggagctttccaggccagatcttccaaataattaattaatagtttgttgttgtttagttgctaagtcatgtcctactcttagtgaccccatggactgcagcacatcaggcttccctgtccttcactatctcctagagtttgctcaaactcatgtctgagtcagagatgccatccaaacatctcatcctgtcacctccttatcctcctgcttaaatcttttccagcattagggtctttcccaatgagttgactctctgcagcagtggccaaagcattggagcttcagcatcagtactttcagtgagtattcaggattgatttcctttaggattgactagtttgatctccacgtagtccaagggactctcaagagtcttctccagcaccatagtttgaaagcatcaattctttggtgactcagccttctttatggtccaactctcacatccatacatgactattggaaaaaccatagctttgactatatggacctttgtcagcaaagtgatgttggtaattaataatttaatgtataattaaattaatataactataaattataatttaaaaataatttaattaataattaaattgatattgttaattaattccaaattgttaactccctcttacaaagagcaaagctaggcactggggttagaaaaaatgatccatgagtaaagaagactattcctataaggatttttaaaagtg

SEQ ID NO: 59910 - DNA, 1374 bp, Bovine  19866881876658
  misc_feature (1)..(1): n is a, c, g, or t
ngctggatggcatcctgattcgatggacatgagtttgagtgaactccaggagttagtgatagacagggaggcctggtgtgctgtgattcatggggtcacaaagagtcagacacgactgagcgactgaactgaactgaaccacaaggttttcacaggtgtatgaagagttaatttttaattagatttaattttttggagtgatatactggaatacaagaattgaactggttctaaagcccattcgaggtttttgacgattgcttaagggggtatagctatactgacactaatgaccaaagacccactttgaaaagaaaacagaatggtgctaaaataagaaatcagtgggaatttagcattgatttccccccttgaatttagcaattctgtactgctttttggatagaaaattcaagctggcttgctgcttctaagtcacttcagtcgtatccgactctgtgtgaccccatagacggcagcccaccaggctcccccgtccctgggattctccaggcaagaacactggagtgggttgccatttccttctccaatgcataaaagtgaaaagtgaaagtgaagtggctcagttgtgtctgactctttgtgaccccatggactgtagcctaccaggctcctccgcccatgggattttccaggcaagagtactggagtggggtgccatccaccttctccttgtgtgtgttactgaattcaatttgatagtatttggtagaattttgcacatatattcataaaagacattagtctgtagttttcttgaatgcctttttacattagagtgaaactggtatcatggaaggagttagaaaatgttatctttaatttttgaaatactttgtgaagaactggtgttcattcttctttaaatgtccagtaaaagtcaccatcaaatccatctgattctggacttctctttgtcagaagttttcagatttctgtttcaatctctagttatcctatggctattcagattttctgtttcttctagaaccatgttcagaagtttgtgtcttaggatttgtccacgtcatctaggttatctaattggttggcacgtgattatttattgttttattattctgtcatattcctttttattgatgtagagtggtagtgatatcctttcttttattcctgattttaagaagttgagtttttgctgttgttgattgtggcttggtgagtctagctcaaatttttttcaatatcgttaatcattacaaagacatagtttcaggtttgttgattttctccattgctttctagtctctatttcatggttattcctttccttttgtttgctttggttacttccttttgctcttcttttttctatttcctaaaatggaggtt

SEQ ID NO: 59911 - DNA, 1133 bp, Bovine  19866880934169
  misc_feature (1)..(1): n is a, c, g, or t
ncagaatcaggcataactgaagcaactgagcacatatgtacatgcagcatacttgactgctgtaccatgtttgagtttgagcatagtcttgctgcaaaagagtcatgttcaacacatttcaaatttgaacagagtttgatgacaaagttttaaaatgaataagcatgtatcaaatcaagtattttggagaaattatgtcaattatttacactttgggtatgagaggaaaatgcacatttaaggtactctttttcctctataacatacatttttacttactttttacatgccatgccaagttgcttctgttatgtccgactctttgtgatcccatggactgagcccgccaggcttctctgtccatggaattctccaggcaagaatactggagtgtgtggccatgtcctcctccaacttcttacataattgtatgtgtttacttatttacttttcccttttaaaaagtaggaaaatctgtacttatttaatgtaacaaaatattgttaaaggaacaaaaaggatcaggcagatagaatattgtaaaaatccactgattttaagaattaaagactataaagagcttgcattatattcttcatagttagtgacattggcaaatttttactgctataacaataagcaaaggacactcacatccacataccctctgatcagggttctcaagtgaaaaatataacactgtatggcaatcaaaattgctgtctaataatattcatatctaatcatctaaacaagctccaagagatggacattctaacagggaaaatgatacacagagataaaatgcaggccaatgtaaagggcagctatttagaaggagagcataaacttattccttcactggcagctctgaagatcctgagtgcaaatccattcttccctgttaattgctttgtgggagatgttgtcaattatcactactttttaccccttggaaaatataaataaatttgtcaaaacatatcttcccatagttattcaaaaagttgctatccaacatagaattttgcataatttatctcatttaatatcctggtatggcatattggcttctttcagcttaaggagttcatagtcacaaatgaatccattgctattgaggtcaactactg

SEQ ID NO: 59912 - DNA, 2020 bp, Bovine  19866881652553
  misc_feature (1)..(1): n is a, c, g, or t
nataacatgtgtgcttcctgtatataagggagagacctaggaaaactgagtaactcccctaaatgactcaatccatttatataccatcagccttaaataccatctgcagtaaagaaaaaaaaaggagctgggtagagggcatgggtatgggaggggaatagttgtgaaaggtggtcaggaaaagcacagtaaagggtaaggttgtatgcaaatttaagtccttgccttctccactgataattttctaaaaatttagagttatcattttcctatacagagaaagacagccttacaaatggagatgtcccatataaatgtaaatttctcttacacaagagtaacttctactcagttttcagagcttctcctgtgtctgctgtttcttaaaaataaccagtttaaaataatccttgtcttccctcgtgtctcagatggtaaaaagtctgcccgcagtgtgggagacccaggttcaatccctgtgtgaggaaggtcccctggaagaggaaatggcaacccactccagtattcttgcctggaaaatcccatggacggaggagcctgggacagtccatggggtcccaaagagttggacatgactgagcgacttcacttatgcaaaagaaacatattttcaggtggcaaattctactccccttcaggccccaattcctatgttcacttcagtcgcaagccaatcttaatagttcatggtatggatattgatgtgctaatggcaaagtatttgcaaactatctatccttaaagttaccccccacccatgtacacatatacacacaaaatgatggttcatctaaaacacagctaaactgtcatcagttcctatttgcaaaaaagcaatttctaaagtgacattagtatgcattcaagttttcagatggattaaaaataacagatttttttttctctgtaattttaggtctttactggcactcatgtactgcaaatcactgatttaagtgggcacaaagatgataataaaggggaaaaaactcgagaaatctttcctaatctgtcactgattaaaacagaaagcaccatttttgaaaagtagataaagtatctaggtaaaattgcatttacttaccctcatcttgaccctatagttctttcaataattattattttgttttaaaaaaagttctgtggtgttatggatcaacagccatgagtaggagtccattttttttttcaaattaatagactgtaacttataatgagcaatgatagaccaacaagaaattcaattccagtataattattgcttatggaatttaaaaaatgtttcactgagtaagaatataaaatttcactttccaagccccaaatgaatcattataggatttacatggtggccaggaaagaaagtaacccaacaggaatttcaagaacctcaacctcttcttattaaatgtgattaactgtcaattttctgctctggatgaggcccataataaaatacatacaataaaagccacatggaacatctgatgtatagacaaaaatttttccttcctccatgtctatttagtaaggagatgaggtgtgatgtcaaatgactcactaaattccaaattttctaccaatttgaaacttgctaccttcaacttttgtcatttccagcaagatgcaggacaactggctatctggtaaaatggtgaatggctggtgtattaaggactccagaatatttggttatattaacatgggcttgatataatggaaaaggtctggaatgttaaagcttaaattgaaagtgtgttaaattaattaaacaaggaggctgttaagctgaggtggctctaatagaggccttggcggcctctacaagcaaaccaaaatataagcctgtaaaggtcccaagttcacaaaatcaaaatactaagaacaaccaatcacagccagccagctaagctgtaagctacagccaatcaacaatttcctttctttgctttctcaatctctccagataagtctttcccctggttcctgtcagtccaca

SEQ ID NO: 59913 - DNA, 1331 bp, Bovine  19866880695502
  misc_feature (1)..(1): n is a, c, g, or t
nttaaactgcttgatcatgttctgatggttttaatggcttccttcaagatcatttcaggttggtccattttccaccgccattcagtacccactggattggtgtggtgcctaggaaaaagagaggcaaaagttctttagaactctgttaactctcagctagtcatccactatgagggagtccatataattataaaatccaggttggttttctcctaaaagctcagctatctacagctatatttcacaacttattttgagtcatgacatctaggacagaaagacagatggacaagggaaatgcttggccaagactgaagcttaatcagaacaatacaacacgtacccctctctcccagccacacaccaccaggctaacaagcatccagcaatgaccaccagtacaatactgtttcaagactctctccgagaggcaatgggaagacctaaagcttaggatggatcagacacggagggaaaaacctccagcaaaccccaggcaacactcaaggtatctctaaaggacaccagaaaggaaagggatgccaatttccacacgcaaagaacattcatctcagtctctcacaatgttggacttcggaaaaaaaaaaaaaataagaggcatataaaaaagcaagaaaacaatacatttccaagagacaaagcaatcaataggaccaaactcttctgacacaagggggtgaaagtatctgacaggttatgtttttagaactctgattactgtacgttacaagtcctaatagaaagaggtaaacaacacgcaagaccaaatgggtaaattcagcacggggaggaaagctataatcaaacagaaaccactaaacacgaaaaaaataggacttctacaggctcaacagtaaactacaacagctacggaaagaggtaaaaaaaaaaaacttggagagaacaaattaagccaactaaaacacacataaaaatttaagtggggaaaaaaaaagacacagcatccaagagctgtgggacaattatcaaaaggtccaaaatacacataattggaatcccagagccaaaatacagtaattaaaatcccagaagggaaacacaaaataaagtagagaaagatgtcggaaaaatacggccaacaatttcccaaagttaatgagaaacaattaaccacagatccaagaagcttgcagaacaaccagaatatttaaagacagtgtaaaaatacagtatctaagctaatgaaaacaaaagaaaatcagaaaatcttcaagtaagagaaaaagggcacattacttaaggacacagattggtatttttcgacaactcatcggaaaacagcaagccag

SEQ ID NO: 59914 - DNA, 4216 bp, Bovine  19866881006136
  misc_feature (1)..(1): n is a, c, g, or t
nccaaagaaataggaatactctgtgttgtaccttatgtcctttttctgggttattcagcttattggtatgaccttaggataaaaattctggaatcttaagtttctgcgtcagcatctttcagtggcataaagtgcatgcatgcgtgctcagtcgcttcagtcatgtccaattctttatgaccccatggactgcagccagccaggctcctctgtccatggggattttccaggcaagaataccggagtgggttgccatgccctcctccaggggatctttcccgatccagggatcgaaccttcgtctcttatgtttcctgcattggccagcagttctttaccactagcatcacatggaagcccaaggtctttacctccagtctagaggctgaattagagacgttgtgtttgggggcaagtaaaccatttgggtgcctgtggtgttgaactcatggggtctggattggccgttgtccaatatggggcattgtccaatatcaaaagaactttaaaagactgtcccttaccagcaaggtacttcctgacttcctgacttcagggacagagcatccatggaaccaatccagaaaaagtcttcccattgtccacaccttctttttgtacaaccagaagactggcagctggtgtttattttatccgttcaaggctcaggggttaacaactttacagagaagagcagtcgtaatcataaatctgactgcatttgcctagcaccatggcattaacctgcccattcctgccttaaattctggtgctggcttctcttccttactaataaaatgtcctttgaagccttctttgcaccccagcatagggcacttttgactacattaaaaacctgttcaggcaggtatcctttcttcttaatgattttctttgctgagaattcctttgctgcctcttggttggcagaagctgctcctcctgttatcttgacattttaaaagtcagacctctttttaaaatcatcaaaccatcctttgctggcattccattctccaactttagatccttcaccttcctcttgctctaagttgtcatataatgacttcaccttttgaatcatattcgtctataggtatgtctttcttataacaatcctgccccacacataaaagctgcattttcaatacgagataaaaagacattttacaaaaagctcaaggttttcacacctgctgtagctgcagcgaccgcttcatgaatttcctttcctttttcttttttttacaatggtccttccactggactcatttgtcttgaagtggcgggcaaccgcagctgcagacttgactcttggtgcatatcaagccatttatcctttgtcacttttctctgcttcttgggagcatcacgtatcatatgggtccgtgctgttattcagggtttacggtattgcactaaacatgatgaaaactgtgagagaacttcaaacctgtactgcagtgaaactgactagagagatggctgctcacgtgatgatgaccctcacctggagtttcagacagatacttgcagcactcctgctcagtgccctagcaacaggaggtgctgggaaatgtgtacagtgttacagtctatactgatctttacctttgtttacatttctgtcaactgggagtggtgctatacaaggtctgtttgtgtgagtacattttgatacattttaacttaaaaaaaatacatgtatattttatgatagtaaatgatagaggagtatctacatgttttttatgcattcaggatacacctaagttttaaatttttttggatattactgtgttatggggtgcatctgtgagacttttcaaattgtcacaaatcttcaagaacttttatataaatagaaatttccaaaaattatatatatatgtatataaaagaactatatgtgtgtgtgtagaaaaaaccacatacacgtcgacctgcactcttccaaaccttgttgttcaaagatcaactgtatgttgaattgaatggaattaccgttttatttaaaatagaaaataattgaatttatagaacaattcatgaaataattatcataacgaaatatttgcagctaagattaaaaaaaatgcttatgtgctgggcttggtaccaaactagttatttcatgtggcttatttcactgaattctcacaactgtgtgcgcatgtgtgtgtgtgtgtgaattccccacgttatacatcagggcataggtgtagaggggatgggtggcttgactcaggacacagatcaccctagtggtagagccagagtttgaacctggggcatctgacttccagtgcatctgactgccttgccagtactcagtcattcttctttctgagttttaggttaattttaccacttcagattaaatctgcccttcagctcttctgctcatggggagattaatgatgtttcttttttttacaaaaagaaaattttatacttaatgctgagttgtcttggcaacacagagtgagttaagtatcaagttttatttaaaaccttgattcacttaagattttagatttcagtaacttaaaaaattatccatctccaatactgacatgaaatacattcttagaattgcagttagatagtcataaaagaagataaaacctgccacttttagattgttctgattttagcctgtattatgttgattttgatggcttgggtgtttacttgcacttgcttatttccaagtagattgtgtgtgagtgtatgtgtaaaataaagtcacctcgtggaaactaaagcacaagcaagcagtgaaaggtaactttattttctccagatttgtcttccttaaggcgatagttactgggatttaattattttaagaaaccaggataaaggtgatgataaaaacacgtccttaatgaatgttttgtgtgtgtactaggccgtctgctaaagcctttccaggcattatctcatttaattctaacaaacattctttggggtaaatactgcttatagtgaagaaaatacatttcatgagtgactaagaaatgactgagaaggtgtatgaatatgcttctcctcatttctaatcttggtgaagaggaatattatactctttagaaagaatgtatttttcaaaaagtacctagagaaagtagcatggatgcgtatacagtaacatatgtaaatagatagccaatgggaatttgctgtatgattcagggaactcaaattggggctctgtaataacctagaggtgtgggaatgggctggagctgggagggagattcaagagggaggggacacatgtatacctatagttaactcccttggactgcaaggagatcaaaccagtcaatcctaaaggaaatcagttctgaatatttattggaaggactgatgctgaggctgaagctccagtactttggccacctgatgcgaagaaccagttcattagaaaagactgtgactctgggaaagattgaaggcaggaggagagggggacagcagaggatgagatggttggatggcatcactgactcaacagacgtgagtctgagcaagttctgggagatggtgaaggacagggaagtgctgctgctgctgctaagtcacttcagtcgtgtccgactctgtgtgaccccatagacggcagccacaggctcccccgtccctgggattctccaggcaagatcactggagtgggttgccatttccttctccaatgcatgaaagtgaaaagtgaaagtgaagtcgctcagtcatgtccgactcttatcgaccccatggactgcagcctaccaggctcctccgtccataggattttccaggcaagagtactggagtggggtgccattgccttctctgagggaagtgctacagtccatgaggtctcagagagtcaaacgtgattgagtgattaattcatgatgtatgacagaaatcaaaccaatattgtaaaccaatcgtcaatcaattaaaaataaataaatattaaaaaaataaagacctggagagagcaccaaatcctgaccactagaccaccagggagacattaccatatgtaaaacagatatccagtgggaatttgctgtgtgatgcagggagctcaaatccagtgttctgtgacaacctagagggctggggtggagtgggaggtgagagggaagttcaagagggaggaggcatatttatacctgtggctgattcatgttgctgtaggcagaaaccaacacagtat

SEQ ID NO: 59915 - DNA, 1654 bp, Bovine  19866881149808
  misc_feature (1)..(1): n is a, c, g, or t
nttcccacgaactcctcagattctgttagtttgttagagtggctcgcagaacagagaagcatctacttatgtttaccagtttggtataaaggatattatagagaccacaggtgaacagccagatggagaagtatagggtcggtctggaagggtcctgaggccaggagcttctgtccccatggaactggggtgcaccaccctcctagcacatggatacatccaccaacccagaagcacatcaaatcttgttcaagggtttttatagagcttattttgtcagttccctttccctttctcaccggtccatgggtgtgattgaaaattctaatcctttgaacacttggtctttatggtgaccagccccatcctgaggccatttaggagtcctaccctatgccaccccatttgcataaatgtacttaggtgtacttaaaagggctccttatttattttttggctgtgctgcctggcatatgggatgttagttccctgagtccccagcagttgaagcatggagtcttaaccgctggaccaatagggaagtccggaaagggatctttatgaatgacaaaaggtactcccaccactcaggaaatcccaggggttataggagctttgtgccaggaaccagagcaaagaccaaatctatttcttattttttaccatggtgtttcttactactattctgacttcctaggagaaattgggaaagtaatgcaaataatgattcaagagcaataataatttataaaggtatttttataaaagtaatttataaatttatattatctttatgagttttctaaggaaaattgccctatacatatatatgtacatatgtatgtgccaacttgtacatctgcagagatgctaataaatattttaacatttcatcttggtttttagtctcaagaattttttttttttggaaacaagtcattttcttatttggaaaaagcagtgtctcttaccagccttttggaaaattaaatgaaactgtgtagtaaaaaactagtaagtctccacatcaggaatttactagcttttcttagactctttgttgatttcgttaatattattgatcatgaccctcaaataaaccatatgccttttaagtatatttcaaggcaaagtcttactttcttttggatacttagttactagtcagaattctccagagaaagagtcatcaggatgctgtgtgggtgtgtttagaggaagaaagagagagagagattgatagagtgagattggcttaaagaattggatcatggaattgtacaggcttggtcaatcaaaaagataaaaataatctgatggagtggaccagcatgctagagatttaaggaagaattgcagttcaaatccagaggctgtctgcttgcagaattccttcttgcttgagggctgtcagcctttgttctttgaggctttcagttgatttgatgaggctcatctgcactataaagggcagtctgctttacccaaagtccactgacctaaatgttaatttcatccggaagacatcttcaccatccaacatccagaataacatttgaccaaactgggcaccatggcccagccaagttgacacgtaaaattagccatcctagacagtcatatcagaagcaggcaaacaccagtaatttaacct

SEQ ID NO: 59916 - DNA, 2172 bp, Bovine  19866880283949
  misc_feature (1)..(1): n is a, c, g, or t
ntgacttttaatttcgattttaacttgttttaatgactatgttgcctgcatctgtaactgtataactggatttgtttctagccgcatgaaagcttttaagttacaaatgattgttcaaactcctgctactgctgtagcttcctccaactactatttgggcccctggatcagatatcctcaatatgaggattaggagaatatgttgcctcaccaatttagggacaacacctcttgtcagctgggaagcagttatggaacgagaacgatgccccttttccctaggcaacataattctcctaaaagaaaaggggggaatgagagagtcatttcctaggcaggttgatagggagtctaggggttcccaaagagagaggggtctggaattctcaaggtggaagaaaatacaaactttttttctttctccacattccttaggataatataacaataatgtatcctgcctaaggacagtctttggattaaaccttctgttatcttaaaatgttaattatgggagtagacctggtctttacaaggatgtatcttgcctgaggacagtgttatcttaaaatgtaaattatgggaagtaggtctgatgacattctgatgtctgatgacattacaacctcatttgtaatgtcatttttttggattatataacctcattgttaacactagcaagcgggtactctttctgcccccttctggtgcctatgtcagaagctttctctatctcctttatactttaataaaactttattacacaaaagctctgagtgatcaagcctcatctctggccctggattgaattcttctcctccgggggccaagaatcccggtgtattcgcgtgattcaacaacaaacctttcagttccctggattctcttccctttctacttcatacattcttctcagctccaatgctcaggcctgaaggctcaccactgatgctcactatgacttacatcttggcatctccttctcttggcttgtttctaaatcttgactcttcctgagctgtgacattgcatttctgccattgacctacctatgctttcccaaatgtctgacttggatctcacccagttttcaatgtcagtcttctcacaattcagtggtaacccattctgtattgtgatattatcacccagaccactgctccatttgctagtatggactaccatggcctacatctaaatataatgtaccgatgatttcaatattttgcaattaacattgtaaattatatgagggtgggctgtgggctcatgactttaatggaaaagactttctgcatgtcttttccagaatttaggaatcagacttttttttttttttctccaagtgctggatattggcttcacattcctgtagaaattcattctaaatcatgaaaatcactgataaaggggagaggcctttattgcttgtaccaggccagactgtcctcatctttccttgattactatctagcattgtagattcaataatattaggcctataaagtgttctgcaaattttggatcagtacatcagtgggtgctttattgttatagctgacataccatagagtccagtatgatgactctcttttctcaggagcttccacttatttttttaagtcatcacaaatgcatttgatccccttcttactgtcatgtacaaaatagagtaacttcatcttgtaaacctttttgtttcatctgatactttaaaatacacaagccaagtaccatttttcatttttaaaaataggaaatcactagaaattgccaatgatatgtacagttaattgaattgctggaatgaactgaaacaatattactaataagcaactaaatgacacatggttaaaatgaactcatcacatgcagactataattataaggtatgaaaaatcatatgcagaggttatcctcactggaaagcaaataactgtctcattcagagctgatttgctaaaatattatctggaaaaccaataaatattcattattcatattaaaaaattctgtcagccgcagattacttctttcaaggtcacctatactgaaaagcacaaagaggaagcaagggaaacacttatccatgttcctgttaaaccacacaatttttgacctctagcaaatttcggattctgctctgttgcatttggaaaatggaatttgggg

SEQ ID NO: 59917 - DNA, 823 bp, Bovine  19866880589027
  misc_feature (1)..(1): n is a, c, g, or t
ncacactaagaggtagagagtttatcacctgtctattcctgagattctaacaagaagcttttcagaagatcaaaatggaaggaacacaggattgtgatggcagggcaatgctcaggtatgcatccacagagagtactttctgggtttgtttaaagaaaatgaaactgtgtgcttccagtgctcctgagactgtggtggggattgtggcttcaaagaacagtgatcacagctccatggttaccacgatgcaggaaccagtgagcctgagaagaaagcaactacctttgtgtgaagaaaaacaaacaatcctggcaacaaatattgttaaccttgggattggattttttaattatatggtataatctgttccagtggaaccctttataaatagaacagcatttaatatgttaatttatattttaaattaaatttttataaatatgtatgtaaatctattataaattactttatatttttaaattaaaatatattaacatgctaatacactctataggagagtagaggtatgactccgcatgaggaacattacaaattagttgactaccatagatttttccatagacaatttagatttaattgttgataattattaataacaaataattattgataacctaatgtatatgataagccattttttattattgcatttgccttgttcatggttctcagtttcctacaatgtacatttcctcaccatgacctcatttcctaacccattttttctgagcctctaaaacccccagctacttcaatgattaacttagtatagtgtattcatatttgttcattttacaggtca

SEQ ID NO: 59918 - DNA, 930 bp, Bovine  19866880635706
  misc_feature (1)..(1): n is a, c, g, or t
naaaagttgttagtgtgtatgtgtatttgtgtgtatgcgtgtgtgtctctgcgtgtatacatgacatatccaaccaaaagaatagagagagaaacctgtactatgctgaaaaaggttttgaacattttgaaatgaagcagcagagctaattatctgtctgggaaaggtacgtatttaggttttgagctatttaggtcaaaagtaacagagaaattgctgatacaattattcctagtaacactctcataaatgcctgtgtgcattcacacatgcataaatcccctcacatggatatgttcctgggaatggctgtctaaataaatcctcaaagtaccttttgttcagtgatatggcagtggaggtaaggaaaggatgcatagaatgattgaggcaaagttagatgagatcaaatgtttcgtcttccatgagaaagattaaggtcacaatcatcacaaatcaatgataaaccttcccattccatcacaccctggtccaccctctaccacttctgccttaaattcttactgattttgcacaaactgttccatttgaatttattctcacttattttttgactgacattctagaagaaagcctagaatatgaaatgcatgaggacactgaatggatttaggagactgaccactatgatgtgaaaactgccacctaatcatttgcttgatttcattcatgtttctagatatcaactgctccagacagtacactaaagttcctttattttgttttgcaaagacagtatgtctagagtttatcaactcaaaatactcagaaaaatgtgaaataaatataaaaaacatttttgattaaatagcaaactgatcagaattaaatgccagaatcagagtcacatgtactagttggatcctttcggctctattctcaagggtcatataactgtcataactgctt

SEQ ID NO: 59919 - DNA, 1354 bp, Bovine  19866880740892
  misc_feature (1)..(1): n is a, c, g, or t
naaccaaagaaggaggaaagagaaagcctaaaaccagaagtgagaccccagaaataagaaatgcacatgaaaatagggtagactcttgcctcagactgagcatttaaatgctggttagggaagtaagaaccaactccaatacaggaatacttggcttgaagtgaaagttatgtgggctgaagaaggcagagtctttttgcagtgagactctagcgctcaagatagactaggcctgacacatctaatgttataaaaatacaaataagtttcataacactgaatttaaacaagtacacttttctcacacaatgaaggtgatgttgccagatctaattgttggttagtttttctattataaaataattaaataaataaagcactacttaaatcaatggaggttattttcctggaagtgtgtataaaatatgtgtaaacttctccaaacaagttattggcttatgaacaggctggacatgtgctctggaatcactgagttgtggtttctgtcctcagctccatcatttagcacctctccttaggctactgatcccaaagactatttccttaagagataaatagtagtactggccccatggaattattatcaggttaacttaaaatgctatactgaagcatttaccacagagtctgacatataataagcttccctgggagctcagctggtaaaacatctgcctgcaatgcaggagactccagttcgatttctgggccaggaagttcccctggagaagggacaggctatccactccaatattcttgggcttccctcatggttcagagagtaaagaatcctcctgcaatgtgggagacacgggttcaatccttgtgttggaagatcccctggaggagggcatggcaacccattccaatactcttgcctggagaatccccatggacagacagcctgacaggatatctctatggggttgtaaagagtcagacacagatgagcgactaagcacagcactgacatataatatgcagtcaataattttaactttgcaattccttgttttaagtccagtcctccagaattttgtttatgggatcatcatttgcagtgttagcctacatctctaaaaagtgtatggtaccacatatcctcaacaaaacttcacacaaagtcaaaacagaatcttacatttaactcaaaataatctagcctttttcttcaatactttgctttgattttttaaagtacctgttgatcaagactgacaaagaaaggtacaaaacaggaactttaaaactgctttgacaacactgttcaacagagattgttacttgtcttgctgttttcttgaaaatccatcagcattaagttttctatctc

SEQ ID NO: 59920 - DNA, 1954 bp, Bovine  19866880860047
  misc_feature (1)..(1): n is a, c, g, or t
ntcagatatgcagatgaccccccccccttatggcagaaagtgaagaagaactaaagagccttttgatgaaagtgaaagaggacagtgaaaaagttggcttaaagatcaacattcagaaaactaagatcatggcatccggtcccatcacttcatggcaaatagatagggaaacagtggaaacagtgtcagactttatttttgggggctccaagatcactgcagatggtgatttcagccatgaaattagagatgcatattccttggaaggaaagttatgaccaatctagataacacattaaaaagcagagacatttcctgctgataaatgtccgtctagtcaaggctatggtttttccagtagtcatatatggatgtgagagttggattataaagaaagctgagtgctggagaattgatgcttttgaactgtggtgttggagaagactcttgagagtctcttggactgcaaggagatccaatcagtccatccgaaaggaaatcagtcctgtgtgttcattggaaggactgatgttgaagctgagactccaatactttggccacctcatgagaagagctgactcatttgaaaagaccctgatgctggggaagattaagggcaggaggaaaaggggaggacagaggatgagatggttagatggcatcatcgactcgatggacatgagtttgggtaaactctgggcgttggtgatggacagggaggcctggcgtgctgtggtttatagggtcgcacagagtcagacacaactgagcgactgaactgaactgaacagtgcagccctatgttcatcgcagcattatttacaatagctgatatgaaagcaacctaaatgcccatcaacggatgaatggataaagataatatggtatataatacaatgaaatactattcagccataaaaagatgaaatttttccttttgtgacaacatgaatggactttgaaagtattatgctaagtgaaacgaagtcaggtgaagaaggatgaatactatatttcactcatatgctgaatattaaaaaagtaaacaaattgaactgagagaaaacaaatacacagatatagagaatagagtagtgattacaagaggagaaacgggtaggggagggtgattgggtaaacagcctcaatgatatagtggtggatggaacccagacgtttggtgatgcacacgctgtagtgtctaatgaagttgaaatataatgccatatacctgaaacttctgttatcaatgtaatcttcatgataaaacacacacagcagttaggggtactacactaggtctcgttgcttgggcctcttcatcagatcatcagttatgtgttattttcattttaccgaagagtcaaggcccacagctcctcagagaatcaattgctcatatttttccttctagatttgtattttttcaatttgaaaagtctgcaactgtggttcaggatgatttctttcctcaaactattttctttggatagcaaatggatgaaccaaaatgcctttggatactttgctgaatctgtaattcctaaatgccactcctgtccacaacagagcctgttcaacagtagaccagctcatctggctgtttttctattagctaattcttatctttaatgagctaatacattgagaacaacatttctccgggtttgtagtgtagctgagaatcatgttcctgcaattttgtattttgactggctggcttcagggtgaagttgaattaaaagactatggaaaactgggtggtttctgtctaatgcaatcttgggagaaaaatattcaatttctccccagactgtaacatgtttctttttatgtggtgacttcttccttgttataaattctgagtttgctttgaatgcctctgcacattgtttttctgttgcttaaaatctttgcactttgaaatacatgtatttagaagagagagaataaa

SEQ ID NO: 59921 - DNA, 2767 bp, Bovine  19866881061765
  misc_feature (1)..(1): n is a, c, g, or t
natgcaaaagtcgttacagcaacacatgacagacagaggtggaaagcgtttggcatgtcgcatcacaggaagtcaatcacgattggctaacgatgatggtacctggctctggtgcaggtcactggcttgcctgagaggagtaacagatggagggggcacacctgatgtggacgccgaccgccctagtttgcagcttactttcggttctgtgaacaaggaggaaagacaaagcattagctgagcaaagtctgcagtgatgaaccggctctcagactttctttttggttttgcagcaggttctttcaatgcactgaattcttctgatgtatgctaatcattggcaagtgatgaaacaatttcataacaacagattaaaacgaaatttgttcatgaggatcagctcctgggaataaagaacaaatcacttaaggtcaaggctttgttccctgtccactttatcctatttacaatgagtttctacagagtgattaggctgggaagatcccctggagaagggaacagaacccactccagttttcttgcatggagaattccatggacagagaaccctggggggctacagtccatggggctgcaaagaattgaacacgactaagcgaccgacacaacatcccattggttaaaaagccaatttttggtgcttcattttcagctttggtccatggttctcccatgtcctaaaatgtctttctaccttctccaaatttttcttctatcgtgccctcttttcattttatcttttcttctttctcttattctttccttctttttctattttctagctttctgattttcaagttgtcttgtgctggctattttcacgatatactgttttcaacgtatcatttccctaatttaaattcatttgcttttaagtttatagatacttctgagacctttgcaatctttcataataatattatttttcaaaattaaaaagccttctcctaactcttcctttatttaaggaacctagattggccacccaggtcattgtcaggatactctggagattagaatttgggggatggaaagagttcccttcatccaagaagtgcagaatgtatggtctactgaggacactaattttcagacatatttgagggtattgtgcaggtgattctagtacctacatacacactctaaaaatatgagtgttcaaatctaagtgtaccacacgttgacataatctaacttataaatgaacataacttcccaggaggcataagtccttgcatgtcttaaagaatcatcttttatcttataaaataaaggtaaaggtaagcatctattggaatcctggttgacatgtttttataatgagccaatatttccatatatccctttatggcattaacacatttaggtacatgaagaaaattagacattttttttttccttgaaaaggatagcaaataatattttttactatgaggtccctttaaagtgtatgtggaagagattatccgatgagtgacacaatcccatgcctttcatattacccggcgtacctacggattaacttcccctgctaggtttcccgtcagactccgacttaatcagcatctttcaagcatagacgctgatatctctaatacacagactgagacttaccaaaatccaagcaaactcccaatttcatcatgacccagaaaggccttgcctgaccctcattggacagtggtccgcatcatgtcttggttcatccaccacccctttagggactgcagtttagccataaaccagtcatacagggtggctttaaagtccattcccaacatggctcacatgggttatgacatcacctgcagtggcagtgacaggctgagatgactacttacagattcattatgtacacatgcatatgcagacaataaacacatttctgtgttcacacacacacacacacacacacacacatacatactccattgttgcttaatggtatcatgtcatagggacaattttgtttattgtgagtttttggtttatttttagcatactcatttcactcttgttttccatttcacctggtccttcacttaaatgcatttgcaatcttttatgttgtttgtgagaccaggttggtgaaacaaaccattatgatcttggacccaaaggttttttgtgttttttttggccaaaaggatgttctgaaaaagtcttgaaaatcctagaaaagatactgtttttataactgagtctgttagagattcttgcctggaaaatcccatggatggaggagcctggtaggctacagtccatgaggtttcgaagagtcgaacacaactgagcgacttcactttcacttttcactttcacgcattggagaaggaaatggcaacccactccagtgttcttgcctggagaatcccagggacggcggagcctggtgggctgctgtctatggggtcacacagagtcggacacgactgaagagccttagcagcagcagtagagctgatatcgaagttaaattgtccagttcactcacctttggaaatacactgtgtttaagtcttaaacagtggggcttaggatctatagtactgaaaacaatgttttcatcctgaactttgttaatataaaaaattgccaaggctttagaggaccacaaacaatggagatatgcctcaaaacagatctaaagtgtggctttcctccccttaaaaaaaaactcatttcattaagacagtcattataagctagaaattacttattcttgtacacctaaggaaaaacctgt

SEQ ID NO: 59922 - DNA, 1855 bp, Bovine  19866881069528
  misc_feature (1)..(1): n is a, c, g, or t
nagatagagagatgcatttttctgaagaaataacagagactaacatcttaaaggaggaattcgaatctgcttaacattatgcattattgaactcaaatagtaaagagaataagaacacattcagctaagtcattttacctccttggtgaaaaagcattgcgtaaaccaagggagttattattatgggaccactggtcttaaatgagtgtgtttccaggtaagaatttgtttaaattataaaatatttgaaaagcttttttttttttaattttcagaaagatcaattttcagaattcaataaatggatggcaattctgaatttaatgaagtgtctgtagtggtgcatggtgtttctcagctgaagcaaactcattattgttgttagttgatgggagctgggttaattaaatgttccactcctggtagaataaccaatcaactgaagaatctgggctattgctattcccaaatgaaaggagtaaaaatgccataaagaatctaagaggggaggagggaggattagtaacatggatttggaagcagaatatcctgtctagccagatacaccccgaacatatgaactgaaaggaaaaaattcaaatacagaagtctggaatagtcttgtaacaattgaaggcagaaagaatactttccccagattttcttctggtcaaatttcagttacattcaaaaatatatcattttttaaaatgttttgcatctgtgcccttgttacagatggaactgatataattaaattgagaaagaaaaaggatagtaaaactatagaatcataaagtaaagattgtgggtatccgtgtattgtccaatcctagatccacccatgtcgctgctgctgctgctaagtcacttcagtcatgtccgactctgtgtgaccccatagacagcagcccaccaggctgcccagtccctgggattctccaggcaagaacactggagtgtgttgccattgccttctccaatgcaggaaagtgaaaagtgaaagtgaagttgctcagtcgtgtccgattcttagcgaccccacggactgcagcccaccaggctcctctgtccatgggattctccaggcaagagtactggagtggggtgccattgccttctccttttctggattagtcaagtttatttttctctattctgttaacaaactccagataagtgaatgctaaaacaaacttgcatccctggaacaaatccaattttattatgatatattttcctctttatgtatatagaacttggttcataaatactttgtttaggagttttgcatctatgaaccttgtcaggttttaatatcaaggttatgctgactctgtgaaaggagttgggaaacattttctctctctctttctccttgtcctttgaaagagatctttaaaccaaaacatgttttataactctttgtctctccctattcagttgcccaggccccaaatcttggagtctttccatcagttttgttaggtttttttggctgtgccgcacagcttgcaggatctcagttccccaaccagagattgaatcctggcccctggcagtgaatgcactgagtcctaactactggattgccaggtaattctcctgtcttgttagttctttcttcaaaatatatccccaattcaactcaccatgtccactgccagcacaaaattcaagctaccattatttcatggctagatgaactttaatagatttataactggctcctgatttctgtctgtcctccccataatcagttctatacaaagtgatcatatcaatatatgtatgatgtcttcactctcttgctaaaaatttcaaagacttcctagaataaaatctaaacttttta

SEQ ID NO: 59923 - DNA, 788 bp, Bovine  19866881132120
  misc_feature (1)..(1): n is a, c, g, or t
ncttaaaagaatattaaaggagaatgtagctcctaacgatggataaataagtcatttcagtggacagctagagattgctgagcagttggggaaattcatatacacaccccttcttcacttcctctttattcagaggcaacagaaaaccaggcctcccagaacgtaattttatgtacttgctgcttcatctacaccatgcctatttggtctactgccaaccctggccgccctcccctttcccttctagggtcatcagttctttaaaattcaagttccctcctccagctctcttagctggaatccctaaggtagtttcttttccccagctggccctacccaagcaaatggcttaggtaaacaaatgtgcagtcttgctgcaaatgggaaaaacaacagggtgagagaaatggatgaaatggtgtttagaggaaggtggaagcctgtggactcattatttcagggattccatggactgttcaggacttcttcagacagctggtaaatatttcatctcttttattgagaagagattggcttatgtttacattaaagaatatgttgctatggtccacctgtgtgactcttccatgttggtaatatgtaggtatgagtactgtgaaattctttcatttatttttaattgtttatacattaagttaatccaccattatgcaactttcctgccctggtgggagtagagactttaaaaaggaaaagtgttagtttcatgtttacttatatttttttctattttctaaaactgggaaatgctggataaaacactggtt

SEQ ID NO: 59924 - DNA, 3046 bp, Bovine  19866881304259
  misc_feature (1)..(1): n is a, c, g, or t
nttcttggttagataaaggaccttgtgagttttgttactgaaaaagggttacttacttttaggaataaaaactgttaaatatgatcaacttattaatatttaatgatgcttacacctaagtttaatgaaaagaatgtgaataacatagagctagacatatatgtgtgatgttttagatttttctagtaagaagaagagcttgtacttgaagtgaaaatcgctcagttgtgtccaactctttgcctccccatggactatacagtccatggaattctctaggccagaatactggactggatagcctttcccttctccagggaatcttcccaacccagagatcgaacccaggtctcctgcatgcagattctttactagctgaaccacaggggaagttcaagaatactggagtggatagcctatcccttctccagcagatcttcctgacccaggaatcaaaccagggtctcctgcattgcaggctgattctttaccaactgggctatcagaaagcccaagattgtatttggctagacaaaaaattgaaataggaaaaattaaaataatattcagtctattttccttaagttgatcccaactttttcagatgcttctaagtcaaaggcaaatgggatggggtgggaaaagctttttaggctaattttatcaattcattcaactagcacttttaaaaaatagttgactttctttaattctttgcagtgaatgaaacaaagaagtctgtgttctcatggaacttacattctgtagatgaatatccaagcattcaaatccaaacttttttgttatgcactcacttaaaagaaaaatgacctcagtgacttggtatgagaaacatggtgccaataacttgaaacataagatattagacttctgctttctttcctctacttcttttaactacctgacataaaaaaaaaacagctcaagacataaaccaattctctaatgagcaacattaaatcttctcttctccacccctaaatttgtggttgttaactttcaccccaggttcatgtcaagttgtgaaaaaagccacttgattttttgatctatgccttatcactgagtaaactagtcattctggcactaaccagttggaatccttcttctttaaatgtcccacctgtgatagcaaagaacaacacataactttggcaaacttgggaaatttagcagagttgaagttgagaatctcataagggctctctatggttgtgagcatgtgtgctaagttgcttcagctgtgttcaactctttgtgactctgtagactatagcgcgccagactcctatgtctgtggaattttcctagcaagaatactggagtgagctgctatgcattcctccagggaatcttctctacccagggatgggacctgtgtctcctgcattttgggcagattctttaccactgagccactggggaagccccgactctggtattaggaaggacaaacagaggtgtaagtggcatgcttgggcatgaagagagtaaagagcactctccagtttctggagagattctcgtgttccccatgggcttggaggttagaacatctgtgtcattagaaagagttttatattttgtcattgccccaaagaggctgatgaagggatttccaatagtgagagggagttagaaggaaccaggtctccatagtctgatccatccatgaatgctgtgaaagaacctatttggacaccaaaagctatctcacttctcaaaatagagcattagacaatatcagatatgaccagagagccactaccaaaacctgagtagctaggccagacaacatccgagaccaaagcttagcaatggacctaatgagaactctactaatggacccagacaatgaagagcaatatggagccaaataagaaccctctccaccctgagatacagacaatctcatgggcagcctagttccttctttacctcttgggtaagggtcatatttgggttacatgcaactagaagctggatcagaagaatgggaagagaaaatctttgccagtgaataggaacactgaaatgggaattgtattctggccagagacagagagataacttaatctgaccctcaaactccttgatttgatagagttcatctaaaataaattgtcattagacattcttggaggtgaatcaaggtagagtgttatgctacagtaattttgtctaataagccatacccaatacaacaacatgcatctatttttctcactcatggtcctgttggtcagctagaagggttctgatgcatgtctgctgggattttttggatggttctgccccgtgtgagaataggcaatgggtccctcaggtacggttttctcacagccatcctaagattgcagaagacaagccaaaacacatgtgcacatttcaagtttctgcctgcatcatacctggtcactgtccaaagttcagagtagatgacatggccaaacccaaagcttttgagataaggaagtaccctacttcaaggaagagtgaagagtgagtacttgctgaacaataacccaatctatgacaagtggagatcattcaaaaccaataaaggcctgtttaattatcaaatacaactgtatttgtttgtaactggcttataaacctgctttatttttaaagttttgatatttacactcatttgctgtgctctgctttacttggtaggttggtgcttctctactttcaactttttgggaaagaattttttgtgtactacagattcactggagtgttgttttatcttaattaggaggaatgtagctgtcaatggtgctgggaaaaaggctaatgaaaacactgacagaccattcaccattgccctgctcatgaggggcataatacaggcttttcttctaattttctttttaattttaacagtacatctgtacttcaaatctttttcattgttgtgatggttacacaaataatatctgaagtgttaaaaacctctttttttcctaatgcttttccccaaatagtagccaaaactctaagatacattcttcctttg

SEQ ID NO: 59925 - DNA, 870 bp, Bovine  19866881505414
  misc_feature (1)..(1): n is a, c, g, or t
ncttggctggctcttttatcatcgaattttgatcccattaggactcagagaggatatgatacaagagatgaggtgaaagttttgcccatataaaatagtaataaaaaataaaggtggaattattacttcttatctgctaagcttcattatccatctgtcttatgtcatttcccaaccacattatcagttcgtctttccttgggtgcttctgatacttaacaatggtttaattacggttacccagaataatatggagaacaaaatgattatacactataaagaatgtttaatttcctaatgttggccacaaaatgaatttcatctaaatgcctttattaattatgattagaagtctagtccgatatctatagtcatgggtgataatgtactccagtgtgttagcactttatttttctttcccttttttttttttttttgccacactggccagcatgtgagatcttagttccccgatgaggacgagggattgaacccatgccccctgcagtgggagtgtgcagtcttaaccattgaactgccagggaagtcctgttggcactttccactcatttaatctgttggataaaatatatgatcaagaagatacagtcatgtgtaatatataggttccctgcaacttcccccctttctcattacacaactctcttctatccctttcctattgtaatctatgactaatttatagcatctgaaagctgacctcaaagaaaaagcttcccttctgctatcctttgatcactgtggcagctacaaactaaaacactttgcaggtctctcagtctgggcatccagggatagactgtcagtcaggtggtaagctttattgagcatcagtgtgtgtgcagggca

SEQ ID NO: 59926 - DNA, 1603 bp, Bovine  19866881620989
  misc_feature (1)..(1): n is a, c, g, or t
ntatcttatgagtattattcctttctctgtttagttttagcccagtgttataagcagtttcttcacagaaagtatgcatttccatgaaaaaagtaaaaatttagcagctcatatgccaagagggaaaactttcagggtagttccctgtaaagatctggaaattcattaatgatttacatttcaaatatcacatactatgctagcttatttactattcctataggaaacagatcatcagtgaatggactgagtttgatacaatcttatatgacaaacatttcaaaacttactacacacaagaggcaatttctctgctcttgaaaaccagtttaataattaagactaaaactactaattagtgtatccttttgaatcaatttaggtgctaaaatctttcagccctcatataattttaactattttaggagaagaagcaaaaatatgtgtacatagagaagatgaaacaaaaggaagaaattcacatttgaggctgggtgtacgtgtcatttgcaatcacttaaagcaaacagtccaattcctttccttgtgttgccttctacctaaatggatacaaatttttttttagttggtgcagtatgtcattattaatgtagctatattatatgatgaagatgaaggtcataatgttgactgtgaaagcaataatagtgatgataataataatgctaacaataatggcagctaccaattctaaacagttatgatacatcgattactccactggttgttccatgtgagttgtacctttatttctcttaatacaagaaagggcatattattatttctaattaacaagtgagttaatgtcactttaaggattaaggacccctttatgggtctcaccttagttagaaagtagaagaaaccaattctaccttctgtccgggcaccaggattttcccactacttagttatcctctcctgtagcccaacacacacaacgttacttcctgtccgccaacacacacacaactttactctgaatttacatcttacaacaggatgataaccctggtttattgaagtacctcaggacagggaaaaggtcccatgtaactgatggaaaaggtccatcagttaactacttatctatgtctccatcctcgcaaaaaggccgtaaataaacatagccgaagctacccattgttagagcatttttactttttaacaatgtcaagtattctgcctgtctacacctgcctttcatcttgcttctaagattacaggatgagggtggttcttcctgtcttaactggaaagcgtccgagagtgtggctcacgtagctcttagaatcgagatcacttactccactaaatctgcacaaaggcagaaaccttcaggcaattatttatttgttctggttaatctacacacttgccctttgctgaataaacactaaaaaaaaaaatctttcttcaaatctttcttaaatatgtgtgtgtacaactttgagttttataaaagtatttcaaatttctatgcaatttttcaatcccgtacccacaaaatatcaaaaaggaaagatgaaattctcatacataccaacaaacgattaaaaggcctagaaatctcaatatgccc

SEQ ID NO: 59927 - DNA, 993 bp, Bovine  19866881897969
  misc_feature (1)..(1): n is a, c, g, or t
nagaataggacactgaaccaatctaccaaaaataaactgacagggaggaatccaaccaaacacatcgccaaaagtgtcagctaaaaatacagccagaaaagtgtgcagtcaatacagagcttgcaaagccagatgagagcattactgtagtgtaaagagatccatcatggaaaaacaggcataagacaaggaagataaaagggaagaggaaacacagtacctagagacttccatggatgtttttcaatgaatactttaattacagcatctagtctggtttctacccatgaacaattctatttactgatgaataccataactaacctacttccccatagctagctgtcagagcattcattattataaacagatacttttaaaacatctttttaaattttatatggggatatagttcatttacagtgttgtattaatttcaagtagcaaagtgattcagttatatagatacatatatctatcctttttcaccttctttccccatataggttattatagaatattgaatagagttccctgtgctatacagtaggactttgctaattatctgttttacacatggtagtgtgtctatcaaacagatactttttaaagacatggtataatatgtctttgtgagactctggtttgaattgataacatgtaatttttctgaagaagtccatcggttttacatacaacctgcaaacaaaagcatcctctttcccacctatagtggaagggaaagtcttctatcactccttacaagattaaaaaatctctaaggagacattgtgcatgtaagagagcattttgaaatgaggtgggaacactaagcctgtgctgtcccatgattgcattaaagtggaagaatgaaagattaggctggtattgggtttaagaagaatgctgcttgtggatttgtcattaatgccgtgactctatctgtccaagcctttccatttcaatgtacttagaattctaaaaggaagtcag

SEQ ID NO: 59928 - DNA, 1381 bp, Bovine  19866881971597
  misc_feature (1)..(1): n is a, c, g, or t
nttaccaattatcttagacagaaagatccaaccttaaattgtattcagaagatagagtggcccagtacagccactgctcacaaatacaacggcttcatctggccatatctgcaaccagtgggcttcttgcttcttgcctatgactctgatttctagaactcaaactcaaaactatattaaaattaaaacttacaggcaaaattgtcatagaccttaaattttatgctgagagattttatatgaagcagattggttttcttacaccttagtttgggaatttcattagcaagctgggcatatataaaacaaatcactgagctgtttgacagtataatgactcaccattaaaaaaaaagaaaagaaaaatactgaaatgtttctaaaatgaagagtcaaactacagaaggaagctgatatgcttttacaaaatgggcctgaggacaaaaaccaaagataaatgtgtatgtttaaaattacttgtgggcaaggctcccatcttaaatatttgaagtattcaggcctccaggcacctgttcaagtttgtgctgattctctccaggcagctgcttacttgcctctgcttcaagctggacctgaacatggtccaggatgtagcattgatgagcaagttcagctggtgctaaatgacaggtgttggctcctgattgccttcagtggcatggtgggggatatttcttaacagagggaaagagacgagacatcaaacacttgctcttccaattcaatgttttactgtttgtccaaatcaatgtttaatgtttaatgaaaggcatagactagcaaaagaaataagttagtaccaggcttacagaaaactttttcttaatgaatgcacactggtagcacaacaaagaggtgacatggctcgtaagatctaggatactttacaaagtccattatccacagggcatgctcttatgatcactaaagccttgaatccaggtggatgggttgacccaatggtcaagacaactgcaagatctcactgtgtcagcctctagaccacggtctgtgggccgctaactgagaaggcatggaatgcactttccataagtatatgaagctaacagaggtacttctacaaccagatgggcacagaaatgctcccaagtccatcctagaatccagtgagacttttctgggtgacaatagagcatatcaacgaattatgccctgaatggtaaatccagcctactgcttatttgattaaataagcattgaatcaaaataagcagaaggctggattttatgtttgcattttatattgaaaggaatctagaaggctatttaatgacctgtaaaaaatttatgaatttcaaatgcagtagcgaaaataagttttatggaacacagccacaca

SEQ ID NO: 59929 - DNA, 4584 bp, Bovine  19866880779964
  misc_feature (1)..(1): n is a, c, g, or t
ntagcagagagttttaatcagggggtgacatgacccgcattgcattttagaaagattactgtgctacacggaggcaggaggcctggttaggaagacagtataacatcccccagagacaggatggcagcttgaacccagggtaaatgaagggataacctgggggtgttctggagagctgattgttatattttcagcaattttggcagctggttattaaacacagtcacttatacaaattagattataagcatttataattaaatgaactataataaaaacaaagagaataaatacttaggttcgtcacctcctaattattttcctattctcgagcgtcttgaaggtatctgcgtcccttgcatttgcaggtggacataacagggccctacccaccaggtgtgaattcccaactcggagttcagtgatgccacacccctgactcaaaatttgctttattcattgggagtattcccatcaaggactctggaaaatattagaaatcaagttttccatttttgacacactctggctgggttgccatcttttagagttgaagaacctcaaagagctgtgtttatccttgcgggctccacctggaccctttccagtcgcctctcctctggggtacccaacctgttctgctgaccttcctcatagggttcatctcttgtaactgttactcgtctcttcctctcccttcattctgcaagcatcttgattcttctgtagaccagaacttggcccagacatgggactggttctgcgctcatgaaataatggacttgtgaaccagtgagagtggctccccatttccttgtgtctgatccacctttggaatgagcacccgcccctcccacccccagccaatgagcaaaactccaagacagataaccccaccttctttcagcctcagaagcagtctgatggctgaagtgacgttttataaacatgtgtacagcttgatgctgaaatgtctgctgaggaactcctcgaaagggccactttcgaaagcaaaaatctacttctaaaactactggatagttgactgagcagagaaggacatggtcagggtgcttggatgaaaggccttctgcaggacgatttgaaaggaaagccgaaagcccagatcaccttggggaagttttctttgcaactgatctccagcgaaggctatagggcacaaggacatcagatctgttggaaggaaacagcattctgtttctcttgggaaataattacactgagccaccggagcaccgcttcctctcctcccgccgcctgcctgccaagtaagctttcgtcagcacatcaaagattctttgagcccaacgtctaccttgcatgtcacctcagtttactacttgaggtcgaatgctcagaatgtcgatatgggggcttaggaaagagcccttgcccctctgctaagtcatgggacctcagctccaccacatccccttctctggggcttacctatccctcagctagctttggtcatttttctagatcttgactccagagagctaagctccaggactaatgctaccagcttccaggagggtctgggcagatcacaccgaagccattgccccacgtgcacagtgacttcttgccctcaacttgcctaccccaggagctgctgggaggaatccaggcaccacagagttgtaagctgctggtcttggactccctgctgccggtactggtgtctcagtttctctcagaggcaagaaggacctgaccagggctgctcgggtctcactggtgaatccagggtgggatccagaggccttccgcttagaacacaatctgactctggcctgcctttcttaccaactctcactcatccgccctgtggtggcaagtgatctaacaacaggaaatgactgccacccatttttgctataaattctcatcctgggaatgcagacagacctccatgccccccacccatatcccctgcttcttagatttaggacgtgtagaagtgcaccccgggaacccagccaggagagctggagcccagggtcagcagcaggtgtctccgagggtgcacggcagagagtttttggtgacagatggtgctagttttccccgcaaaacttcttgctttggcttctgagtggcactcagaccctggggaacaccagagctcctgaattcaacacctgaccctcttcccttcattctcttctttctacctttctttcctttgtcagcaagtaggctcaagaaagtaagcccacaaatctctgcccttgtgccctggaatccaccatccaagaactgcaatttgctagaacctgctctgtgtagaagtaatttcactacccccgtggagttccacacttgcctgttcttcccaaggcaaaatgccctttaggtgcagctttcagacacagtgccttcagagagcagttttccaggggctttagaaggcagtaggtctcctgaattggtcttggttccacataaatcagaagccactgagaaaacagtgaagccctcagctgatacacagagccaaggccaaacacaccctgaagaactgcccatttctttactccccctttcgatgaaaagaaatactcagaaagggtggtctcaggctgagttccttctgaggctgtattcttggtaacaagttcacagagaagcagagagcaaaatgagtcttgcatttcacattttattcaaactcttgattttacagataaggaaattgaggtcagggaaagtcaaggaagttgctaagtagctggtgagtggcaggagtcgagcccagtgttctgcgccttggccaggattcttgccatcacagttcattcttggccaaagagcaacaatttaattcaattgatcaaacagttatgatcacctgtgtgactaattttggaccagtgtcctgagaagacaccaataaagactgcagaaccttgatccttacatgtattatagtctagtggagcacagactcctgtgtgttaacctcaccttcaatgctgatgacagtgttgctaaatagagaggagcaaagatatctaaaccccaacattttcctttgaaaaataatatttgaacaggacaaacacaccaaactgagagatggttgaagagatggcaggaaatttctggtaaactgtgtctctggaaacatacttggaaataactcaaaatcactagttcaactacaattttgacaattattcttgcatttatttacaaatgaattagaagctttgggtccctttctctttttctgttttcctggaatgggtggtgttttaagctatgaacatgcacacacacacacacacacactcacacacacactcacatacacacattcttacacatatacttacacacatacacatgcccactcacactgtcacacaaattcatactcacacacatatacacacatttactcacacactcatatacatacacattctcatgcacactcactgttacacaagttcacacacacacatatacacacacactcacacaatactcacaccctcacagaaatgcacacacacatatacacgttcacacactctcatgcacattcacacacacacacacacacacacacacacagctgtccttgcaggaagcagtggcagcactcagcgtggagaattctgccctataaactcttctgcagctagattacatgcaggacaagcgttgactgtcaatttgcacctctgacatgagtcaatgagtgctctaattctcagtttatttgttctgcctgcagtaaaatggattgcatgtagggctatcctaccatgatgtggcgctttgacgcctccaatatggggctgatgaactcagagcgcctggcactatcttacaggaatataaaaatttgatttggtccttagccaatttccctcctgctttggaacctgggccgaacatctggggaaaaccgtggacatttgcataatacctgatccatcagagtctgactccgcactttgtgttggcctcagatccagctttcatagcggatcacagtgatgaatcttgctttaatatcttgcatcttttaaatttttatgtattatacagaagtatggctcactgtttgaaagctcagaatgagataactatatttatttctaaactaaaatttcagatttccatacttccccagctgctgtatcttttgcttctttttcagagagatagtctttagagatctcttcctaaagccaaaagttttaagcccattccccacagcgggtccaggggttctctgaatctcctttcatactctttccatgaactgtgtgtttatgaagcatgaacaaagacaagatccatgttttcatcagatgcttgtagagacccatggtcccaaggggttaaaaatctattttagagagattccccatgattttgaaactaggaaggacctgagatgtcatttaatggaaactctaatttcacagatgtggaaactgaggtgcagagagatctccttatttttcacaggccaacgcaaaaagatagtaacgaaatagcatgagagcccaggacaaaaacttgattttcttttagctcatt

SEQ ID NO: 59930 - DNA, 1211 bp, Bovine  19866881255063
  misc_feature (1)..(1): n is a, c, g, or t
ncctgcaaagagtggacatttcagaacaagcagtcatcaaagctctcatgcctgcaggctaagtcactttagtcatgtccaactctctgcaattctatggactgtagcctgccaggctccacggtccatgtgattctctaggcaagaatactggagtgggttgctgtgtcctcctctaagggatcttcctgacccaaggatcaaatctgagtcttttatatctcctgcattgacaggcagtttcttaccaccagctccacctgggaagcccgtagctctcctgaaactgtaaaatgcttcctagttttaccacattctcaggtattttgaattgagaaaataattggaaaagactattgttaaatgatagcctaagaggggaggtcattgatcatggctcactgtgacttgctctgtagacattcctggctcccatcagggagagaaagaatgataaatgctcccagctgtggctggacgggcggtaggtccctatgtttcctgatgacactggttatttgcagaatggtttgtctttttttgaaaaaaagtaatttgttgttatttatgtgtgtaacgctagcattctctgaccatgtattccctggaaatctaatttgtaaataattgcttgacagaacggaactggctggaaaattctgaacatgcagaggcataggcaggcccccaagaggggattttagccaaaaggctgggtacctgaatggtcaaatcacaatttcccatctctcagcagttcatggctaacaaagtccccagttaaaaaaacccaaattctcaggctccagatgtagtggatgcaggtaggcaccatcagctgaggtgtggagagcagcagtcctgctgggagagctgataaagagcttctgccccttcacctccccacacagaggatggcacctgggacagcagcatccatccttcctatgtgtacagtgggatgagaagtggggagggtgggaatgagagtggggatggaggagtggggtgccagagcagcagggaaggtggaactacagactgaacgttttcatccccttcaaattcatatatcaaagctctaacccccaagtaggactatatttgggaaaggggcctgtgagtaagtagttaaggttaagtgaggtcataggatggggccctgaacaaatagggttagtgtccttattagaagaggcagagacaccaga

SEQ ID NO: 59931 - DNA, 929 bp, Bovine  19866881828742
  misc_feature (1)..(1): n is a, c, g, or t
ngtgtgtgtgaatgtgtgtgtgttggaggaaggaagagagaaacagaaacaggagaaaagtgtgagactacaaagaaatacaactgaattcacgtctacgatcaaaagcaccatggttctaactaacattaacagttaagtgctaactcatctgcacttaagggctgttaaaactctaaccaccatagcaaaaaatttagtataacagctcaactccatataattttattattttcaataaaacaaaatgttaagtgtataactagaagtgattgagtttttatgtttatgtaagacttttcacataattagactcaccaatctataaacttccattttcaacacagcttcaagtttgggtgtaagaagagtaatcaccataatcttaagacatatctatacaattctaggaaacacacagaaaactatgaatgccccagtttaaaaaaaatttcactttcatattcctttgatgatgcctgttactaaactcacatatttcagtaagcatcatacaaaataatattgtaatagcaagtataagaccctctaacacacaagcgtaggtcagagtcagtcatcaactagaccacacacttaccctgaaattccacagtatttttcaggagcgtgttaatggcctctgcctgcaagagtgtgaggcacatgctcttttttccaaaaatcaaaatgacaataattaaaccaggcagctgctgcccccagtaatatgacaacctctccctgctccctggaacttgctggaatccctctgcttgagctcatctcattcgaattcgctgtgctcttcctgtgccccagcaatctgggtgagtttccatctttcagctgaattattcagatgttttcccacaacggcactagcagtgttcgtataactagtttctaaatcaacagtgaattacatt

SEQ ID NO: 59932 - DNA, 1910 bp, Bovine  19866880390323
  misc_feature (1)..(1): n is a, c, g, or t
nttgggtcatttatttttctggaattgagctgtaggagttgattgtatatttttgagattgaatttttttttttttttaaataaagcagaccccctactaaactaataagagtagcatgtccccaacatccattcccccaacaaactgatcacctctgcctcggccacgacctcttctgcctctttctgtgcctcttccagaaggccctccactcttggtgccatctaatccattttcctgacctcgaactgaaatttaaaaacagaacactacaaatggccagagtaaaatgaacaggaaaaatatatataaactgtatgcatacatgattagggggagacaaaaacaaagaagagaaaatgagctagaaggacagaacatgatggttactaggggaatggttcccagtcaaaaaatcttacaaacagctaacaaggtaatttcatgctaaactggtggctgttgctaaaaaaatctgtatgtaagaaatgccaagatctcagaacagatgatcgtaaaaaaaatcaaaaagataatggttaccaggtttagcctcacaaggccctgacatccctcaagtctagacattactaacccacagctggttttgttaaagccccatgcatacactctcgtccacggctggcacctcttccccgtcttggtggcccaccacgtcgccgactatagtctctgtcccggtctcgattttctttgccttcctcgttggattccgtttggccaccatccttttgtcctgagactcccttcttcttcccgaccatctcccaggaatgctaaagaagaaaagaacattcgtgtcaaatcagtataggttgctaccaggaaatgagagataaaactgttgggacaactgttaaccattctctcagtatccatatctaagatacttctataagtttacttctgtttaagctgaggtatagacaggacctcaagacaaattctgcacctatcactgcaaaattgaagccctttctgtggaggaggtgcttatgagcaaacggatgcaggaatcattcccaaaagggtcacccgagatctccattcagttcagtcacttcggtgtccccttagtcaaagggcctagttacttactgggttcgtcctttcaagtgtgtttcccgggctgaaaacactaattccctatgcattcagtaatttccaattttttatagccttatctatgtcaaacaaagctgaaaactcaaagtttctaaaagttaactttgaattcagagtgaatgaatagcatttgactcgagtacagtctcaaattaagcaacctagaatttaggaggaaaacaactacacctgttccctaacccaccccttccacacacaccaatttcctttatttaaaagaagaccaaatagcagtcaggaaagcacagccctggccctgagacatgctatgtcttattttactcactgtgttccccttatgcatctgaaattgctataatacaattcaaccttcctcaaaggagttcaggaacaaatatttatagcaaggaaaataagctaaacagtcgtgcaaaaactcattccttaggaaaattaattttataaacttaaagttcttttttttttgccttgccttgtggcttgcaggttctcagttccctgaccagggactgaacccaggtgctcagcagagtcaaagagcagagccttaaccactggactgccagagaattccttatagatttcaagttttaaatatatacatatactgatttataatttttgcagaaaatacatacaaataagttcaaacgtgtataaataggtttcagttcaaatgccaagactatcatgtttaccatcctggacaccaatattccaaataccaaattacgtaataccaaattacgatggccctgtt

SEQ ID NO: 59933 - DNA, 2272 bp, Bovine  19866880596033
  misc_feature (1)..(1): n is a, c, g, or t
ncattctcattaagtggaaaggaaaaggtgaaatcactctaaattccagggcaagagttcctccaatatcctctaccatctccaggaatggtcaacaagctgtaaagtttgtttctcaggcttccctggtcatccagtggttaggaacccatatgtcaatgcaggggacatgagttggatccctggtctggaaagatcccaaatgcatcggagcaattaagccctcgagccacaactactgagccctaacgctgcaactactaaagcctgtgtgcctagagcccgtgctctgcaacaagagaagccaccacagtgagaagcctgcacagctcaatgaaaaacagcccctctccacaactagagaaagcctgagaacagtaacaaagacccagagcagccaaaaattcatgaaaaaaataaattattttttaaaaagatttctttctctgctacttcaacaaaaacaagttcacatgataaaaaggtattgtgggaaaaaaaaaaaggtactgtgaaatgtaaagctaatattggtgggactgttctgaaatcagaatccaggaagggctgtggctttgttcaacagcaataaatctattagtaactaaggctatttagcagcaactctttactcaagactaaccaagtcttgaaagtagtcattagcctagaatcaacaattatgccaggccaactaaaagaaactgattttatctgttctatttattgcccaaaattttaagtgtttgcaacctccagcaaatataaagatacttccttgctttatttggagaataagagagtatgctttaagttgaccccacttgctatttttggaatttactagcctctcaaccagggacccactttctagaacactttattagcactctaccgtatctgggtttccttccagcagtacattgatggctctgttgacatctccattgcagtcatgcaaagcaatgacacattcatcctggttcttgcctgtgatatcaatcagctgaaagagaaagatcaacaaccattatgaacaagcttgcactccccacaaaaggaaaacagatgaaggaaagggagaagacacagctgagtttgaaagaattaggtttaaaaaagcaaaacatgcagaattttgacattctagctccaaaagcaaaatactaacacctgtgattaaggatggggcaaaagtatttataaaacaatcgaacaataaagtatctaatagagaatcaaatgcagaaacacacaggcttcagtataccatgactctccatatttcctagataccacaaatgctcaatgttactgtacaacagtactaataaagtcattcaaaaaagagtttaaaattaagataaaatctctttgaacacggtatctgtccaaaggggcacagtaaatcacacaataaaagcactcatgtattggcttaacctattatatttcaggttaaaattcttataatacctaaagtggaaagtatcccggtaggcatcaatcctattaactgcgctttaatctttatgttttttcccacaaattaagacaaatcaaaaatacactcacttgtttcaccttttcctcaaagtcagcatcattatggtccgaaatcatctgtgcaagtcgaatttgttctgcagtggcctaaaaagcaagatcaagagacaacagtttagagaaatgagagggaccaacacagtccactgggcttcccaggtggctcagcggcaaagaatccacctgccaagtaggagactcgggttcaattcctgggttgggaagatcccctggaaaaggaaatggcaacccactccagtattcttgcctgggaaatcccatggacagaggagcctggtgggctacagtccatggggttgcaaacgagtctgacacaacttagcaactgaacaacaacaatcaatatgcaccatctcccaccccaatttccttctccctgttacacatgaccaagtaataaaacatttccaccacttcacttcagttgctcagtcctgtccgactctttgtgacctcatggactatatagccattaggctctttccaccacataagatgcttaaatgaacaaaacaacaacatagagttaagctgtcactatttcacactactttctccaaaaaagcacggagcttttatgtccacagttaaagagactcattttgggatcaaacaccactttgaaacatctgtgccttaattcaatttcatgtatttgcaaagtcatgtgaaaaccctgttcctg

SEQ ID NO: 59934 - DNA, 1942 bp, Bovine  19866880661501
  misc_feature (1)..(1): n is a, c, g, or t
ntcatgaagcactccaccacaactcctaatactttacctggaacttttaattatttatggtgtgtatgtgggagcaacacagtactaatctgtgcataatttggatacctcactttaattactgggctgtgttgtatcctttcccactctgttacagacttacaaagaatgggaagaaccactttcctttcattccattctattctctgagaaacttatgaaaaggttgggagtaaggggccaggaaaacgtgcagtaaacaacatgacatcacaacagtttaccacactccaccttcctgtaacatttttccttttttttccaagagggctcagtttaaacttcaagaactcactcactttctagtaggatgggtttcctgatacctctcctaagaggactgttcttgttcagtcttttcccgccctttggccatatggcttgtgggatcctagttcccctaccagggattgaacccaggcccatggcaatgaaagtgccaagtcctaaccactggacagccagggaattcccatgttcagtgtttttctatcactgcaactccacctcctcgatgtccatctctctttccagttctatccagagccaggcacctacctgggttttggagtacacagaacccgagatatctggcacgcctgtattactggaggtgactgacacacctgggggaggaggaaacagacaggaggattagctctgctaactgcctggccccatccctgggaaatgatgatgcgtgtggcttttctagctagagcactgcaagggaattttggtctgtttttccaacttcatgtcagtcctgaggaataagagctcacgatacaaaaaggttctctaaggggttctcttgccctttcccgatgtatactgtttatgtgagagtgaggggtgttgtttttgggagcaccagggaatatagccaaacttcactagcctatggctttcaaaactctctgtgccaaagcccaacaggattgtattaaacttttcatgtccttttcaaatcagtcagcccaaactccactcagttctgcaatcttgctgctgagtgggctcaaaattcatgggctccacagcataaggaaagtgctaacggagcagttcagttcaacccccaagagcactttcattctcagagcctcagtttacttggtccagcttccctattgtcttggtactactaggctacatacttacgatttacaaagcaaatttccatttactcaatttaagcctaagtgtggagaggagagagggtagacagggttaggctcttatagcctaggtggaacacaaaatccaactgttcattctagtttacaatttcagcttttctatgaggtaaaagctctaatccatactccagcaacttatgtgtttcctattgaaaaactccctaccaccatgatgattttatggaaaccacaacagtacaattccccattttaatctgtactccttaaactgaaatacacatactgtacctcccagggtatggggcagtaagaataggaaaaaaaagccatcaggtaaaataacccagcatcttactagtgaaaactgtatacaaatactgaagaaaaagtaactgaaattttactaggaatttaaagcttgttttctaaagatctgttacatctcagaaggtgagataaaacgagacttcaaaaaaacattgcatttcaggctgggtctttggattttcctctgctgttaggagaactttgatgagttttttagaactaaactgacggagtcacacaacacacacacacacacacacacacactgatggagtcacaaaagaggaatcctccatttacccacagttcaatagcgatctccattcaaactccaaaatccaaatcctccctagaccaaggcagccttcaaaagctaagcccaccttggacag

SEQ ID NO: 59935 - DNA, 1856 bp, Bovine  19866880732481
  misc_feature (1)..(1): n is a, c, g, or t
ntggggtaccgccgagtctgtgtggatctctgttcatatagagggccctgagcattattttgggaggtataggttgtcgactgaattgggccactctgataaccggactcctgactctggttagatgaaattgtggatgaagattcactgtggggaatggagaaggaaaatctcaagagaaacgaatagaacagatccactgatactaaaacagtggagtaagttactctagtaacttactagagttgattacaatcaacttataatcaaattgattataatcaaaaagacaaacttcaagaacaaataaaagatactgcaacaattttctcctgacaacagtaggaatttccacatcctataaagccaggtatctaagctaagaatcgagcttaaaaacattttcaactcttaaaggaagagagaattttcttgtgtccctacattctgctgttattagaaaaagaggctaaaagtcagtagaaaggatacactattcttggtccctttcatataatcgtaacaagaaccctaagcacaggaaaaatcaccttttgctcactttaaggaattctgagttcctggctctctcaaaaaacccaagagtaaaattctcttgagaagaactttaaaaatactcacatgcattaacaacaattatgattcaatagagctaggctggggcaagacatctctacttttaaattctaaggacttaaaaaaaaaaaaaaactaaacccacctattactcccgaattccaggattttctattgcctaagatagacttccctgatatctattcataggaaataggaaaggttctacaggaaaggtttcttttaattctgtagtactaattttacctccttcctaggagttcaaagttacaaccttcataggctttaaatccacagaaaaggtctcaaagtgtcaaaagcactgccaatgtactttaaagggggggtacacatctctaggaactgtgcctggacattctgtaagtacccaaaggatatattctatctgtttggttatggaaaaacctagtaacaaaagtgctcaacaaactgctacaagtggctgcttttccttcaatcagagccttggctgtccagagttctaggaatcaacaagagacttacaaaaagttggaaaagtctaaaagaagtctatgacagctgtttcctctacctggccgtgctggtatagaggctacttggagcctggcttgaagaggcgctcgtggtgggggtggactcataatcagaaaggacaggctctgacccaaactgcaatgccccaaactgcaggtttagccctgagatatctgctgagccaggcatctccacagccagagcaggaatctgtagagaagataaagaaatggtttactataaccttattgtaagactgatagcaaacttccacatcagacttctaaactacatccttacaatctcaattctcaaatcccacacctctttgccctaaaataatatctttcgaaaagttcaaataccttagaagtcaaggaggcttttttcttctgctgtttcagtttttgctgagccggctgagggctggaggattggttgtctgaagacccaggagacatttgtggagccgaggtggatttgcttggcagaggagaagatgggggtggaggtgcggctgtggaggtagccacagcaggtggcttctcctgaaggaacacctccatcatggttgaagatggggtgaaagcctggcgctttgtaaaggggctgtgcactgttgaatcatttggggtcttcaaatctgcatgaggagatccaatatgtatgaggccagaggtcctcattgacctcaagaaaat

SEQ ID NO: 59936 - DNA, 1921 bp, Bovine  19866880866493
  misc_feature (1)..(1): n is a, c, g, or t
naaaaataaagatatccctcttactaaggaaatttttccagtatataatatatacttggatatacttggatatataaagtatatactagtatatactttattataccacaggtgacttttggaattttttaaaaactgggggaaaaattgcctaaatccttctgttctaaagccacttgaggatgccagcattctatttgtggtcttagatattgatcatgacaggtattcagtattaaaatcatgggtaaaagttaggaatttgggggccagttatggagctgctgtattaaaactaacatttgacatttcattaagttaaaaaatttcactaaaattaaaattgtaaacaacattaaggatgtcagctccattggaatacatctggatactattgtgactcttatacatctgttgtttttgatgagttcagcattttagggctttgtgtttctggggagtgacttccttttgatctatccttaatctaagtcgggtattggagataagaatgttctgtcattattcatcaaactttctctctccactagaattgaccttgctgttctgttgggaaagacaccatcttccatggagaatgattcatctaatctggatccctctcaggctccttctcttgcccagcctctggtgttcagtaactcgaagcagagtgccatatcacagcctgcttcagggaacacgttttctcatcacagtatggtaagtaggaaacaaggtatatcttaaagttttctgcaaccccagcacatacgtacaaatacagtaattcctttcagtgacacctgaaaggtttggggcaaggtaaaaagcatcttttgtcttcctaagcagacttgagtgtagaaatgttgatttgggtaataggggatagctctaggagaggatttaggtctggacagaccaaatcatcttataaaaatgaataaacattttatttgtggtccgttgctcactgtgtctgactctttgtaaccccatggatcccaccaatctcctctgtccagggaattttctaaataagaatactgaagtgggttgccatttcctactccaggggatcttcctgacccagagatgaaacccatatcgcctgcactggcaggtggattctttaccactgtgccacctgggaagccctgacaccatttactgagtacttatggtgcagaacaatgtattttttttgtagggcggggggaatgtaattttttggggaaaaaattatttggccgtcctgggtcttagttgtggcacgtgggatcttagatctttgttgtggcctgcaggatctttaattgtggcatccagggcctagtttcctgaccagaggttgaacccagtcctctctccctgcccccacattagaaatgtggggtcttagccactgggccaccagggaagtccttattttctattattcttgaagagagaaaatcaatgacaattttaacgctaatactaattagtaatagtaattaaatgttgagaggtagtagcacttccctgttttttgatagagcacaattaccatatgtatgtatttaaatcgtacatttctgagctaggcttctaaaaacttgaggtcttcctgaatctgcccatataataactgtttctccctttctccgtaagtggggataagggtgcttgctgtgcctatcttacagggcttcaggaagatagataagattatgagtaaaagtgatacaaatgtggtggctgtggtggtattaagttgttaacctggagcacttaacaacaaatgacttgttgattcagaattattttttaaaaattcaaggtcatcaattacgggaaaggctaaataaacaaagacgatacaaggactaacttatgggtcagtaaatcctaaaagtactgctttttctttctttta

SEQ ID NO: 59937 - DNA, 1510 bp, Bovine  19866881256221
  misc_feature (1)..(1): n is a, c, g, or t
nggtgaaaaggagctttggtttagggttagagttgctgctctggtgtaatggcagagaccaggagcttgggaatcccagtgggaaaaggaatagtgcagtagaggatgaaacttcaggccactagaactcaccatcagcaactgcttgttggccagtgccaactcctgtaccatggtgtcctgcatccttaggatagcatatgggtttctcctctggcttaatgttatctgccacagacagtgagtgtgtgaatttcgccacctgtcccaggcacaaaggtaggggttgaataggttagagttaagaggagagacagaaccttgtcaaaggaggctcttcatcagaacttctgtaccattgtcagagaagactgcaaactccttgaaaaggtgactagtactggcttagcttctccaggaaagaacgctggagtgggttgccattcccttctccaggggatcttcccaacccagggatccaacctgggtctcctgtattgtaggcggattctttaccgtctgagccaccagggaaaccttgatatagaacctagcgtatatcaataggaagtctgtcattcaatcaccataataaccatgtgtcataggtatcagtttttgcattatacaaataaggaaacgtagttcaggtgagttgcccaaggtcacctgatggcagacctgggtatcaaatccaatctaaagactgattccttccatcataccagtgatactctgtcttggctagacactctggaatcatttgttaaggttttctaatacacaacaggattatacacatgtgatacacacccatatcctctgttcagataatcttgttgacatttctttaaaaaaatcaagtattttttacagatgactgaaaaatacatacaggaatatatattaaatgaaagctggaagcatcattcttctgccccagttcatctcaacaaagttatcagtttcttgtgcatctttatagaaaaatttttatcatgtatcagcaagtataacttttatttttaacatgaaattttacatttacataagcagtattacgtaacaatttggacttttcacatcagcacttagagatttgcttcattctgtttaaaggctgccaagtacttttataacataatttcaccagctacatgttatttctagcttttttacttgtataaacaatattttgtcacgaatactcatatgtgtgcattctattgcttttgtaggtatgtgtataaggtattcctagaagtcgagttgccagttcaaaggatctatgaatttaaaattttgatagattttacaaaaaaggctgcatcaatcttgactcccatgaaaactatatgcattctttttatgtcacatccttgctacctctgggtataacctatgaaaccttaaaaaacaggcttatcctatctaatcttaggccattttagtcagaatcttcttctgggttaaggctttaaaaaaaaatcttttgccacatcatgcagca

SEQ ID NO: 59938 - DNA, 1276 bp, Bovine  19866881313092
  misc_feature (1)..(1): n is a, c, g, or t
nttggtgtcctgtcttctgtacacagttgaatgggagccatttggtttgagacatctaagagttgattggtggaaatggtatacagaatgctgcggaaattggtggaggccatgagtgctgcctagaacaacttaccctggtgctccacttaaaccaggatgttactgggaacattaacacaacttctctaacatgcaaggatctgccttccactttcattgtatactgtcatgaataaaaaaaggaatgttttaacatctgatataatcccatcactccttatttgtgggatagtgtgaagaaatagaccaatatcttgatctgactttataaaccatttaatgaacaattaaaaaataaagcatatgattcattcctctatagttgtcttttaataaaacagacatgtgagggcttctctggtggtccagtggctaagacttcatgctcccaatgcagtgagtattggttccacccctagttggggaactagagtttgatcaaaagttttagcaaagatcccacattctgcaaactaagacccgatgcagcctggttttaaaaaaatgtttctttttatttgtatttggctgcaccaggtcttagttgcagaatgtgggatctttgatcaaactcttgagttgtggtatacaaactcttagttgggtcatgtgggatctcaaaagaagaaatcctaaagttgcaactggggtccttgttcataaaagtgcctgtgtcactaatagaaggctggagaaccaggattcccttcaggtctctggggcaacaggccaggcgaccaatcaactcttgtaggcctaggctcattgttggaggtgtaaatgttgctatgactactgaatccttggtgactaaacagaaatgagagcttgttcagtctcctaagactacatcaaggaagtctgtagacatgtccatggaaaagatgggaaaagtagaagaggtacgcagagttggagaaggctgctttggatgagtttcccctggataaggtttccagatgaatttatcagaaattgacagttcttgagagaggcccttggtgtaactgaagggtagcagcaggggtgggagactggcacgtagtaggtattccaatatttgttgcatactaacccctgcataataggactttctccacacctgccctaggaagttggctactcccctctctccgaaaagaaaggtctttgtctcccactatgttagggcactgagggtgaggtactagagatcaaggcagataacagaact

SEQ ID NO: 59939 - DNA, 944 bp, Bovine  19866881405579
  misc_feature (1)..(1): n is a, c, g, or t
ntggctgaaactgatgaagaagaaagtgtgttgtctctctgaggatggtaacatagagggtgagctcaggcgtctgtcaggctcaagagcctagggtctgagtctgcactgttgtgtatgtgtgtcttgtgtgtgactcttggggcttccatagctggaagatgagctggcagccatgcagaagaagctgaaagggacagaggacgagctggacaagtattctgaagctttgaaggatgcccaggagaagctggagctggcagagaagaaagcagctgatgtgagtatagggaaactggggggtgggtttaacctatgcaaatagatcttcatgttaataactgaattctaaacacacttggacatatacacacttgtggattctcagaacataggcgtagatacccacatgcatttttcccacatgctggtatacccttattggcacatactttcattctttaaaacttgcagaagtctcatttttcttacccccaatccaggaatttaattatctttcccaggacctggacaaagggagggaactccaagtccagagtgctatcatttaccccacctcctcccccatgccacattcttagcttttgtgtccaaggactggcatgtagatatgtgtattaatagggaacctctcatctctcaactgcccagcagagctagctcagatttcacaatgggacaaaggaggtcacactgaccctggccctatatgggtttatttatcatgggcaatgtgggcatctgaccttatgccacagagatgccatagaaagcactgcttatagcacagctgagagaatcttaatatcagaaataagaaggaccaaggagtaaagttgttaccaccagacctcactctgtgacctgactaaattattcagcttctctagggctaagttttcccacttaaaataaataattct

SEQ ID NO: 59940 - DNA, 1225 bp, Bovine  19866880927168
  misc_feature (1)..(1): n is a, c, g, or t
naccctcatgatgttctctacccacaattctcagtgactgtagaccccctcagagtgctctatgtacataattttcatagtgaggcttagacttgttatagcatatgtgaggcatatacacacaagcttggtaacgttaaactaggatttgaatatcagctctgctgttgactagcagaaaaaaaaaaagttttcttgacattttattgatgaagaaattaagcctcaatgtgattaagtaactcaagatcacacaggggagtaagcagcagagctggtacctgaatggtagacttatgatcccaagcctgtgtgtataccccttccatctgctgtaaccatcccaggctcagttttcaagttgtaaaataggggtaaaacaacttcctcagaaggtcattgccagggagaccctgtaaagtgtgagcatagtaccaggctccatagtgattcgttcccttcccgtccctgccccagtcatctttccagatcaaaatgaggggaaaaagtgtggtctgcagccctacattcttgggatgctttcctccctggtgaaagtggagtgccttaaaacgtctttgcctctctttccttcaaggattttgatcaaggcatcagtttatagtgatgtgttgagggaagtgactcaatagaaattcagtgcaggagcaaagttacttaataagtgtcagtgaaaattgatagctttacacactgtttattcaacattgcaatgttcatttctgaggaaaggtgaaactgcaataaattctttttttttttgtaattttgataattatatttattaactataggaaagtagtaagtttcaccgtgaaaataaaaacaagattatataaatgatattatttataattaaatattgaattaatgctcattttgtaaaagaaagttgattttgggggtacataagactcattaacaatttagagatagtcctgcctttaccatatgtgaccatagaaggactattacctctactagctttgtattcctaaagtgaaaacatgtaaagtcagaaatgttcttctgttgcagttttctgtttcttaccataaaaggctgacaataaaggtttcactggtgtctggtttttatctatgaaagattatggatgtattaactcatattaagcatcattaaccactgatgcttctggagcaataatttaatttcatatttctatctatataggactctactt

SEQ ID NO: 59941 - DNA, 1615 bp, Bovine  19866881085515
  misc_feature (1)..(1): n is a, c, g, or t
nccattaaaaatagaagttttaaaatttatatgattttccccagtcttacatttcatttcattaacagccaagtcagttcactcctataatggtgacataaaaaagttttatgcaaccaaatatttggcatttcaagcataaggataacatttcagttttccgtttgtgcttctactgtggacattagataacttgtgactcaggcacaaatacaacctcttcctgtaagcccagcatcacccaactctgtcattcaaaagtatctatgtggtccttgaaaacagctgcagacaacagaacctgggtaagccacctcttgtatggacagaacaaactcattgacgaactgggtaccaagcaagaggatggcagggactgatgcagcctctggaagctgtgctgtcgtgggcatgttgagatcagtcctctgtaaggtgtgtgtgtgctagaacaggagaattcttccctctgccattaaagcactgttgctttttcttttcaaaaaaaatgagaatcattgcccacataagttttcatgcagcattacctgcaccggtgtccccttcctgagtagtgaagcaaacatgttttctcagcagttcacatcccaggtgtagctctggttaccagtggcagtggtgggggctgaagacagggcaagtaggaaacatcatctcttatcaaatcactgcccagaaacaaggacctgaagtgctttataattttttaacaagtctccattcctaagataaatgactgaaaatcaactgagtttcatgaaaagcactgtttctagccactgctcttcagtttgccctacacgagatgctggataaaccagtgagtttgctttctactcacagagaagttctaaaccttggatatactgcagtgatgaaataagaagcctcttctgatttacaaactggtttaaatctaatgttgtacaatgttgtcttatgcaaacatctgcagagtaaattaccttgcatccatgctactgccacgctatgtgacacagataagaaaggtttgatctcagtttccccattcaggctcatgcattttttcaggtctcatcaatttatcctaatatgcctccaaaggacatcaataattgcttcctttaaaaattataatcataaatagacatgtttcagcttttgtaaacacttgctcaggcatagaggtgcatttaatataaatggtcaaatattcgtaaggaacagtctgtaaactgattttttaataaattaggcactttaaacacgcaacagagagtatgaattatttatagaaagcctatgactaattcttttgcaaacttcccttttgcaatctgaacatccaaaacctgatgtatcagttttgtaacttccagacatcatcagttcagttcagttcagttcagtcgctcagccatcacacgtcaagcataagattgcctaccacggcacctggcacacagtggcattcaataaatgttatgttttaaggcattttaaggagatccataaactaatctatatatcatagtgcatccagacacagttcataaaatccaagaacaagtttagattcgaaacaattcaggcatattagttcccttcagat

SEQ ID NO: 59942 - DNA, 2273 bp, Bovine  19866880463634
  misc_feature (1)..(1): n is a, c, g, or t
ntgacttcactttcatttttcactttcatgcactggagaaggaaatggcaacccactccagtgatcttgcctggagaatcccagggacagcagagcctgttgggctaccgtctatggggtcgcagagtcggacacgactgaagtgacttagcagcagcagcagcagcagtatctgagaaacacgatggtttcattaagcacctcctgttcgaaagagcatttttggcaatatactctaccttcatgaatttccaactttgaaacctggaggattatgttctgaaacatgctctttagtgacataaaaacaatcagttatatgtgcttatcctgcctcaagatgatgacctttccaggggtatttgaaacatggctagttctttactaaggctaggcattttgaaattggcaaggacactaaagtgttttgttccccccgccccatcactgcccatgaacaataaagttggcacaacattttattctcaagaaaatgatacaacaatgtttccttagtcccaatttcgctattgccttaataacattgctaaaatcatttcctagttgttttagaaatatagaagagtaaatcctcttctcaaataatgaaattctgaattatttagaaaatctgtctgctgttgagtgctttattttttttccacgaaaaataactgatttgaacctcagtttatacattttaaaaatgagcatgtgcactctctaccccaaatattctttgacatgttaatagtcacattttggaacctataaggattccacagagaaggtcaaaagatacatctcttcatatttatatctgctaagaggagagttctgtttataagatctcatcatggaaactcggagtaaatccagcttcaaacagaagataaggtttgcttcactacaggaattcagaagctgctacttccacatttacacaaaacaagcctcagacaagtcagaactgcaatccaagcagtgacctctatctgagcccccataaaccagataattcacctctgccccaagcaagctactgactggagatacgtgatgctgactgcatgcagatcttctcagcaatctactcgcagatatgactcttctctctggaaagaaaaatgctcagtggaaatagaaacaaacccaatttggatttcctgaaaggtcagtttgctttagagaactatctgctcacatggcagtttttaaacactggtgctcacatcaaggtttcctgggtagagattgaaagttaatattcaaatctaggtccataggtgttatggtagacttcttaatttttttttaaccttctaatgagttgaaaacatatttactgtgtcaaaatatttctagtcaatagatactattttaattgtatgatgtactagcagagatatacttccaagcattagttgtataagtcagtaatggaattataaacaagatgatgttttatgaatctgtataaaacgtaggcatatggcttctttacatatgcacaccccagccacaaagaaatagttgtatttcagcattgtaccaattcttctctttcataaaaatgttttcatgtttactcaacagtctaatttaccagaatctttgtgcttcctttgcttataaatttagtgatagttggctttttaaagtaaaatggctataaaataatgttgatttataattcatagacagaactgaatgccacacaaattgaatgtaaagggaggattcactagactaaatcttctgcggggagtagccatgtcttcataacacttatgaaatgtcttcccctctgttcttctgcctactgggcagagtacaagaaaagaactctgtcctcagtgaatttttcagggataaatggaaggttatggtttattgtgatctgcatctgaaatttgatcagccttgtaagtttggattccatgtaatggtgctagaaatattttgccaatttgaagtcaaaaaaaaatgaatgagcatcaatttacaaagtggacacatcctttgcaaattaagtgggattgttgctaaagccagatgaatgaacctcgcatgcatgtatttatagtagaagccaactggagcttgaagttaaatgtctgacaagcagcttggccaatgtggtcaaaacagacaatcaatccaagatgatcaatgccagagccatttagctgtaagtgaatcataccactcaataatgtgaaaaatacctcactggtaaatctattctacctgaattctatctactgcttcag

SEQ ID NO: 59943 - DNA, 1752 bp, Bovine  19866880467292
  misc_feature (1)..(1): n is a, c, g, or t
naatttaaggctataatgtcttcaatgatagaacagagtacgtgaacacttaacagacatcacctgtatttatttatgaccttgttactaaagcaggtccttgaatgctgtaatgaatagaaattgatgagagggtagatgagaatttcaggcaaggctttactgggactcctgctgtagcacatggtagtgaaaacaagtaacagatttccttgttcattcccagagggttatcagttcccaaaatggggtgtgggtagggctaatccgtggggtgggccagagtgcggtctcaggtggtctgtccacccccttggtggctctgggcacgggtggagtgtgcagtatcctgcttctcctcctgccacctgagaagaggctattgggcttttggtctcttcagtcctcaatattaccaatgcaacattgcataaagtcagttcctttcttcttgtcatctacgctcctcagcctgcttgtcttcatcacaaactgggtaagtaccctgaggtcagagatgaagttttaaatgtttttggtcagaattatccacagagcatagggtctaaatgtatctgtcaatttactgattaattgaaacttggcttccagaagctgtgatactactactactaataatgatactgctgctgctgctgctaagtcgcttcagtcgtgttcgactctgtgcaaccccagtaatgatactgagatgaatataaaaacatggagtgagtgattgcatacctagagaaaatagatgccagcgaagcacacacccaaccatccccagacaagtctcgttttcattggaaaggaaaattcttcctaataattttactttttggttgttttcaagggtacatttaaaggaagagtgtcagtctaacccagtatttctcagtcatggctgcaccatagcgtcctctgggaagacactaacacatactgatgcttgctctaggttgtgggacaattaaagtggattctccacagcagcaactccaggagtgctaagttttagaagctccgcaagtgattctaaggtgcagctagacttgagaaactgcactagctgtacatgtgtgaacagatagattgagtgacagaggaaacaaggttttcttgataattgtgtagaattgaaagtaaccagttctctccccacattcctttaactgaggctatccatattcttaacattgtatttaagaattgtggcaaatattttaatcactacaattaagactattttgtttgacttgttatatgacctctgctcacagaaactaaattagaaaacagtcctatggtagaagtttaaaaactgtttgggaaagtgcaaagcatttttacccttcatttcaaccttctggagagccctagatttggtgaggggagagagtagattaatcaggttataggatcatttattttttatcctttctctggaggatatcagcaagagctcctacgtaggagacttatttttgtaatgtgagcaattgttctttaggaatgaaattctgttccacttacaaaagacgtgagaaagctcagggtgcccccttgaactgtctgacactttgcacaaaaggtaaatctgctaaaaatatttttttaaaaatacttgaaattctctcccaacattttctaaagtgcagaagaatgagaaatcaacttctagaaaaaggaagaaagaacagaaaggctaacaaggcccacaagaaagcaattttctgaataggaaaa

SEQ ID NO: 59944 - DNA, 774 bp, Bovine  19866880714608
  misc_feature (1)..(1): n is a, c, g, or t
ntaagataagatctcaaattcttaagttctcaagataatagttctaaagagatatttttatccacaccaccaatactgagtagattgcaggaaaaataacttttccttcccatatttgagagtcactgtttttatagatattctgatgttttttgttgttgaatttgtcctaaagagagatatatgctcctgagagtcatggttgccagaaagtaggaggctaggaaaacacatattttttttttttcttttttagccatctcttactagtgcccaagagatataataatgtatattgtataatatgtatacattataacaggaattgagagaagaatttagatttgtttaaaatgcattgagttgcacttggaaagatgtaattgcaaaggtaaaaaacaaacaacaaaaaagcaataaactcttcaaatgccagaaatgagtagtaaaccagagttgtagttgcatagagagaatcagtcactgatttaaaaactgggctcttagtatccacttggaaacctgagcagagaaaatagacagcgtgcatagcagaacgctggaatgaggcttcctgcaaacggctgatgccctatagaagttgccctttctgtgaaacaagaactaaaaatattgaagcactagcagtggaactggctaaaaaagtaagtcacccagcctgagtctctggacattctgaaatggcctatgaagtttcactaagcttcaagcttgttagtgtgaacattacaaatgaaagctgaccatgcagta

SEQ ID NO: 59945 - DNA, 3582 bp, Bovine  19866880769865
  misc_feature (1)..(1): n is a, c, g, or t
naactggtctgggacagacttcaaaaagaaaaaaaatcaggtgacaattccttctgtctggcacataaactttcacactcatcacagagttacagcttatcatgcaaacgaaaggcatccatttatcctgagtagtgtataatttcattactctaaattgttgctaattgtcttagcctgtggcagacaggagacagtttaggattcagtttgtcttaagttgcaagactttggaacaaatcaccacaatgtatgaatgtgaattttctttagcaagagtctttttttaagaataaaaactctttcagaaacacagttttgaccccaaacttaatgatttttatacagtcagtactggaaattgtgttatacataagctgcattatgacattaaaaaattctccagaattattattctccagaactattattttaaaagagacttctagccaacttttttcaattaagaatattgcttccacattgaatggacataattttggcaaaattcaatcaccaattcactcattttttcattcatatttttatatgcaagtcacaatcttattttatttctgctattgactatttttctttacctaatttaatacactgtttatatttgagcctccctttcattgaatctcaagaaactactaaaactataatactgatcgcttttcctaactcaccatgcatgcagtaagaaaagaatttaaaatttatgtagtggtggtagttttgttgctaagtcgggatcaactcttgcaaccccatggacggtagcccaccaggctcttttttccatgggaatctccaggcaagaatactggagtgggttggttgacatttccttctgcaggggatcttcctgatctaggaatcaaactagcgtctcctgctttgtagatggtcttatgcattgtaggcagattatttactgttgagacactgtggatttcctcaaaatttatacatgggggcaagtagctaaaaaagtgctatccttcacaggagtaatgtcatttaaaaaataaaagagtggattttcaaacataaagatggatccagatatctgttgtgctcattctttgtgaaggtgagagtaacagtgtagagggcatccctttattgaatcatcaaaaccagtaataattaaatgactatgtgtacaaacacacaaaaaacaggataaaccctataattatttccccagtcaactataatcaaatgtaaatattattcagttacaaactatcaggcagagagccaagcctgctaacaaatatacattcagactttggcaagcatacttggaatgtagaacccacatagtttaaatggtttattttacataaacagttacagaccagaaaaagtactctcaagggcaggttatgaactgaattgtattcttccaaattcatacactgaagcctcgactcccagtgtaacagtattttggaaatagggcccaccaaagctaagtatgaaatgaggtcataagggtagggtcttaatccaatatgactggtgcccttaaagaagagaaagaaatatcagtgaaatggccacatgaggtcacagtagaaatgtggccatctgcaaaccaaggatagaggcctcagggaaaaccagacctgctaacactttgatcttggacttccagcatccagaacaatgggaaaaataaatttacattgcctcagccacctactaatagcattttgttatggcagatctagcaaaccaatagagggtgtcatctcttctcatatctcttgggcaccttctgtacctttctcagagtatacacatagtttagcagaaagaatttctgaaagatacactcatggacatgcaaagagagaagaagtcttttgttaaatatagagtttatagttgtgttcaaattagtaacttaggaatcaaaagatggagaattgagaacaattaggaaaaattttattcatctaaaaagcagagacattgttttgccaacaaaggtccatctagttaaggctatggtttttccagtagtcatgtatggatgtgagagttggactataaagaaagctgagtgccgaagaattgaagcttttgaactgcagtgttggagaagactcttgagagtcccttggactgcaagaagatccaacctgtccatcctaaaggagattagtcttgggtgttcattggaaggactcatgttgaagctgaagctccaatactttggccacctgatgtgaagagctgactcatttgaaaagaccctgatgctgggaaagattgagggcaggagaaggaggggacaacagaggatgagatggttggatggcatcaccgactcaatggacatgggtttaggtagattccagcagttggtgatggttagggaggcctggtgtgctgtggttcatggggtagcaaagagttggacacgactgagcaactgaactgaactgatttgaggtaagagtctaaaataaatctccaaaagcagttgtgctataattcctaggttgaatgtggattagcagtaaaagaatctgcctacactgcaggagacacacaggagatatgggttcaatcgctgtgtcaagaagataccgtggaaaaggaaatggcagcccagtattcttgcttggaaagcctatggacagaggattctggggggtacagtttatggggtctcaaagagttgggcatgacttagagactaaacaacaacaacaatattacatttgtttcttggttctcagacacgactgagcaacttcacttcttctgaacaacagatatggagtaagctaagactaaccccacttagggagaaggctaagaatagggaatgaaagaacatgcaacacatccttctttgtcaaccaatagtagaacatcattgtaatgtaaccaacctacagcaaaagcaagagcagtgttcttctaatctaatgaagccagaggaataagatggtctccaacagggatcactaggataactctcctctatggtaatttatgggtaccgatattcaatctcactgcaagccactgacaatcagctagtatctgaatattaatatcaacccagctgttaaaacactcagatcctttccctcttattttctctccaatagaggatatttagatgaaagtaaaaggaaagatgctaccacagtgtttcctgggggctagcaattttcaaagtataagtaaatatagataaagctgatggacaggtactgatttattttgaggagcacagtcgtttagaattaaattctttctagatgcatttctgtgttacatatacacctgagatgcctattcattgggaatggagacagacaattttcaaagacttttagaagggaggatgagaataagtcctagaagaaaactctcaaaaagcattgaatgacagatggtcatagtgaaaaaggaaggaatgatcaaaggcaaactgcccactgtgaatttgctttgtttgcctgtgatttcaaataaaacactctcagggttgtaagaaaataaaatggtttttggtaattggaggataccccgaactgctgtgccaca

SEQ ID NO: 59946 - DNA, 1760 bp, Bovine  19866880817339
  misc_feature (1)..(1): n is a, c, g, or t
ntgcatagcttaggtcagttccacatctattcttttcagctatttgcactaaaaacatttcactgttctgtataaaattgtctgtgttgtgtttctgcttatatgctataaacaaatgaatcctaaatgatctctcaatggaaacctctaacaatagctaaattagggttatgggtgaataagcctttccatttttgtaactgtactacgtaaaacgtgccacattctaaaaatgttaagttcttgaaatcatcaaagactgactttaaataaagttaccaatttttagattacaaaagtcttgacatcaattatcacaagcttttaattaatgtctcaaggaaagaataaccatcagcatattaattaactgacatttaaatatattagaatatcatcaattttaacatttgttttaattgaagccacctatttccattgtattaatcagcatctgtcataattacgctttactgactttcacttttgtgttttttcaaagtaatatactcatcaatattttcactttcaatagtatatacagccaatttcaattgtatattatatacagccatatttgtatataacatacaatttgtatttacatatacatacatgtacatgtgcatatgcatatataatatacatatatatgtatatgtaaattaagtactttatgcaataaatgcaaagtatcatttacttaataataaagcattggtcatcacaatataaaattacgaaacaggactcagtttaattgcttttgtaaaaaataaatatatatgaaatcatttcttgtttgtaagaaaattacttaatctttttggattctcaatctttatctacataaagagtaaggtggaccatattttctttagtttctctccaaatttcaaactgcatgaagtaaggaataaaaaatcattattgttcgaaaactttgtcaccagaatgaattcctcaggtcaaggtaaataatcaaaatacttaaaaatatgatagttaaacatttttactggtactagtagtatcttaagactgttaaattacaatatgtttattttattagaaattggtgacaataaaatgtgttaaggctatagatattttttcagtaagcatgtgtattttgccaacagaattttaagctaaagaaagagagttgaaaaactatttaaaaaagagttatactctaaataataaaagcttactttgctattggcccatatgcaaaagctgtagtaaagatgattaaaaaggagaaaaaggaaacagtatttgcattcattctggtaatagaatatgaaattaaagcatgaagggattaatgttttaaagcttgacttgcagtgataaagctaaggtattagaacagacaacataaccgttacaggatagacaagcaaagaaaaagcagcaaatgccttaaagatgagcaagtcaacctagaatggaattacaaaatgattaatcaatacaaatgagaaactgtacaaggaaagagagcttggtgagacttcttatgggactcaacactgcggccgcttaaagataatgaaaggagccgggcaaagccaaagaaatgctttcattccgtggcaaagtcatttgtgaacagtttaaattaccctaatcacctcccctccagccgtcagtaggctctgactctttagttatttaaaaaaaggagtttggggaaatgagttttgcgaatctaagctgcaaaataattatacacacaccattttagcatttta

SEQ ID NO: 59947 - DNA, 3652 bp, Bovine  19866880825220
  misc_feature (1)..(1): n is a, c, g, or t
ntatctttattattgttaagttcttaagattctcttcatcgatttttgtttgaccttctgttggtggtttctgtactgaccttaaattccatctgctactacaactgtaggtactgagtttctcttacaaacaataataataaattatgtatatacatgtatatatagcacacacatatgtatgattgaataattactaacacatttcaaaaatgctttctgttgttcaaattaaaagtgatatttaaaaagcaagctcacattcctgaagcctgcaggataaggaataaatgatccaaagaataataaccaaagtgtgaactatggatctcatggtatctgatctaatagtttgaaatatatatagattccctttcatgaaagtaaataagtcagttgaaggattgaactggagtgactaatgcagtatagcaatagaactgtgtccttctttcccccccacttaaaaataatgataggttcttctggaacctgcttaagtaagtgacactcgtagagatagattgctatgctgtgacatatggtgtgctggtattgcggttgtattgtagagattattactagcagcaagattttatagttattgcctgtcaaagctggtgttttaatcactatcatcaacaccgccttcaggttttacctcatcttctatccagcaagccaggccagtgtgtcatccaaagagaaactcattggtttgggcctgttatttcattaagatatatatttgagggggacaagtgaaagatgatttttacaaggagggaaaaaatgctctcctggaaagaagaatttaaggactgcaattattgatctgaggaggtgtaataccagttagtttgtgaagaatccataagcctgccttggagatgagggagggctaaggggatgcaggtgtttcctcttgttcctgagagcaattaagagatccaaattatttccactgttacctaataaggcaacaagtgtcacctgatgaggttaattcccagcactattaatgtaaacattgctcagcttcttcagttcactggcattttgtgtatttcgcagcctcagagaggagaggtgaaagatgcaaaccatcggtaactaaaagtcacaagtgaaggagtaaatggaaatgagttagggatcctttggcatttgacctttagttatctgggagcgtccctggtgactcaagcggtaaagaacacacctgccagtgcaggagatgcaggagacgtgggcttgatccctgggtcaggaagatctagagaaggaaatgcaacccactccagtacttttgcctggaaaatcccgtggacagaggagcctggtgtgctatagtccatgggctggcaaagagtcaaacatgactaagcacatcagagcaacagtattttattatagttaaaaaagaaagtgaattcaagtaaccctttatgtgaaccaaatcccaccctgacatcacccccaaggttttcaaagctaactattcctagtgtcaattactcagttttacaaggtagaatacactccgatattttcattttgttttgtttagagggaaactagactatgtcctcaaatccttttcttccttctattgaaatataaatctggtggaaaagctttgacagtgaaaggtacagctgtggggctcttttcccctttgttacaattgacctcttttccggcacattagattcagcctcagacttaaattgcaaggtgttatgaataacgtgtgactcacttcaggctgggctggtagagttcttctttctcagcttctcagcacatagcacctcctaaaaagccaagagagacaaatttctcatttatggagcacagcaggtcagccccttccatatgctcaagatttgtggctttgtgtcacaggcagcccattctcatccttcaagtcctaatagttcaagagcctcaaatccctttgaacccagattaaatggattctggaaaacatgctaccatggtgggcggtgtaatgttctcttgaagtacagtgcatcttgagccttcctagactaccctttgcctatctatctagttggtctatttatcatcgaaaaatggtgtgtgtggatgactatgtatatatgcatatttatgtataattcagcatgcatatttgtatcattttactctcttggcaagcatacttcaagactcggctttctcagccaaaatgagtttcacaatttaaatataatgccacatcactttcttgccaagtacgggggacacattgagatgttttctcctgactgagctcagcctgcaagtattataggacattcccactgcagtgtgatcctaaaggaagaaacacctaatctctggaaccattcttgatgcagtatcaagagacaagaagtcctcttaatctcctttccattgggatcagcatttcaagaaagtatccccaatatcctagcttatctttatgctattttttcttttacataaagagtaaacattttagataaacattttaagctgttcccaatttggtggtaacttaaatggactctttgtttaaggtaacattttaaaaatcattgttaaatatgcttattaaaagcatcttctagcctcagaggtcagtgaacaaatctgttctggatattattgtttctatagaaccagcatcccttcttcacttaggaataaaactaccatatgacccagcaatcccactgctgggcatataccctgagaaaagcagaattcaaaaatacacatgtagcccattgttcactctagtactatttataataaccaggacatggaagccacctagatgttcattgacagatgaatcgataaagaagtagtggcaaatatatacaatggagtataactcagccataaaaaagaacacatttaagtcagttctaatgaagtggatgaacctagagcctgttatacagagtgaagtaattcagaaggagaaaaacaaatatcatatattgacgcatataaatggaatctagaaaaatcatactgatgaacccatttgcagggcaggaatagaggtgcaggcagaatggacagatttgtggacacagtggggtaaggagagggtgtgatgaattgagagagtagcattgaaacatatatatatatatatattaccatgcataaaacaactagtgggaagttgctatataacagagggagctcaacctggtgccttgtgacaacctagaggtatgggatggggggtagggagtgggagggaggtttccaaagggagtggattatatctatacttatagctgtttcacattgttgtacggcagaaagcaacacaacattgtaaagcagttatcctccaattaaaaataaattttaaaaaagaacccatcttccttccatcttcccactagttggagaaactttcctttgattaatattgctgtttatgatgtcatcatagtagggaagacaatttttcattattattgattttgaaaatgttcttggcattccttatatactcattcttccatgtaaaatttagtatacattttataatttgtatttccctatgaagtgttagtcattcagttgtgtctgactctttttgacctccggactgcagcctgccagggtcttctgt

SEQ ID NO: 59948 - DNA, 1400 bp, Bovine  19866880830854
  misc_feature (1)..(1): n is a, c, g, or t
ntgggttgaagtgacctatgttttctacatcgtacgtgtagcattctctcaggaggtagaaggtaataggagccgtgtttctccagaaaataagacagaagcagaatggtatctaattaaaatgtttacaacatttcccatgagatataagccactgacattttccagactgcaagccaagaaatgcttaggattatacagatgtactttgcaaactacaattgccatgcaatgaaaacatagcttagacacagttcaggaaatatggatcggataacctttctttagagctcagaaattaaaagttaggtcctatgagaatttatggttaagttgagcagttcatctcttctaaaagtaaatcagaaatccatttcctctgcttcataggtcttcttcctctagaatggtttccaacatctgtatctgagactgccgaaaccagagctgctttgttgtacttccttttcctacaaactgctctcatctctaccagaacacactactctttgctttagttgtcatgctctggtcctccagcattatatatctaatatgtaaatgatgatactgaactcgtgtgtgcttagtcactcaattgtgtctgacaggctcctctgtccatgtggattgcccaggcaagaatagtggagtgagttgccatgccttcctccaggggatcttcccaaaccaaggatcaaacccagatgattctttaccatctgagccaccaaggaagcccaagaatgctggagtggatagcctatcccttctctagggcatcttcccaacccaggaattgaactgggttctcctgcattgcaggaagattcattaccctctgagccaccagggaaactcaaaagttacctccactcgtcttaattgctgtgttccttaattccttatagtattagccatacatatatcaaatgatatatgctttttgatcaaatatcttgttccaaacatctttagagagaaggggatgtatcaacaatcaatgtagacagactgccagttctcataaaacacattttagttcaaggagacgacagataataaacaagagataagctgtcaatagttttttggacactaataaagaatacaatgaagaaaatgaaacaaaagaaaagataatgataacgggagggtcacttgggcatttgcattcagtccctcagaatgcagatcttcacttctttccttcaagtactggtactgccctagagttatttatatatttattttttcacacacatatgttaccaaatctttattttatttcccacagttcattttcattagtctaaaataactgtttttaggagaatagtgtgagagtgtactttatcacttcaagcttaatttcctaaggcaatagatacaggtctttg

SEQ ID NO: 59949 - DNA, 3026 bp, Bovine  19866880841079
  misc_feature (1)..(1): n is a, c, g, or t
ngaattattgtgtggttccagctacagatgtttaaggagagaggtgagtttggtgcctggcctttctacatgattctattttattacttctcactgtacgataaaagaccaattttaactcacttaaatccataaaatgggaaattcatctcacctcagctgattcatttccttcaaaggaaacatttttaccataatgctttttgttgttgttgttgggataaaactgaattcttaagggaatcatttaattctacagagaattttgatattgggataaggtctcagactatgcaatcaaaactaacaataacatgattaaaataaaataaccaacatgttgtttgaaattacatactcataggaggattccaggatgtgaatcatcagtgcttcagaattttatctaagaatagattactaggaattaggataaaattgcaccttctaaagtaaattataaagagcgtttagcttgacaggcacatcccccaagtttagcttacaatatatgattttgtgaagaaagtacaacatactccagttgttaccctagaaacaaacattttaaaatagaaattagtttttattcatgttggttttgattgctttaggcaacataattttagttagataaataagaaatatctgaggatatctatgactattctaaagaaaaactgagtggccttttctaagttccttagtcagatcggttgctcagctatgtccaactctttacgaccccatgggctgcaacacgccaggctttcctgaccatcaccaactcctgaagcttgctcaaactcatgtccatcgagttggtgatgccatccaaccatctcatcctctgtcctccccttcttctcctgccttcaatcttccccagcatcaaggtattttccagtgagtcagttctttgcattaggtggcccgaagtttggagtttcagcttcagcatcagtccttccaatgaatattcaggactgatttcctttaggattgactgattggatctccttgcagtccaaggaactctcaacagtcttctccaacaccacagtttaaaagcatcaattctgcactcagctttcttgatagttcaactctcacttccatacatgactactggaaaaaccatatctttgactagatggacctttgttggcaaagtaatgtctctgctttgtaatatgctctctaggttggtcaaagtttttcttccaaggagcctcttttaatttcatggctgcagtcaccatctgcagtgattttggagcccaagaaatagtctctcactgtttccattgttttgctatttaatgccacgaagtaatgggatgggatgccatgatcttagttttctgaatgttgagttttaagccaactgcttcacttttctcttccactttcatcaagaggctctttagttcttctttgctttcttgcataagggcagtgtcatctgtgtatctgagattattgatgtttcttcctgcaatcttgattctagcttgtgtttcatccagcttgtgtgaaataccaacctggcatttcacatgatgtattctgcatttaagttaaataagcagggtgacaatgtacagccttgatttactccttcccctatttggaaccagtctgttgttcagtgtccagttctaactgttgcttcttgaccagcgtacagatttctcaggaggcaggtcaggtggtctggtattcctatctgttgaagaatttccacagtttgtggtgatccacacagtcaaaggctttggcataatcaataaagcagaagtacgttttttggaactctcttgctttttcgatgatccaatggatgttggcaatttgatatctggttcctctgccttttctaaatccaacttgaaatctggaggctcatggttcacatactgttgaagcctggcttggagaattttgagaattactttgctaagatgtaagatgagtacagttgtgcggtagtttgaacattcgttggcattgcctttctttgggattgaaatgaaaactgaccttttccaatcctgtggccactgctgtattttccaaatttgttggcatattgagtatagcactttaacagcatcaacttttaggacttgaaataactcagctggaattccatcacctccactagctttgttagtgatacttccttaagtccttttgactttgcattccaggatatctggctctagatgagtgatcacaccatcgtggttatctgtatcatgaaggtcttttttgtatagttcttctatgtattcttcccactgcttcttaagttcttctgcttctgctaggtctataccatttctgttctttattgtgcccatctttgtatgaaatgttcccttggtatcactaattctcttgaagagattgctagtctttcccattctattgttttcctctatttctttgcattaatcactggagaaggttttcttatctctctgtgttattctttggaactctgcattcagttggttatatcttgcctattctcctttgtctttagcttctcttttctcccctatttgtaaggcctcctcagacaactttatgcagttctttttcttagggatgatcctgatcactgcctcctgtacaatgtcacaaacctctgtcatggttcttcaggcattctgtcagacctaatcccttgaatctgtttgtcactactactgtataatcataaaggatttgatttagatcatacctgatcccaccaaaaaaagacagcccacgctcaagcgcaaagaagaagccccagcaagacggtaggaggggcaaaattgcatttagaatcaaacctcatacccaccagagatgctcagagggctcaaacaaaactttatgcacaccaggagaccccacagagactgaagtagatctctctttgagtgtttgagtgtctcctgcagaggtatgattcagcagtggcctgccacaggggcaggggctcacaaatctaaatatcagtcaatataaat

SEQ ID NO: 59950 - DNA, 777 bp, Bovine  19866881096373
  misc_feature (1)..(1): n is a, c, g, or t
ncattcctaccttctaccatttggaacaggtacacgtatcatttttatttcaatatatgattattattgggggttttcctagtggctcagaaggtaaagaaactgcctgcaatgcaagagaatggggttcaatctctggattgggaagatcccctgaagaaggaaatagctacccactccagtgttcttgactggagaattccatggtcagaggagcctggcgggccacagtccatggggtcacaaagaatcagacacaactgagcgactaacacacacacacatgattattattatacctaatgtcatgagtgagagagtaataagagttactcttcttcatccccaaatgatagtgaatgtgcactaaagctaagatggtttccttcttttattattttttgcattattctagttatgttgactgcataatatcaatgtcccagtattatactctttcagatttatttgttaagtgtcagattgatctcttttgttaacttttaagataatctcaccagatggcattaagaatatattaattaaattaggagttataataaagatatacaatattttttatccccaggaaggcttaacatttcattccctttcttgtatttgtgttcaataatcccaaatgtcatgaataattacatgcagttatttaaaaaaatactctgttgagatagaaaatctaccagatgctattataatcactgtttcttgcagtttaaattttaggcaattgtttggagacaagttaaaacaaaatgg

SEQ ID NO: 59951 - DNA, 791 bp, Bovine  19866881392713
  misc_feature (1)..(1): n is a, c, g, or t
ntgggaatgatagttttctaagccattctgaaatatcaacatcatcccgtaatactgcatttttataatcaatagtttttcaatttttggtttttgcatttgtttataatctctgtaatttaagagtttttcttatgcctccataaatgcctagctatattttccaccttccaatttcatttgcattcctagttttggccatcactccttagttcagtctttggatgatattatctaggtgcaaattggtcatagcttgggtttctttttgttttctcacaaatttttaaatatatagataaaaagagaaactaacaagattcatagtctttgacttttctttgataatagaacaatatggtactccagactatggcattagggtcctaaagccaaactagcagtcaataaatatcatgaaccacgaccaatgtgaatttgattactcagtggttatggagctgaaactgaaagcctctgaaaagaatcctaagcttgtgacatttacaaagctgtttctaaagacaaaacaggtatgaaaggtcatggcagactaaggctttgggggccaggaggagggggcaattcatccacaggaagattaaaggattcaagttttgagaacaaagtttgtaattttcctgtgtacaagacaagatgttgtttgtgatgcatatatctgccatgcatcttaagtctgaaaataagatgaagtgaatatagaataacttgcctttacttcagttcattctatcaggtactgtttccttcatgcattctatcaatcacat

SEQ ID NO: 59952 - DNA, 803 bp, Bovine  19866881414014
  misc_feature (1)..(1): n is a, c, g, or t
ncctaaagcttctaataaatataaaagaccttggaaatatacaaatataatattttgtaaacgtcatatggcttcacaatgtgggaccaatttacacattttacattctttttcttatatgtgttacaaaatactatttttatttttaactttttactcttcttttgttatacattgtttccaccacataagctttttcttttttttaaaggaacaactatccaaacgtcatgggacactgctgctgagtcgcttcagtcgaatccgactctgtgcagccccatagatggcagcccaccaggctcccccgtccccaggattctccaggcaagaacactgggtaagtgtaatttaaaagttataagagccttctctggtggtccagtggttaagactccgagcttccaatgcagtgggtcggggagtgtgggtttgatccctggttgggaaactaggattccatatgctgggtggtgagaccaataagtaaataaataataaaggtaacaagattttcttcttctctgagtaaaacactactactcagaaatttggtcaggaaagaaaggcatcacaagatgtgaaggcattaatttagaagctgaagattaattgtaaagggaaattgttctaagcaagaccacaaaactaaagccctgaaacattctggaactttctgaaaaccagctacacttcctacaaacagaccaaattgtggttctatctcaaatattggagttctttattcttaactctgatttgatagcttacaataaagtcagcaatcgattgtgctagtagca

SEQ ID NO: 59953 - DNA, 693 bp, Bovine  19866881578111
  misc_feature (1)..(1): n is a, c, g, or t
ngctcctaaaaatctgatgatgattagcttattatgtctattacctcattttctagtagttatatagaaagagaatctcaacaaaggacattttgaaatcatgttctgtaagccaacacaagtttgactataattgtattgtctttgaataccttctccagtaataaatggattttccattattgcaaacagctcacataatgaaagtgaaagtgaagttgatcagtcctgtccaactctttgtgaccccatggactgtagcctaccaggctcctccgtccatgggattttccaggcaagagtactggagtggggtgtggggtgccattgccttctcccaagagtactggagtgggttgctatttccttcaccaggggatcttcccaacctgggcatcgaacccaggtctcccacattggaggcagatgctttaccgtctgagccaccagggaaatccacttaatagcaacagggtaacaatggtggttctaaagagaaagttaaataatcagtgactcagtgtccccatttaagacataaaacaattaagtttccctgcctccctcctgaggccagtaaattatctatttgctatatttggaattacttataggcaaagactctgatgctgggagggattgggggcaggaggaaaaggggacgacagaggatgagatggctggatggcatca

SEQ ID NO: 59954 - DNA, 826 bp, Bovine  19866881814403
  misc_feature (1)..(1): n is a, c, g, or t
nggctttacgaaagaagacagaatcttctagtaactggtgacagctctgcttttaaattttttttttaaaaaaacctctactgtgtttttaaacagtgctgactcaacccattaacatcccttaagtgcttggtaattttagattatctcaaatgcaaaggaatacatagctttgtgctttcaaaaaccagtattacttgtggaggggcttattttcaggctcatattttcaatggtcataaatgtatcagtgacttgctgtaaaaaatttggaggcaaaagaataattttcaaatgtggaacttcatttcagaacttaagtgtcttcagaaagatttctgaaccctgcctaggaattggatatggccatgtcactttaaggacaattccctgtttttggctttttgccctccattgaaaaggacaaaccctgcattgccttctcattaagcaaaaactaactgcaaagacagcatatttctagagtaaacaaatctcccagaggttgtatttttgataagtatttttgcagtgctagtttgaaggtttaacggtgtgtagtgtttcactttaatagtcagaccagcaagctataacaaatgcactttacaaactttacacaccatgagccctgctttgacaagacatccttggaatcaggaggtaatacggcttctcagtgagccatacttacatttcgagctgaagaggaaattattcttgaaccaccagatctgctggtaattcatggctcagtttatggtggccttttaaattcaccctgtctcacctggttcgcctggatagagctctgagtggagagatt

SEQ ID NO: 59955 - DNA, 1404 bp, Bovine  19866881242623
  misc_feature (1)..(1): n is a, c, g, or t
naatacatctaaaaataggagattcatgatatatggctataagtaatcataaatataatactatacatttacatgcaatgccaatatatctgattagctatagttttttcagatgaaattcactggtggaataagctagtttgaaggagtatacattttataaaattgcacatgtcagacttcactggtgggctgtagttaagaatctgcttttccctgcagggtcgtggattccatttctggtccaggaagatcccacatgccgcagaggaacaaagaccatgcatggcaactattgagccagtgaggcacgaggaacaaacccacgtgcggcaactgagaaccaatgcagccaaataagtacatgagtattttaaaaagtgcacatgctagttattcaaacaatgctactgtatttacatgaatgcttcttatttaaatatgaaacgtaaatactcacagtgttgattagactaaaaacatagataattttctcagatgcaagtgccacttcagaacccatataatgatactgaaaggcaaattttattttttagtcatcagtgaaaatgactaaactaccacatttcaatggatataaaaatggtaaaataatgcagcatgcaaacaaaaagacaaaattataattaagacttaacaagtacttaataagttctagacttaaacctagggacattttatagtaaccaataatacaaaatagggcttcccaacttgctcagtactaaagaatctacctgccaatgcaggagatgtgggtttgatccctgggtcaggaagatcccctgcagagggaaatggcaactcactccagcattcttgcctggaaatcccatggacagaggagcctggaggggctacagtccacggggttgcaaaacagttggatatgacttagtgactgactaaacaatgacaatattaaaatgagatggtgatgattatattcctctttacacatgtagttatttaggatcaaaagttaagattccaagattgcataattaataagggttcctttttattcacatccttggcaacaattgttatttgtggcttatttgattatagccattccggataagtgtgaagcgatatcttttagtagttctgatttgcatttcagagatgttgaacatcttttctgtgcttattaaccatctgtaggtcttccttaaaaactgtctattcggttctcttgcacacttttatttattttctttgtatatacttccttttatttttttttaatttatttattttaattggaggctaattactttacaatattgcacacttttaaattgggttgtttttgatattgagttgtatgaactgtttatatagtttggatattaactctttatcagtcataattgacaa

SEQ ID NO: 59956 - DNA, 1298 bp, Bovine  19866880408464
  misc_feature (1)..(1): n is a, c, g, or t
ntggatgtgacagttggactatgaagaaggctgagcaccgaagaattgatgcttttgaagtgtggtgttggagaagactcttgagagtcccttggactgcaaggagatccgaccagtccattctgaaggagatcagccctggggtttctttggaaggaatgatgctaaagctgaaactccagtactttagccacctcatgcgaagagttgactcattggaaaagactctgatgctgggagggattgggggcaagaggagaaggggacgacagaggatgagatggctggatggcatcactgactcgatggacgtgactctgagtgaactccgggagttggtgatggacagggaggcctggcgtgctgcgattcatggggtcgcaaagagtcggacacgactgagtgactgatctgatctgatctgatctgaattccaaagggcagggttaagcaggagggaaggactttcaccaaaattgtaagtagtctcctaccatggtaaaaactcaatttcaagccaatctgaccaataacctccctacagtcagaacagcgccctgcagtgcggggtacatcctagacgggagaagagctaactgaggcctccagagactcagctacactcaaccacagagatactccccaagttcctcccaaggcacagctcctttccgttctttcatttccccacctcaccccctctttaataatgaatgtgtgactcagaggtttaatgagttaccaggagaagttcaccagaagggaaacccgttgagtaaacgcataattaaaattacgaatggacagaggaatacaatcattgcaggagatgaggagtacacaggaatgactcaggggttaggctggttagaaaagggcctctgggacttaaattatttctgatgacgatctggaaatgaaaggaaaattctggaacccttccacactcaaaagagacagaggagccacccgggatcccttccttccctcctcaaatgatctagattggtagccaggagtcacttccagcagaagttgaaaatagcaaaggctgaattcaccaagggagtcattatccctttggtgctaacagcacaaggctctagcatcaattacttccctggtgtaaatatcctgcaggaaattataagttaggagaacatgaaaagctaaggcagcatcacactggattttctctcttgagctcaaacctagaaatattctgtatctgtggacgcctggctggggagagaaaccaggcaagatgaccatgttctgcctttaggagaaggaggctg

SEQ ID NO: 59957 - DNA, 1889 bp, Bovine  19866880446471
  misc_feature (1)..(1): n is a, c, g, or t
naccctggctggcttttcaccagctcacattctagcttcctaaccatcccgtaagctccccgagggtgcccatctgtctcacagatatttgtgttcaaacacaagtgcttattgagcctctacaaagaccgaagcttcactgcagtgtcataggaaggagaaaggcagagtccctgcctggggatgccctctctaacagtgaaaacagagtagacgtgaagacaggggaccacagactcccagagtaaagattcctaatgccatgggggagggtcacactggaggcagaggaggaaagtccagaaagaatgtgcaaggggtcaagcatgaggagttccaccagagccggggaggaggagtaagagggatggagaagacaggaaccgctgggctgggaatgctgagctaaggagttagactcgtcctgtaggtcaggggttggcaaatccagcctgctgcctgtttttgtccgtgaagttttactggaattcaggcacgcccattcttctacacactgttcatggctgcttacatgttacaatggtgaagatgagtagctgcaaaaggctgtacgggtggccaagcttaaaagatttacatctggccattttaagaaagttctgcggatccaggccatagtggttgaaaactgtgggtggattttaagcaagagacagcatggtcagattggtgcttcatctttttattactctgggccagcacagggatgggctggagcagacaagccaacaggaagtgaagacagctgggagactgctgtaacgaactgtccaggtgaggagatggctatcacaattgctgttgttgattaggagggttattaagagttgctgtgtgcccgcctcaggttaagccttttacatgtactccctcacttaatctgcacagccactgcaggtatccccatctcacggatggggcacagagaggtgaagcagcttgcccaaagtcacacagctgggaagaagcagagttgggatgcaaaatgccaagctcaaggtctctgggctcaagcctgtttgcttgttgacggatcccttcaagcttagctgagaattcacggaacacaagtcctcggcaggagaaaatcgatctgagtcgagtcaggcaggaagtgggaggcaggcgtgtggctattttggaagagcgacacgaaaaaccacgaaacttcctacctgtcccgttttgctcccatctgtcctcggaaacaaggctgcccctctcttagatgaaaaggtgtttctccccacacagtggctctgccgctggtggtgggagagagcactaagcttagcacacgctggctatttttaaagggctatataaacaaacagggctatgtaaataagaaaaaaaatgaggtcatccttttaaaatctaaaaatgttctttttctatggggtgagcagcaaaacctcagaaagaactcatgcttttttatctgtgagaggccttctccagcccacagcctcccaaagccaccagcctgcccctcccttctctgcacccacccagggaaagcagggggcctgggagctgggactcctgggttttattcctggctgtgtgggctttgcctcgaatgctcaaagtcactgtccagccccagtcaccccctccttggggccttgacatctgtccccattcaggtcactggcaagtatcgcccatgctcacgtgtctgcctcctgcataaactgatttagtgagctgacccagaggacccctctgccacccctcttcatctcccttgctcccttcccgtgtcttgatctgctgactggcctcaaaggtcctcagcatgatgattagaagcgatttgtatgtgccttccacatcctcccctaccatttcttggagcatatttt

SEQ ID NO: 59958 - DNA, 1141 bp, Bovine  19866880502595
  misc_feature (1)..(1): n is a, c, g, or t
ncattgtcctctcatatccttttctttgcttcttgctggtttacacgctcaaggtagatgccattatgtgtgggcatctgagtagaagccgcttaaaatagccacccgactatttcagggagcagttgaatatgcatgaagctattttagaaaagatgtgcccagcccagccaatccaaaccccatcctttcccttggaaatgccaagaggagctgaatgggacctttcttagtcttccccactggggtgggggtttttcagaagccacagaaacaacacctgggctaatgttggtctagcagccctgtcagctctgcctcccgatcctgcggtcacagaggctccaggccagacagctcagccctccagagtcctccagagccttggcagccttcaaccacaactgtgctccaatccagttggcctatatttgttcatttattcctttaacacacttttatggatagatgaaatgagacaagttcatttgagggggtagatcgacaggtgagtggggacgacggccttgtggttcctaaatagaggggtgacctgaagaaggagcccttggttcttcctgatggcttgagagagggggggatggatggatatggctcggggtgggatgccctgttgggagggagagtgtgcctgtaagaagatgagaaagaaaggggagccagactgtgggggcatggagtgctaagctaaagcatgccactttctctgagccccaggctgggccaggaaggcgcccttctgagcctacggcactgttacacccctgttgctgccatcaatccagactggaagtcccttagtcagattctcctgggcatctatgcaacccagagccaggctaggcactgagcagatgctcagaattttggttgaaagcgtggattctggaaccagactgcctgggttctgatctgaactctgcttctcactagctctgaccttgggcatgttacccgcctctctttgcctcagttttctcaccttaaaatgaggataataatagtacctatctcttttggtgagaagtacatgaattaatatatgtaaagggcttagaagtctgcggggtgcctggtaagaaacatctaaaactattagctgtttttatcattctaccga

SEQ ID NO: 59959 - DNA, 2810 bp, Bovine  19866880509918
  misc_feature (1)..(1): n is a, c, g, or t
ncaagtgctcagtaaaatgaaagtcctatccaagggggccagcccgggcctgcggggctggacacagggctctgtgcagagtgttctgggtccaccagacccaaccttcctctggggcctaatcactcagagaagtgaacagaaaaccaagccaagaaggacccaccctacggatcagatagttctgggttgtgtctgggctgtgtgctttctagctagtcaggcagtgtctacatcccctctctgaacctcagttttctcttctgtaaagtgggacaacagcagtggcttcctctaggagttgctccaaggctgtgacattaatttgctcctggtaggtgctttaggagcgggaggggctagaggcacaattgccctgactggaacaccatcccccatcccccacccttgtcctgcacagagtcaaggactaagggtgggagcctccgggttgccctaggcctttaggacctactccccatggagcagagggaacacccagctcactaatgtcctcagggcccagactagtgacagtcaacacacctgcacacagaagcgcccatgcaggtgccacacctgaccgcactcttgctgtcacgtttgtgcatgcatctcaaacgctcacacgcacacatacacccttcctgatgcggccagaatgtccccatatgaaccaagggggaagctcctggccacacccacggggggatgagcccgggagaggcagctgcaagccagctgtggggtctggagtgggcgaggggagctgcttggatacccagctgggagtcgggcaggagggcttctcagctgtctcttggctccaggcccccttcctacctctgggggccagctggcccagctgggcagggttggaggtcacctgcctggaggtggccaaagcctctacctgtttctctctgcccctccccgcggcctttcattcagcaacaatacctgggaccccgcccaccttctgtgccatctcccccctcccttcccactctctgtctctctgtctctctgactccttctgtctctccctgggtccctggatcttgtctctctgggcctgggtctccccgccccagtgctgggctatgtaaatgtggtatttcccgtgtctcatcagcaggactgcctgcttggctcacatttaatttgatccgtggcggcgcctctgcggagccactcatcaaagcgggaagacaattaggtgaatgtcagggtggcctaggccccacggggtgaccagggcctggggctggggccatgaagtgtgaggggcaggggcctggctgccaccctcatctccctcggggcctgtccagacttggcccaacgtctgcgggctggccagccgcctggatggcccctgtgaagaccaagctcctctctgcccaggacctgcagcactgaggaactgaggggcatggctggagctcctggacttggcagaaccccctcctcacccccaaaaggaggcagctgtgtggctacagtcaggtggactcctgggctgggccctcgacaggcctggtagagggtctgagctctgagctagctcagggtcccctgagaagggaatgcattctttccaccagccccgcccggcgcgcccttgctggcgccaagccagcggtcctctcctgagcctcagcttggccttttctcctccctcctctgtgttgcttcctctccttctgtctttctttctctggctgttattgtgtctcttccccctctctacttctttcctcagtctcattcctttattcccaacctctccttttctgtatcttataccacccccacccacccccatcatgtccttggcctcctgggaccctttagcctcagctgctcatctgtaattccccatccctgtccctggctgatccttccccacctgaggctgacctgctaggtaaatctgaactccctgccccagcctgacttcctcctcactgcccccgaccctcagggatccctgaatctctgacacctcccctccctactggcttcttcatgttagctgtcaacacattcaagtctctcctgttttaaaaacgataataataataaaatgccttttaaagagatactctccttgatggccccactgcttcctccacagcccctttctctcctctccctctagggaagcttctgggagagcaatctactcttgcttctgacccccttccaagctggcttcgggaccacccctcaggccctagaaacagtcctcaggaaggtcaccagcaaccttctcatcactcagcccccttgatcacacctcacttggatgcccagacagcatctgaacaactgacttctctcttcttgactctcccttattcacacaatgcctctgggttttgcctccacccctttggcctgccccttcctggaccccacctctgccctggcctcacagttgccctccagagccatcccagctcctcttctccattcaccctctgtacagctccttaagtaatttaacccatgccctgctcccccgacccaggcttcagtcacacttgtgtctacacctttggccttctgctctagcccagctctttcttctgcgcttaggacgcaactattcactgcctcctggcccctccctgcgtgttccatggccctcccaaacccagagcagcccaaaccctgacctttcaagcctgtttctccttttgggttccccagttggatgactggcactttcatctcccagtttcccaaatcagaaacctggagggaaaccagagctcctttcccccaccacttccacacagtgg

SEQ ID NO: 59960 - DNA, 2423 bp, Bovine  19866880592799
  misc_feature (1)..(1): n is a, c, g, or t
nctacaaaaattcacaggactagagcaaagaagcagttcctaatgggcaagcatcaaagtaggtatctccttaagggatcaatgcaaaaggaaagggaaaaaaaaagctatctctaggggcattctagtctttccctgaaaatggtttgactgtatactttacaagctgctgcctgagggtctgacttctaattagcatgattctggaagctggctgttatttcatggagccaggggattcagtggacacttccactgccttctcccaacaagaaaaccaggtcactatcatctctagaagaaacttgttcaagcctggtgccccagcgtttgcaccagaaaaacaggaccctggattccctagctctaataggggcttgtattcatgagtcccacaggaatgtagcaaactaacatgcagtttttggaagcccaatgggcatgccaacactcaccaaagctatcccccaggcctcagcacaaaagaggcagcaaaaatgcccagttcccagtctttaactgtaaggggtttgactgcatcttttacaagttacaacttgagagtccagcttctgattaacacacactttggtgctaattatgatcctctctggagtccaaaagagccagtgggcactttccccaccttctccttcctgctcacttcaacaagaaaagcaagccactgatatctccctataaggagtttgtacacatttctagcaccccgatttttacagcttgcagtgtagggactggctctcaaattacctcgctctgatagccaacaggccttgcattcatgagttccacaggattatagcaaacaaaggcagtctttaaacacaagcacccccaacaataatacactcaaactcactgcagatggaacatgcagaaatgcccatttcccagtttcccagctgctgcctgagaatttggtttctaatcagcttacattgaggtgttaactgttaaccctcttctgtgggtctctaatgggtcttagtacaccctctaccactcagaggagcttctcagtggtaaagaatctgcttgccagtcgaggagatacaagagactcgggtttgattcctgagttgggaagatcccctggaataggaaatggcaacccactccagtattcttgcctggaaaattccatagacagaggagcttggcaggctacagtccatggggttgcaggacgacttcagatgactgaagcgactgagcacacatacaataatttaccaactgaattcgaatctaaagttgcctggtcacgtcttactctgctttaaaataattcccatctctccagagtacaatccagaaaatgttcccggatcatttctaacagggaacacagcacccagagtcgctctattttaaaggcaattggaggagacagtggcaatgcccagagcagaccatccctgtggtttggggtgtggcaactgagcagagcatcccctgagggcagggcccgggtggccggtgctggctgcgcttctgtaaggccatagggttctgggttccagccctggcttccctactaccaccacctaagagggcatagccagagagcttttggtgggagggtcgcaaggcgggtctaactcattgcttgtgcccttggtcctaccagatctcttctctgtcgctgtccttcctaccctcttgtctcctaatctttgtttagctccagatgctgttatggctctggactaaaagctggtgtccaggagggtatgagccagggctttaatttccctggttaccaaggaaaaagtggattaaaaaaaaatagacccaagtgtttaaatggaaaagatacttgacctcacctctcgtggagtcaagtccagagatgagaaagtttgtgcacctatgacacatcctttcccttctgctgtttaactgccccagcctccagagctggcaggaggcacgctgctttcattaatctctgcaagacttctctgggaacccagattaagtagctctgtgaagggaatctacttatcaaaatactgatgaatggtctgggtcaagggtgagagtcagaggcagccagcactgaagcataaaccccttggattagtgtgagttgctctatctttatgcctgttttagctgctaaagcaatttgcaatctggatctgatgctcctttgatagtttttcttatacggagtttttccagggatcagctgccactcagctatgtctgagggtagctgctatcaagacatcttctgggaattcttttccatcctgacagaagccattgctccatcctgtatatctgaactctctccccatgtctcaaagtccttctgagaagagaatcaggtgagctgcgtagtcacccggatatgcttcagtgcctattcatggtgatccagtcccttgtccaga

SEQ ID NO: 59961 - DNA, 1588 bp, Bovine  19866880644406
  misc_feature (1)..(1): n is a, c, g, or t
nctcctgaccccgctctctgacctcatctcacccccctttcctcctcctggactccctccttatccagcctatatcccaagggacctttctgcacccagagtctcgagcacaccgaccctcaaaaatctcccaccccattctgcaaatgcccagcctggggcagacccacagtgctcctcctagaggatcccatctgtccccaggccccagggtccccctcccttgtctctccccacttcttccttccatcaagaaacacactcacctcttgataatgatctttcaagctgctctcttagccctgcacatggctccaactgggccccattccttctccccagcctggtggagctcttcaagcgttacttgtgtgcccatctctgcctcctcagccccctgccctctggacccgcagtccaccaaaactcttctcatccgtcactcctgctacatcccgagagagttgggttcccatcccaggctggggccagagagctgtgccctgctctccccctcttccctgccccctgctcgtctccatggccccacgccctagtgaaggtcccctggctgctccttactcccccagtaggtccttctgccatcctgtcccacagacgacggagctctcttctagccccacatgatcatcccataccactgccccctcttacccggtaccaatgttcccaaactcgccaaggcctgtctccacgcccagggatccaactgcgtcttcagtgtgggtcaactccatccaagtaacttaatcgtgacacagtaacttcatgaaggaagtactattattatccccaatttgcagatgggggcaccaaggcacagagagagttgcccagggtaaacagctgatcagcctctgaaccaaggtctccttcctggagatccctcaagagcctcagattcaccataaacagaacaagctcacgggctctgcactgaatgtcttcttcctggccaagctggcctttggactggacagtgacaagcgtctggaccgtgggcaattttactttctgtgggaagtacttaacccagagctcaacagcagtaagtggccagtacaggccagctgctgttgtcaccatggccctccaaacctcagctgcttctagaagatggggctattgggggaatgtctgagctcagggcctggccacacgggggagactatagccctggccactccgcacaagagcctttttgcagtaagtcaaagcagcatcaatttataatgctgcaagtttggcacaaatgcactatttttcttaagccaaaataaagctccaataagctgtaaaagccctggagttgggaggattctctgtggggtcatttagggtgagttagaacctgcagctgtgaactcctcagccacacatggcaacctgggtgggtacaccccagaatgctaatgaaggcagctgctcagggtcggggagccagctttgctctggcttcaggccccagggagagggaaagccatgtggggtgagacaggacaggacctcagccaccctgggctgcgtgatctgggccaagcccgggccccactccaagctgcagctt

SEQ ID NO: 59962 - DNA, 1531 bp, Bovine  19866880690285
  misc_feature (1)..(1): n is a, c, g, or t
ncttgggcctgatttgtcatgatttggcactgagaccacgccttgtctctgagatgattgggaatgtgacgttttctgggactcagtagaagcttttcgaatgagcaggcctctctgccctctgcagcaggaaaacaggatgtctcaggttctgctgttccttcagcttgggtcccaggataggaagataggccccgaagggcctcgggggcccagaggtgccacagtcttcatgtaaagggaacaagaaatgaatgtttatttttgtgtgtcaatatattgggatgtttgtcactgcagtataagctgacggatacactaggagaaaagaatgctttgaaaaattgtaagaataaaagtgaattgagtcttagattttaaaggtctgttacttccagttaaacaccatttctgagagagaattcaggcacataacggacacttacttagcagctatttggattgtccagaaatatttttacataaagttttcaaaaagtcttataatcgataaaccatgaactgtatattttatggaactccagagtttctgggtagattattcagaaataggggggaaaaaacacttcttgcctaataaaaggaatgcttcaattcagagaatgataaaagaatacattttagagatgggatcttaggagcactgcatccaactcagatcatgtgtattttcccatagttaagtttcacaattacttatttttggtaaatagaataaataaagcacattctgtttccaggtgtggaagcatgaagactttgaaacaaactcactcactgcttttctctctatccatccacccaccccgtcagctagacagccagacaaccatcgtgttcttgatataagacaaacatcaaaaaccctctcttagttgtcattgtgggagaagaaatttctgtggagcatataaatctgagttaggacagattcccatatgaggagctttagacattatattgttctttcaggcagagttgttggcttcagaatctaagttaccagaaactggcattctttcagatcatctgaggactccaggggaatggagggagcaattttgatacctgagcttccaacatggacatttcaggatttcatggatccgctgtgtggcacaataagccacattgctcctgatgtcaaaccaccagaaggaccagcaggttactctgcaaataacctgacatccccagactctgcctgcctggttttggagagctcctggaacgtcccaggagttacatggggacacagttacatgcgtcccatgcgtcctgaagccgatgccaagtgttcattgtcagcgatgaatagatcacagaggatgtggttcaaggggagatctacacgtttaggcttcttgcagttgcagtaaaaacaatgataaagggatgagccccttggcatttaaacaacgtcttcagtcagaatgtggacaaaagacaagaggctgcccaatcaggctctgcccacctggttcacaaaagaaaaagctaatggactcca

SEQ ID NO: 59963 - DNA, 2798 bp, Bovine  19866880856295
  misc_feature (1)..(1): n is a, c, g, or t
nttgtatattgttttagaccccttacataagtgatgtcatacatttgttttcctctggcttatttcacttaatgtgataatctctaggtccatccatgttgccgcaagtggcattattttattcttttttaggcttagtcatatgacatatatagttttggcaacatagtgtctcattaaaagcacggattctattagtgtactaaatgccactgaattgtacactttgaaatggctagaatggtgaattttgtgttctgtgtattttcacacacacacacacacacacacacacacacacacagcagttggattctggagccagaacctttgagtttgaatcctggctctgtcaccgactagctgtgtggaccctgggcaaattacctaacctctctgtgcctctgctacttcatctataaaacagcacttgctccatggggttatcatagggattaactgagagctccacgtgagaactctcactagtatgattactgcagatggtctaccccacagggagatgagacttttgttaatttctactgcttgtctgctagactgtgcctcatttaatagatgaagtcaagattgacaactgaggttgtcttcactgtatgacactgactcagacagaacctctttgtgagaaagaatgctttgttttcccaggcacattgctaatataaatgatttcctttgcgtttcctgaatcacagaatctcaagcactggagaagggctcacaaatcacgtcagcccgcataaagaagaagctgacttgcccgaggatgcgttactggtgtggcctggtcttctaattgctggagcaatgctctttctgcccatcaccatagttacagtgcctggaaatgcattttgttttcacatctgtaatgtttaaagtgaaatacacacactcttagacacacacacaacaatcaaggtgcagagagcacttcggctttgcaaggagccgtctgcatttaattgggacacaccatattttctgtttggaagggaggcagtaaggctatacccatgttccagggttcttagttacaagtaacagaaacaagtcctggctaactgcagcagtcaaggatttattggaagggtgtcaggtagcttgagaattgaagggaggctggcaaacaagtctgggaagataaccatgacaagagggcgggccgtggctaccacagtcgaggtcaccctcaaggtcagtgtggtggagatgctgctaggtgcagatgtccctggacttcaatctcaaagccccacgctcagtccagtgctgcctccagtgaattctcatccttgagcttggtgttgtgagtctcctacttttgtgtctttgcatcactctccgtgatttgaagttccagaaggaatagcccatcagctgagctggatgggatgtctgaggttcagcatggttagcaggggtatggggcttagaggaaaagtctctggccttctcagactgaggactgggaggaaggtccctgcctctggccaagatttacaaaggaggagtccacccacccacctcctgcttgcttgctttgaattcttcccagataaggaggtgacagaatgctgaggaatcagaaacaaacaaaggaacaaaaactacagaaaattcatgacattaggagaatccaggaaaggtgcctggcccagatgtctgctcttctcccctttctggagtcagcatcctttactcatcccgctctctccctaactcttattcatcccgattggtccctatgttcgagggaacagatgctccaagaaggattctgaggtcaaataattctcttacagctctgtttactttggtctccatcagagtcaccctgaaactcctgagtgtcttctctgtccaattaaagtccaacagcctattatttttattgtgataaaatccacataacatgaaatgcaccattttagccatttttaaagtatacaattcagtggcatttagtacgctcacagtgttgtgcaactatcaccgctgtctagttctggaacattttcaccaccctcccacccatgaagcagtcactccccatccctgcctccctggagcccctggaaaccattcgtcggcaggcattctttctctttccaaaattgatctattttggaaattgcatataaatgaaatcatatgctatgcaaacatcttcctatttatcttcacctccttctgctacaggttcttcatgacctgtctccccactacctctgaaacctcatctcagcacaggacagggaaccagcactggttactcagcttttccccaacaaagccacagaaggaagaaagaggatgatgtatctgagaaaccatcagaaagatggtgaggctcccctagggagacagaacatagttgggtgtctctgtaaggattaacaaccacacagaactggggagggctaggtaggaggctgggatagatgaggagaaagccttttagctgagttgaattctttctctctctctctgggcagatcactgcccaccccttcatctgttcaagacagagaaagagcaggaccccaggagtgctggctgagagtggagagtcagtggaccagatggggcaggagtgagtcagagcaggttcaagcagtcgtaccatcatctgagtgtcccagtctttcctccaacattgagggaaaacacttgagcaacagcagtgcctgaaactgaagcccacgggaggtttgctgaggcatagcattgccctgtgggggagtgtacagcaaacaggtgatttgagcacg

SEQ ID NO: 59964 - DNA, 1221 bp, Bovine  19866880956849
  misc_feature (1)..(1): n is a, c, g, or t
ntctgatcatttcccttctccagtgactctccttgccagtagcttctggccccatgagcttgtcccctgctctcagaccctcctccttgcctttgttcaagtcatccctctgcccagaatgtctttccttctccttctcctccttgttctatgagaccatccccttcctccagaattccctgaccctccaggcacatccagccaccctgagggcctccgtgaccatctctgtgtgatggcacctccccagctgtgcctcattcctcattcattcgcacagatgcctccatggtcttcagaattggcttgaagagagaagtgctaaagtaagagtttctcctggtgggaggtgtgatccactgaagatattctgtgagccaggcctggtgctgtataaactccagtttacttaggcccacctgctgtcctgaaaaaaaaaatcactgtctttttacctatggcaggactgaggtccagagatgctgagggcctggctcgaggtcacgcagcagatgtggcacagggatcctggttgactgatttcacagttccctccaaagtgcatgatcgtgacagaggtaaaaataacagatctctttccaaaacgtaactgttaatgaactacctggggatttgggctgtctggttcctccatgtctcccatgggtgcgtccatctcagccctgacaagcatctggctgatgtacaaggggccacagtccccatccaccttcctgtcgacttggtcaggcttgctctgggatcctccaggttacctaggcccaggctccagaccaaggttagacctaaggtgtctctgcaggactcctgagagagccagggccaccctgtgcccatgtctgcccaagcctgatatccatgttgcagatcaataaatctgtctcttgctcttctctcccgaccatctgttctccctggtggtccccagggagtctgccaggctggctgctatctcccaggttggagggaagaagctattttggggccatctgtttgagaggtgcctccggctggggttccacagctgagggaagctgcccaggcagtggggggctgtcaggaggggacagcaatctgagaatgagaaccacctttatctttaggcttggggccaggccatgccagctctcccttgactcgggcagaccctgtgagatcccaggccctggctgaatcttggacatgtcacgggggcagctg

SEQ ID NO: 59965 - DNA, 476 bp, Bovine  19866880966377
  misc_feature (1)..(1): n is a, c, g, or t
nccgccccaccctccctgttcgcagcccgcacaggcactgtctgtaggatggggccggagctttgggtctagtcttgccagggaggctactcttgaggagccgcctgcagcaggggagcaagacccctctccccaactcagccaagctctgcccggggctagccaggctgctagggccccccaacagattatgtaagggctcatgccgctgcggctcatttgtccgcccccccgcccaagcctggcgtggcgccaggagcccgaaaacccagggctccagaaatcaatctcgcggtgactgattaagccctgtttagaactaattgctctttcgtgtgtggggagaataaattacctgctttaatttcgtgtctttaaaatgcaactgcaggtagagaagactgttaaccctttgctggaagggtctggccaggataagcagaatcggctgggtgtccccaaggtgggcagaggcc

SEQ ID NO: 59966 - DNA, 1249 bp, Bovine  19866881161513
  misc_feature (1)..(1): n is a, c, g, or t
ncatagttctaatatagccctcaaaatacagtaaatattatccttcttaaaattaagtctggaaagtcaagattaaatcttgttaaatttgttccttgttcaaaaagaaatcagcatgggggaaaactcacatgctattagtccacaaaaatttaagtgacacagtgactgaaatcatttctacaaagagaaatgacctcataatgacctcatagatcaaacgcattgtaatacctaccgtgccaaagaataaaaaaccttaacagcctctagcagtaattatctaagtaaaatgggctgcaaatctgttggagaattgtttttgccatgataatatttcgagtaaattgctgcttctatactaaaagtactggtgtcacagaactggcatactaatagaaagattattaaagaaacactattaaaatgaattaggtattattaaagattcaacactacaacagtgcctgattacaagagatttcaagctctattgcttaatgggcagataaaagtgttaattaagcccactcttagaggatgtccctaggcaggtctacaaaccacaggcagcaagaggtctaaggactaaatgagaaactagtaacaccagcccagttggatacagtcctaccagtaagatggggagagatcaggaagagccaaggttttctgcacagaagaggtaacctggtaaagcacacaaccatccaacttttttgaatctcatgatttttgtttttttaactgctttgtcagcaacacttctaattgctcctttgcttaagtgaagagatccaaataatccaccatagattggcgacccttaataaacagtataagcagggagaggcagagaaagccttgccgtgatcaccaaagccttctcaggcaaccagaagacactgaatagctctcaaggcagcatctcggccaaaagcatctctcaccgcaaacagcctaaagctctcagtggttcttaaaagagttgctagactaaaggcattagccatgagtttcaggatctattttgctttcccaccttgttaattaactaatcaggggtggcaaagcgcctcacaaatatcaagtgtcagggaaatgctaagtaaattcacctacatgttctatcaacgctcaattaggaaaggcggaagagctagaggctcagctgtccccagaatgctgcaagccaagggccagctaacgtgaaggcggagagacccgtgtgccctgcagcagcctccag

SEQ ID NO: 59967 - DNA, 1256 bp, Bovine  19866881171993
  misc_feature (1)..(1): n is a, c, g, or t
naaaccagttcatcagcaccttcctgggaaatttgtctctctctgaactgggcaaaggctgggccttatttacctttgtatttcagtgctgggcactggactcagccttaataaaatatttaaaatactttaaaaatacttaagtgagtatctgctgatgcctaagctatactaaacatgaacatattgattctcatacaggtccccttttgcagaggagaggcccgaggctcatagagatgaagctatttgcttcagatgatacaagaaagggcagaggtaagatctgaaccttgagtttagaccacggcctcgaaaagccccaggagtgctgaccttggtcagaagggcccaggtgggttctgccttccttcccagcaccccagttcctccaggaagtcttcccagttaaccacagccatctccacttgcgccaaagtctcctccctatgtgcaatcactctgcatgaccctgttcacctcagggctgcgtttcttgatacatgcttttatcagctatgagtggtagattattcactgtctgggcagctcctaaatcatttcccttggatgattgtctgttgttcctactttcccttctcctcctccctcccaactccaagacccagacaaggtttgaaatttatgcactctggttgagaagcaaattctatttatagcaaagagaaacctaggtaactccaggtgagttatatctggctaatatttgtcttcctgttagaaagcccagggattgagggggaattaacatcatgggggaagcactggtctcgagaaacatccccaggaggggagaaacaggttttacagtcaagaccaagcaacagtgcagtcagaactccactctctccgacctgaggaagcccagactcagcactgtttatttgtggctgtgataagtaacgcaaagatggtcctaacaaatgccttgtatctaaaccaaacaaccgaacttttaatatgtgtcagggccattcttagtgttttacacaataactcttatcaggcagggatcatgatcatctgcattttacagataaggaaactgaggcacagaatcacaaagttggtaatggcagaactggaacctaagcctaggccatcagtgacctctgccatggagaacttcaaggcagctggggccatgccagccttgtggacaggacttaagattgaatcgctcctaacacttcaggtcaccagacactgttcctagtgagtccctcccatcctgt

SEQ ID NO: 59968 - DNA, 921 bp, Bovine  19866881350040
  misc_feature (1)..(1): n is a, c, g, or t
ntttgagaaagctcaggtgatggatagggaagtctagcatgctgaagtccatagggttgcaaagagttagacatgactgagtgaatgaactgaaccaaggggatttgcctagtggtccagtggttaagactttaccttccaatgtagggggtgcaggtttgatccctggtcagggagcaaagatcctgcatgccttgtgacaaaaacaaaaacaaaagcaaaaaaatcccaaacataaaacagaagcattgttgtagcatattcaataaagacttcaaaaatggtccaaaagttaaaaaaaaaattttaaataaacgcatggtgaaaagtgaaagtcactcagttgtgtccgactctttgtgattccatggactatacagtccatggaattccctaggccagaatactgaaatgggtagcctttcctttctccaggggaccttcccaatccagggatcgaacccaggtctcccacattgcaggtggattgtttaccagctgagccacaaatgcatggtaggtatttatgaaaacttaaagagcatcatttcctccttcagggaatcactcatgttgatcttttgttttgttggcatttatttaattcaaccaacatctattggacacctgctttgtaccaagcagagccctgggagtacccaatggtccctctttgtctcccaatttattaacacctatttttattttaactattttttttctaaattgacatgtttaatgatatacctccaatcctatcacctgttctgtcagcaagtaattaatgaaaatgttaaatagtactgggcaagaactgacccttgtggaactacatttgttaaattccctcaagctgacatttacactgacctgttaatcaattttgtgttcacaggatacataaattaagtttcccagttt

SEQ ID NO: 59969 - DNA, 1611 bp, Bovine  19866881462095
  misc_feature (1)..(1): n is a, c, g, or t
ncagatccccgttctgaacacagaaggcaggcaccacccccagcctgcgggcgggcacgagcgcttactgcgtgaagagcagacactgcaaaccaaacataattcttaccctccttcgaagattttgatcctcgccggctcccctctcttggaggcgggagcgtcctcctccggcttccctctcttctcctcttctttctccactctagctatctctttctgtccttccggggaaaccagcgaagggaggcgaacctggcccaccgcaggaacaacaaaatcactgctggttaacacgccgtcatggaatgatgcccacgcttcaccatggctcacttcattcattctccctctacccggagacaagatgctacctgccccactttacagaagaagggaaacgaatccccagaggtgaagtcagaaccaggactctgcccaggcctttctctagggaagaccaggccttcccacgagagctgtgtttcttctcttttttcacactagtctaggggcttctggggacaggtcctcatcttggtctcctgggtcatgccaacctcagagaaggtgtgtgagaggaatgctgcatacagaaatgaagacttcacctttgaagattaactggcccaattctcctttatacatcagtaagtcaaagccacacagcaagtcaagggcatttctaggagcataaagcaggtctcctgaaggccctgacccccaccccccgactgctgccagagctggacacagagaggctgtgctgcccactgatgggcatgtgtctgggggggtgggcattttagggaacccattctcttcatgagctataggccttggtgttaagagctgggtggataacctgtcccctagatcctctgatggtggcagggatgggtgcacctttaatagagagcagtgatgctgggctgggggctgaggctggcagtgatattctcatcctgcttcatgccatttcattaaggtcaggaggaactgccctgtttatagccagtaggagcagcaactgtgtcccctggtgctgcgacaatctaaggacagaaatccctgcttcagccaccacacctgctcctacaaggggctgaacagaaaagtagctgattggaaatcaaggaatctgagttcttgcatcacataggccactgcaaactgagccaaccttgggtggattaattcacctctctgaggctcagagtcaagattagaccatcttaaagattcattccaggatcagctttagtgattcagtgactcactgacaatctcttctgaattggagatggggagtggaaaccaagagaaggtatggtgtgccgcttcagcaaaagatcgatgattttatgcaatactcaaaggttttcagagcatgctgttttcacttccatgtcagcctaccatctgggccatccatggaatgaccaagaggcctccctcaggctgatagctgtgatgtcagagccaagctggaggaggctggtgttggtggcagcagacactctaccaggaaacatggttggactcgagcaggggaccagggatacacttttaagttttaaagataataatgtgagtaactgaagatagtga

SEQ ID NO: 59970 - DNA, 1462 bp, Bovine  19866881626550
  misc_feature (1)..(1): n is a, c, g, or t
ncagccacagtgacaggtctgaggtcccatgggctctgccaactgggatgcttacagggctgatggtgcactgcactcatcagctgtacatactggtctctgggtctcttcctggactggcctgatccaggacttgttgatttgtaaacatttagaggaacgccccccggtttttcaccttcggtgctttgtgtttgtcaacctaatgactgaaacagctcagaattctcagctgtggggctctcggggctcccagaaggctgcctgcttccaggcctgctctgtggaagtgtcatgcgagctgtgttctgtgtgaccacgtgcgtgctccctgggatgtgggtgtctgtacgcaggtcccgtggtgtctgtctcagggtcctgtgtctgtgtccccagtgtaatcaatgcagccctcttcctacccagtcctgagggataatggcatggaggaaaacctgcctcccagggaggagggtccctagaaacccatgttcccaggaacatggaatgtcactggagcctacaatcctccagcacttgcaagtgcccagctcacaagatcaaagtgggaggtgccaggttcctctggagcactgggagaggagacagtgcccagctcccgaggccactggtgggcatccttcggcactgaccaacagggtctcccaggagaaggggtgtttgaaaactgaacttggggacttgtgttgtcacagcaatagggaggggagtcagggatggcaagcatccttcagtggcaaggacacgtccccaaaggggagaaatatcttgcccagagttcccgtaacttctccattgagaaacactagaccagcgggttttcgaaacactgtctttccacctggggactggcgggtttcctcttctgctacttggttagagcgcccccgtgtgtctctgtgttcgcacatcatcggatcctccaaaggccatgtaacatttcaccccaggattggtggatcaggcacagccttctccccgcagcttcaaggaccatctgtggggtcccaggggtggctgaatgtcagctggtgtgaacaaaggggtctgcctctgccttgagaggcaacagtccccagactggagatctggttccctgaggcagttcccttgttctgagccccgaaagggcagctggaaggagcctttccccagcccagttagttaacagctccagcccctcctagagtgagaggtgaaggccacgtctgggtcctcttctcctctttctgcagtctggccaggggtccccactctaacccacccccaccattccatccaggtcatcacttagtcccacccactctgttcagaatctccctgtcttgccaggtccagcatccctgccccagagtggctctcccactaacctgttccactgggacagtctcctcacctctccagctctgcctcccatcggtaaaaggggtaattacat

SEQ ID NO: 59971 - DNA, 1326 bp, Bovine  19866881838167
  misc_feature (1)..(1): n is a, c, g, or t
ngcaaaaatgatctcctcattgtaattgtaattggtggaactcttaaatctatttaaaattctatgagcttctccgcaaatcactccacaaacattcttgtaagaatccctccaatgagaagcagcaaagtccaacctccagagtacattctgctctggctcttttatttaatataatcataagcatagtgagttttgttgtttttaatctagaatcttctcagatattgaaatctttcaaatgagagcacggtgcaaatgactacattctgtctctcttgcttagatttcaaatggtgatgttctcattttgtcttttaccatacgcgcttcagccgtgtgatgcccccgttctcctcatgaaatacgctgacagtcaggggaagtttctaagagtgtattaaatctatatcgagggctgaagagtatgtttgggagggtgcagacatgtgtgattttttagcaactccaacagctgcttggcatctgtagactcaccattcgctattttcagttatttgtgagccactcctaagagcacaccacatggcaactctgtctttcctaaagcacagacgtgaactgtgtagcaaaactacacagcacaagagcaagacactgagtcagagaggagtcttgtcaaagctccccttcccaacacaccaccagggaaacggaaactccctggatgggaaattacttccctgagtgcaagttgaggaggcaaatcattggagggccgtgaataattatgggaacctctcctctctggacagaaacctgattcagaaggaagtcaagagcctatgcaaatttttctgcatttgcaaatttgggaatttgaaaagggtctgaggtgcatccatcaagaatgtcaagagtctactgtatagaatcttgaatgaggaggttttcagaattcttcttctaataaaattgttggttcatttttatcagggctcctctgatttaaagagagcttcagcatctaacactgagcctgcaagtcctgaacagaccaagtttggtaacagaggctcagcagagcatcccatgtatttataacactgtttttctttttttccatctctattttttgtttacaagtttttctttggatcccagtcatgtatagtactcatttttttttaaatgttggccctgacctccaattcaaggacccatggacatccagagagctccaagattcttgagattgacttctgtatgcttttccctggcttcgctacttgaatctaagatacattctcagttcacctctactgaacatctagatgtaaagctccactcttctttttttttcag

SEQ ID NO: 59972 - DNA, 1071 bp, Bovine  19866881900811
  misc_feature (1)..(1): n is a, c, g, or t
ntcacccccaacaccaggtacgcacctgacttcttcagggccccaggctccttatctctggcactttctggtcttgggagacaacagctggggccccaaggcccctcccagcattgccctgcctggctcctcctggggccctgagaggaggggagccagacccccagggagtggtgctccctggagtagaaacccccctttcctgctcccgcccctgcacctggctccccagcccctccccaacacctgtgttcagggacctctgaggcctcagttctcaacccctgtgggactaactgcctagccagaggctccacctcgcagcccctccagctggaggtcagtcaggccacacctctttatccatgtcactatgtgccagcccggttctgagtgctggagggtgggaggagaaggaaggatgtcaccaagtagggcatctcctgagtacctgccgggtcagccctggtattgggagtattttatcccattctcagtactttatgatcattctgtcagtgttcatataactcagggactgtgacccctatctcaagatgttctagggaaatagcaacccactccagtattcctgcctggagaatcccacacacagaggagcctggcaggctacagtccatggggttgcagagttggacatgacttgatgactaaaccaccaaccatctcaaggtgaggtgactgagagagattacgtaagttgtcaagatcatacagttttaagtggcagagccaggcactgatttcaggttagactcactctgagtctaaaggacctcacattccaccatgggagagagaacaagtcagagaatttccaaagaatcttaggaaaccagtcctccatttcttctcaaactttccatgatgtaatcaaccctagaagctggtagcatgggaagctgggggcatgttaaaaggtcaaaattctctaagagtcttgcgtttcctttttagaattcaagggaatcttggcttgtattccacgagacttccaaattttctgaatatcaatacaaatgttttagatcaccgtcaagaacacacatt

SEQ ID NO: 59973 - DNA, 929 bp, Bovine  19866880152124
  misc_feature (1)..(1): n is a, c, g, or t
ngactgggggcaggaggagaaggggacgacagaggatgagatggctggatggcatcaccaaccttgatggacaagagtttgggtgaactccaggagttggtgatggacagggagccctggcatgctgcgattcatggggtcgcaaagagtcagacacgactgagtgactgaactgaactgaactggaaagcagcactgacactaaagctaacaatggtagcacaaaatgataaaagaaactcacttttaataaagttaaaattctttaataaagttgtagaaaataagatcctctcttttaatgaaaataatgtactatggtctaagatgatttaggaaaagaaaggaaaatgtttcaatattgggagctgatttaaaaaatttatctcaccaactgaataaaggagaaatatttatatgttgatcactggttaagaggcatttgataaaagttatgctttattcataataaactctcaacctagagacaatatcaaatgcaatgtaaatattaaaaccaagacaaaaatgactgttgtcttatctagtgtagaggaacaatgcaacaaggccaaaagaaaagaaggtcataaatactgtagaaaaagagataaattttctattgcctattaataatagggttgtctctctgtaaggtcaacgagagtcaattgagttggttctcataaagagatcaatacctttatgaactaccattatattcagtgcaaagatttaaaagattcattctgaatggaaccaaatatatagaatatttaagaataaacttatcaagtaatgtgctagaggggtttccctggtggctcaacggcaaagaatctgcctgccaggagacgaagattcaatccctaggtcaggaagattccctgggaaaagggaaatggcaacccactcagtattcttgcctg

SEQ ID NO: 59974 - DNA, 1257 bp, Bovine  19866880441537
  misc_feature (1)..(1): n is a, c, g, or t
nggcacatcattgttaatgcagtccttttatctctggaaaatggaactcatattaagctttgaacctcaggggaaaatactattgggggaagggtatggaactcattttgttctttgtgtttatcagaaaactatcttagtttccaagtattgaataatgttgaataatagtatggtaagaacagttatgatccgtgatttttgcaaaacttcgtgaagtggtgttgctaatggttgttctcagtatcttaattttattatattggtacctgttatatatgaccttttttaaaattatacttaattgtaagaaacatatttcattgtttaataataatctaagctttagatgttctaagtgtccataaatgtaccagtgttatgcaccgtaaacagtacagatttaacaactgtatttatagtaaattaccaccttgtaatgttttaattagaaacctctttcaactggaagttttctatatctgcagcttaaggatagttcatgttgataaacagaagtcattgcagatttcataagcatgttttcaattatcaaaggaagtctgtagattatgcagctttttaagaaagtgcattctgtttttacttaattgtttgaaaatggatctaaattgtatgtccattaacatgctaatatcaaaagtatttttcctgaccattgtacaatgacacgagttcctcaaatatcatccaatttacctcttgtgagtaatgtctttaactttcataactagagcaggaatatgtattatttagatttttaaattgctttggcatttaaatatggatttattatagaaagtataaaccatattacatagtctcaagggagtttagaatatattaactgtaaattacatgaattcattactaagaaacaaagacctttattcatctttttcagaatctaatttattaaaatgaaaaaaagaatcactatcctttgtcttccatttagttttggactttcatcatagtaagtagcagtgctagttaaaactgattaatcactattcagtaactgttcttgaaaaccatctgtgtgcaaactgcattgttaggagatgagaataaaaagatggataagccctatcctgaaggtatgagtagcttggctggagggggagatacagataagtattagtgtgacaaaagctgtactatcagtatgaggaaagcactacagaagaccaatcttatattatatataaaaatattttaattgtaacagcatgg

SEQ ID NO: 59975 - DNA, 1673 bp, Bovine  19866880605604
  misc_feature (1)..(1): n is a, c, g, or t
ncagaaaaaagatgataaattgtataatgccatttatataaatcatccagcaacagcaaatttatagagacaaacagaagctgggtggttcctggggctggggagggagcagaaatccactgcaaatgggcttgaaggaatttggggagagtcatgatataagtataactcactaaaacttgttaacagtatcatggaactgtacattcacaatgagtctttttatggtgtgcaaataatactttaatgaaattatttttagaaggaagcagaaaaatcatggggtccctcccagtgataatcaaggcaaaactctttagagtaaatttaaagtgacagtggaagacaacattaaagttacttttgcaaatacattccagtagtccagcatttttcacacctaagctacagaggtccgtatggctattgttagataatgtggccatctctgagaatccataacataaaatatattttctttcaataccgtgaaaatatataaaattgattgagccatagtttccttactttgcattataattttacaatcttcagcttaatgagccataaaccactttctacaggatttcaattgtaattaaaaaaaaaaaaagcgatgaaaagaatcacaagtcaaaagacaactgtagaaatccacaggctcagagtcttcatttagggccaacaccagctcattgacttttcttggaagaaaaactgctaggtcaaattcagaccccctgacttcagctaatcacctcaaaaatatgcctttattcccagtggactcagcaaagtaatgtggatgagtcagagcacttgtctgcaagggaggtaaaggaattgcataatttgctatccatatcaacaataaaagtcaaggataaaaaggatagaaaatccaaggcattatgtcacattatttaccaatgacactggtttagcaatggcaaattatatatttattatgtaaatgggagagagcttgctaagaggtaagaaaactagacaggaaactaagattttatttggttttgtatttgagcagccctagcttccctgatagctcaattggtaaagaatctgcctgcaatgcaggagaccctggttcaattcctgggttgggaagattcgctagagaagggataggcttcccactccagtattcttgggcttcccttgtggctcagctggtaaagaatcctcctgcaacgcaggagacctgggttcagttcctgggttggaaagatcccatggagaagggaaaggctactcattccagtattctggcctggagaactccatggactctatagtccacagggtcgcaaagagtcagacaatattctggcctggagaactccatggactctacagtccacagggtcgcaaagagtcagacatgactgagcatctctcactttcactttcaggtaataaacaaggtttgaaagggtagaatcttggttaaatgttgggacagcaaactaggtgtttctgcaacacccctccccctgccaccaactctgtcttcccaatgaaggggcaccgatttccattctcagtatttggaggcactttgtaaactgtagattcataatcactgtacttatcatctgtctttgttaaataaccagagatatttcaccacgatattatttggtttctagcat

SEQ ID NO: 59976 - DNA, 1838 bp, Bovine  19866880686782
  misc_feature (1)..(1): n is a, c, g, or t
ntggaacaaaatagaaagcccagagataaatcctgtacctatggacaccttatctttgacagggtaggcaaaaatatacaatggagaaaagacaacctctttaataagtggtgctagggaaactggtcaaccacatgtaaaaaaatgaaactagaaccctttctaacaccatacacaaaagtaaactcagatggattaaatatctaaatgtaagactagaaactataaaactctcagaggaaaacataggcagaacactctctgacataaatcacagcaagatcctctatgacccacctgccagagtaatggaaataaacaagtgggacctaattaaaggtaaaaacttttgcacaatgaaggaaactgtaagcaaggtaaaaaggcagccttcagaatggaagaaaataataacaaatgaaacaactgacaaagaattaatctctaagatatacaaatagctcatgaggctcaataccagaaaaatgaacaaccccatcaacaagtggaccaaagaactaaataggcacaattatttttaaatgaccaaacttcctttaagttgtagcgaatagtagggaataataggtttcattattttttgaaactttcacaaacaaatatctatgtgtcattatttttcaaaactttcacgaacatgtatctatgtgttttggcagggaagagagaaaggttatccataacatgttggatatctaatgaatagcgtgtgtgcacgctaagttgctttactctttgtgaccctatggactttagcctgccaggctcctctgtccatggaattctccaggcaagaatactggagtggattgccatgcccttctccaagggatcttcccatctaactcatgagtgctgatacctaacttcactcatcagttgacgataacaaagattatagtaaaagaagacttgattttgcttaataaaaagtaattgttattatatttagtatatcagatgcataatttttatcttcttattaactattatcctcattgtcatcactttagaaatacaaacctggtcgatgtgatgatattttgaaatggaagcctcccagtcttaattctgtggattttcgcctaaaaataacaagaatgggaggagaagggtaagtatgcgcatttgattccccatcatttttatatgtaataatacttttactattcctaggtacttacccaaaagttatgaaaacagatgtgcatataaaagtttgtattatggaaagcttcactgtttatctgatattttacatataccttcaaaataaagtaaaatacttttccagtatactttatatatgtatactataaatctatctcattttcccagattatttctttgatatattacagctcacattttgtagcatcctttaaaattgaccaattttagtcttaaaaaaagttatttctaatattaacacaatgaacttcattaaaatgtaaaagtgaaaatagattttacttgaaaataatccagtcaagtgaattataaatgtaagatattattattattattcagcattttaaaacaagccatttttcctttgaaggaaactgcttcatgtttgcatttgcatggcaaaaacttatttatactttattggggtagagttttaattgtagaatttcattaaaatttttcataatgtctattaagtgttaatgtcatgtattggttaatcttcatatgtgacttcattggttagttgttgttgttagttgttaagtcatgtctgactcttgcaaccccaggctcctccgtctatggggtttcccaggcaggaatactggagtgggttgccattt

SEQ ID NO: 59977 - DNA, 1535 bp, Bovine  19866880706207
  misc_feature (1)..(1): n is a, c, g, or t
ngtttctatattgcatatctatatttgaggggccgcaaactctgctgaggtttttttttttttccatggatgaaggctggtggaaaagttaatgaggaaatgaaaaccactggatatattttacattggtaaaattttagcctcctgttttccctctgagtctccagctctttcctaatcctgttctcatgataatgttaactttacagtataaccacatgaatcctgtttttgagggattggaaggttcagcattttgtaactaaattgctctttaatgtttttataaccatttatccagtaatctatattcttaggttagattgggttaacctcataacatattgcagatcaacttagttttctcccaaatattttctggactaaaagaaacaataaatattatccagagtatatgtaatgtcaaattatagattgcagaatttaagatgacagcatgtataaatatacctctatatgtgtatatgaacaaaattttttcctggatgtataatcacaactaaattaaaaattgagacatgttgccttgatatatttgaacatatgattcagattttaaataaattctatgaatttggggaaatgtccaaattcaagggaactgtgcagatggacatggacaactcaaggccaaaggaagtacccaccttgaatcaaaacaacactgttcttattttccaggagagtagaaatctattccagtcttctatgttctaagaatcttatgaagatgccaggatgggcagaaccacattcaattatagttttctcgtaaacactgactgttgtgtttaacacagttttcactggttgtttattaatcttggaaagaaagttcggagaagatacacaaggttattatgggcttcttaggtgacactatggtaaagaacctgcctgccagtgcaggagacataagagacatgggctccatccctgggttgggaagattccctggaggagggcatggcaacccactgcagtattcttgcctggagaatcccatggacagaggagcctggtgggctacagtccacaggatcacaaagagttggacacagttgagcacgcacatacacatacaaaattatcactgtgtcacaagatgcatattaatatagttatatttcttggataaaacacattataatgctattacaagtaagttaaaactttgggaaatttgtgaggagaaaaggggaagcctcttttagtggttttccagtgcttctcttggtactcctcaaatgatttgaggttagatgaacttctatctcaaacaggcctgcatggataatagggtatgtctatgacataccagtgatcagaggtcaaaagttgttgcctcaagcaatcagtgtgattacctccagttcttaccataaaatatttactaaaaagctcgggactgaacaggggtgcgtcatggaaaatgaagtacatttcattggaacagtttttctaagggcagttgagatgacaaatatattccttgatctaattttcatgggctg

SEQ ID NO: 59978 - DNA, 807 bp, Bovine  19866880721841
  misc_feature (1)..(1): n is a, c, g, or t
ntttcttgttaaggagaaattctatttttttaaattactgcctagtattacggactttttattatgctgcatatgaaaaaggggatatgataatgatgaaacattcctgatgcatcagactgaaaaattagacactcacagaccatgtctgaagctaaagttctaattggataaccccttctctccccttgctcttattttgaaagatatataaatttaatttagttagtggcatggtctattggactgagcacaagatggtggttaaaaaaaatattgagaattccaatcttggtctgttgttcgagttttaatctcagttcactgaatgctcttggataagtcataaaaaattggcatttttcaattttcccatctgtaaaatggagatatctctcctaactcataaagacattatttaattttctggataaaatactgtgaaaattaaacaatgaaaatgttcagtccaattaaaatttaaacttaagtccttattcaaactgagagtcttaaaatgtatttttttacaatctaaactgaataatagcacttgttgaaaatcaccagactcatctgcactttcatctttcaaaggcagtggagtagcagcaaagtgaatgacagcttataatttagaatggataccttgaccagctcactagctccagaggtaatcctgggggttctgtaataaaagcccaggcttgtttaacaatccacagcacaattaaatgatcatccaagataaactgagtgtaacagaaccagctagcaatggaaatgataggaaagaactgaagttat

SEQ ID NO: 59979 - DNA, 1688 bp, Bovine  19866880802008
  misc_feature (1)..(1): n is a, c, g, or t
nttcttgtatgaaggaatcagactttgtagcctttctttccagacccagactactcctctggtgttttggttaatagctgaaactcttgatcaagtgaaataatctaaatttgacctactgtcacaaacagcattgaaaggggttgattcttaaatcttacccagggctgggcccattgtgttgttttcttaaaaatgaataatttaaaactggggtacattttagacaatagtgcttttgtcttcccagaaaggatgttgttctaaacaactaaaagaggtgataccagtcacatgagaaatgttttctctaagtactttccctaaatgaggggtttgattttttcctcaggccttagaatctattcatctttcttttctctttccttctcttcagtataaatattaaaaacaaaacaacaaataaaacaaatgtcaaacaatgaaacattttatagacaaaatttttgaaactaataatattataaaagataaaattattaatgttcagataacttaaaaatacaagtcctttccactttaacattatcattgatattattgatatttcctagtctgtatcacataggtatagaggtttggatacagaattgtttttgcatttgtagaattatgtttctgaaaatttttctcattggcaaaacttcttctggcaaaatctcagtctcataggagactctcagggattaggagaaatcaataaattctcctaaacacatatccttaagaataatgttgaataaaagttctagaagatttctagaagttgctgtgctatctattgcagaataacaaattactccaaaacttactggtttaaaacaacaaatatttatcatctcacagttattatctcataggtccctctgtgggtcatggattcaggagcagcttagctgggtggctccagctaaggatcttcagacataagaaggctttattgggtcttggaggtttgcttttaagctcactcacatggcttgtagcagggggcctcagcttctcctcacacaagcctctcaataggactgttttacctcacaaaatggtagttgtgtttcccagatcaaaggatctgacaaagagcaaggagaaagtgagatgtctttgacgtccctatcttggaggtcatataccttcacttctgtctccttttaggttttggaggcaagttactaagtacagcccacacttaataggaatggggattggggtttcacctttccagtgaaggaatattaaagaatttgtggacatcttttaaaaccatcagagtttccaatacaaatgagatttgttgactttaagaacgtaatctggtgggttcttattcaccaataagaaccaataagtatttgtgaacactatcacactctaaggcagatttttcccttgagttataaataaagtaaatgaaactataaataaatgatatatctttagcatttaaaaaaattagccttttatcagtttaaaatttaattaatgtcttttgcatttgctttccttttaatttttttaagctttaataaaatgcttgtgtaactgccaggaatttcaacacattgttcagatgcttaagggtgtatatttggggggtggggactgcctgtgctgcggccatctgccctcacactgaggggagccaagagacctttttacctgtc

SEQ ID NO: 59980 - DNA, 775 bp, Bovine  19866880828744
  misc_feature (1)..(1): n is a, c, g, or t
ncaatactgatgtatacatgatccccctaatccttactaaattcttaataatcccaaactaatatttttgaatgtattagatgcacaatgcattgggtactgcatcacaaaataagcctgtgttaaagctggtcctctgctgccatctagtgtaatcataaaatgccaaaattaaaccaaaagtgactggaaaaaaagtacttcggtggcgcatctaaataataaatcattaaaataaactagttcaaaatatggtccttaaatcactggagataatgctataaaacatttaataatttatttttaaaaatgtaaatctcttaccacaaatgcattctggaggatataaatagttcattataatgaggatatcttaaattataaaaagattgctacttctatcttaaatatcttggaatttcttgggtcacttgatctgggggaagctggctgccatgtagtaaggatgttcaggcaactatttaaggacacacagaactccagagttagtatgaagattactttaaactgaagacatttgagattcaagagatgctgaaagaagccttcccacaaaagcagaaacttctggaaatgaggtttccataaatcacctctttggagtatattcagttccagcaaggggattgagaatgaaattatcttaaatcccctctctgggggagttttacagccatgaggaagatggaaaagaccaatcacgctagcataacgaagattatcatcagctttcttatctcctgttgctatccta

SEQ ID NO: 59981 - DNA, 2424 bp, Bovine  19866880836830
  misc_feature (1)..(1): n is a, c, g, or t
nttgtcacatatctatccatctagccattcctctcaccatccatcaatccacctaattttttgatgcatattaaagcaggtagagacatcagtcaagttcatccctggacacttcagtatgcataccattttctagagtttaatatttgttcatggttctttatatacaaacatcttaagtattccatttgatgggtgttgataaacatgtatatgaaaatttgaagtttcaaaaaaggtacaacttttaccaaaattatcatatactgttcaaggcttttatagtatatatgaagtggcataatatcaattcaagatagattttgataaattaaggatgtatattgtaatctctagtcatcactttaaaaatattacctaaaggggaattcctgggcagtccagtagttaggacttggtactttcactgtcaagggtacaggtttgatccctggttggggagctaagatcatgcaagctatgcggccaaaaaaacaaaaagctaaaaagccaatagaggggataagctagtacacaaaaataaacaacaataacacacacacatacatacaaaacccaaaccaaaaaacctcaacccaaaagaagaccaaattcaaaacaaatagcaaaacaggagactgaaatctgcctataaagtgtgcatgcatatgtgctaagatgcttcagtcatgtctggctctgtgtgaccctatggactgtagcccaccaggctcctctgtccatggcattctccaggcaagaatactggagtgggttgccatgccctcctccagaggatcttcccaacccagggatcaaacccatgtctcttatgtctcatgcattggaagatgggttctttaccagtactgccacctgggaagccccacctataacataaatacatcaactttgaaggactgaactttccaattaaaagataaagattgtcagcctggataaaaagcagggcccaactatattctgtttataggagatacacttaaatacagagacatacatagatttgtatttttaaccttctttaatttctaacctctttaatttttaagctgtttctctatagcatgcaaacactaagcatcagaaagctagtatttctgtatttccacatatcaggcgaactaaatttaaagacaaagagtattttcaggaaccaagaatgatactgtaacaataaaaggtcaatcaatcaagaaaacataacagatcaaactgtgtgatcacttaccagcagagcatcaaagtatacaaaagcaaaaattgacaagacaaattgatctgccgtcatacttggaggttctaatacttctctttcagtatgtgatagaattaatagacaaaaatatcagtgaggatatacgaaatttgaacagcattcttaccaacttgacctaactgacatatttagatgatccaaaaattgcagagtatacattctttacaagtgcatatcagatattcaccaagatactttttatgctaccgggccatatgtgaaatttaaaaagaaatactatttatgaaagcagcacaacaaaatacttaagaatgaacaaatttaacaaaaaatgtgcaaacatctatactgaaaaatacaagtattatagagagaaattaaaatctaaatagagtagaaattgggaactgctcatgattagaagccttcatattatcaagatgtcaatcattcataaactgatctagagtaaaaaccatccaaatcagaatcatggcagggtcatttaaaaagaaatttacaagctgatttgtaaattttttgtgaaatttcaaaggacagagaaaatgagctttaaagaggataaagtatgagaactttgtcaaacttgtcaaattgtcagaatttcctgatttcaagaattactaaaaagttacagtcatcaagacagattgatgttggtgtaaatagatcaatggaacagaatagaatccagaagtagactgacatttttacagttgattggttttcaaaaaaggtgtcaaaggaatccagtgggaaaaatgacaatcgtgttaataacacatgtgactggaagaactagataatgtatgaaaaaaactgtcattgtatataatcacattcgtagtatgtatgtgtgacaaattacaattttgagccctgtgttatccatgtcctgggaaataaattatgcatctgtactgctatattagctttctcaagccacatgagtattatttattatgaaaaacttgttaaggggctgcaataacattgaagacacaagggcatagtttagaaaatagtttctaattcattaaataatgctttacttcctggatgatatcataaaaatggccttctgtttttacagcaaatttaatccctccctgttattcgtagtagcaggagaaatttccaat

SEQ ID NO: 59982 - DNA, 1345 bp, Bovine  19866880921450
  misc_feature (1)..(1): n is a, c, g, or t
ncttccgtgtatatttcttaagggcaagatattcttttatataaccacaatgcaactgtcaaattcgggagacttaaaaacataaaactattatctaatacgcagtttaaatttttaagacttaaaaaccagtgctaaagttacaaaaaattctccaccatgtttctgcacttaatcaggttggcaaaaatttttataacccttcttggcctcttctatggaaacctgacaacttttgaatgcccagtacacttatcccaacttgtagcacacaacacgtatggaacaaatagagaaacactgtacactggactctttactgaccttatagaaagaagttcttcctttgtcttacggagcatctattgcatttgggcacaagtcagtttcttatttctttttctcttatttcttattttctctttcttttttggccccacttgtctagtgcaaaattgtagctaaaataagactcctaagtgtttcatttatttatttacttttgccttcacctctggtttctcttcccagcccttattcaaggaagcagtcttgtctttaaaatggtctcttctcactgagaaattcacccactctttcagtgatcaagctctttcccataggataagattttagatgaacaacatgtactctttagactccctaggacagcatcattgattttctggacgtcttcaaaaagaaatgcatagggataagcattatttataaaggtatctttttcataatcaacaactattcatctcttctattagcaagtttatcatcacaaggagggaaaccggcatctgaaagcagtggcaatcaagagtcctgaaggaagattgctttggggggtacataaattcttacctagttccaatttccttatgaattttcttggtttactgcatataactttataatttgctttctgtttccaccatttatttattcccatcctttctaatttatccaaataaaggtcttaaaactgcaagacataaagatgattcattccaaatattttctctattttttttgcactgacaatagctcctctcatatttcaaaaggactgttttcctgtaaataccttttctttttaaaaaaatggtgagacatggagataaaagaccccaatttggcagagtaattagttggtcaaccgcttttttatcacataaattacttttctgtcaagtgacaacaaatgtaatttgaactgagattaattacataataattatgcttaaataattggttaaatagaggaatttcttgtgaaatggtagattcttgaatttatacaaataagaccagatggtgaacagctagttttaat

SEQ ID NO: 59983 - DNA, 700 bp, Bovine  19866880963305
  misc_feature (1)..(1): n is a, c, g, or t
nttcttgagccctaaaattctttatgttttaataagacttcaaaagttaaataagtaggcatatgtaaaggttaaatttgaactgaaatatagccttataaatatcctaatgctatttagttcatattagttgatatttttatgaaaaatctaacactcatattgttagtaagaatagaccagagaaaagggtgcatttaataacttctgctgtatattacaaagtacaagaaaagctaaagctatcagaaccaaccgagcattaccagcataatggaattatcttttatattaatatatgagaaagagaacattaacacaaggaagaggaatttggtatttttgcctgaatcatcaggataattaagtcagtctttgactttgctgtggaagatgatgcaataagtaacaaaactactttaataattccaaagctcaacctggttgggcaagagtgagaaaagactcagttgcccattcgactgtaacagaaacatcattcatctagttgtgatgttggcacatgagatctgccgtgtatatgaaggacatgccttagacataatgcagttaaaattttccctactaactttagagaaatacatgagcagggttatttttcttgatcaaattaagacaaaccagacttgttcccagaaatgaatgtaacataacaaatatatccactggcaccttcctt

SEQ ID NO: 59984 - DNA, 1261 bp, Bovine  19866880969035
  misc_feature (1)..(1): n is a, c, g, or t
nccacccatccaccaaggcctggaccagctcccacctctggcatcaccctaattgtatgtgatgcgtccgggtgtatagtttctacccacaggcagaatttttaaggattcattatgggaaagttttggctgtatgtgcagttggagtctcggcagccctcagctttagtgtgtgtctgagcacactgtgtgtttatgctgcagattcaaactgcacaacactcccctgacagccttcagaggggaagcacaaacagggaattcttattcccttagatcctggaagacagcattcgatagtagcaaggagaagagtatcttccacttgcctttctcactctaaaagacatggctagaagcacggttcacactaagggatcatggactggtatttatttttgaaactaactgaaaagcctcagctgttacccaatgacttctctttgaaaacatcaaaagttgggcgggagtaggtgggtggggagaaggagccttctagtttcagatgtggcaagctccatgaaactgcactgaaaaatgagacgtgatgaaaaacactgctttgctcacacctccctcagagtgtatcacagtgaggagaccagggcaccagttcttaagattcttcctgctgggaagattccctcagaagtattcattttcagtgtaaaaggcaagaacagacaagacacttctaatcaggattaaatacaagatgcatcagagatggactgtgaagaaattcttaagaaacaagagatgttatcaatgtttctgtgatgatgagaaggctaaggggacaatgtttttgttcctatacagctaactgagggcaagaagaataaacacaactttttttttttttttaactggattgtaagttgattttcaatgttgtgttagtttcaactgaatcactgtactatatacctgaaactaacacaacatatatatatattcttctacaaattcttatcccttatggattattactaaatactgagtattgactgagtattagtagcatgaacagaaaggcatgtgtaccttcggcccctaattactgccagtgctcactgttgccaagccctgtgtcatgtatgtgttatatatgaccaagtccctccactctcgaagtccggggagaccatcacaacacagggtgacagccaagaggccacctgtggtggaaaggcctccctgatccggaagtaagggagcttggggctttctgacagaaagcaccatagcagaggttcct

SEQ ID NO: 59985 - DNA, 2514 bp, Bovine  19866881063041
  misc_feature (1)..(1): n is a, c, g, or t
nacagaagcattgactatttaacaactggtacagccctaccagcatctgtcagctgaatatgcaccctgcttaaggccacatttacagtttgatacaaaccgatctggattcccctctgagggcctgattttcaatttaccaccactgggctcctgcagcaatgattatcaggagaaggtaactttgtctcatttgtcagtgagtcaattactctcagcagcacaattctcatagaagggtcaggagttttcttcctagaatcatctttcgcggttggagaacgatgggtgcgtgaatgaaattcatcctctctaagttgttcagagatggtttccccgggtgcgccaccacccaccagccactccgtgttggatccaacattcagatcacgttcacagtcactggagcaatagtacacaggcttccacagagatcagacaaccagcatcatttctgaaacacgcagaagcttctttgtgaccacaggtggaacccaagtgaaagacaagagacctcctccaagttcatccgccttcatgtttctcattaaatccgaaaccacagtcactccctgaaaaactccttagtccaggcgattctctgaaatgttcagcatcacataagattgtgcttttggtcagcttccagcacaaggcatggtgagagtggcaaaaagagagagggggtgggggggaaatgaaaggcgtggaactggatgggtgctcctcctcctgctgctcaaaagtcctgcccccctggaacatttcacataggagaaattgttcaactgggagctctaaggcaaaggaagtcactgtgcctgtatctgggtttttcatttgtttggtgtactacttggcaagttaaaaaatgttggcaggggtttctgttccatgattgcatactggacaaaggtatttgcctgccagccttcctaggagactcccacatcaccaaatataaacatgtcaataatgctgtaagaaagttacttacagttttgttagtgaaagactctaagtagaaattagaaagcatagtcggggcagggggctggggtggttagaatttggaaattaggcagtagctcttaggaaatcaagagtccagaggggtttccagtaaaaggttattggtgttcagacagtttgagcttagctagtctcatctgccatgggtttggtacagttcatccgatttgcaagtcatattatgactgcttgctacaaactttggttctgtttttgaaatacaaaaacttttttttaaaaaagaaatccataacagggaacaaaacagaaaaggggagtcatcagaaaatgagaaattgcagcaaatttctagaaaataagagcaaatgaaagtagtttgatggatgcaacaggtagagaagaggcagcctagaacaccccagggagaattgtaagagggcccacctttgcgtgtgaccagacatctggtagtaacagctgctgtgtggtggcatgcttactgggccacctgctttccatttattatgtcatttaatcttttcagtgacctgatactgtaagaatgactacccatagcttacagattgagaatctgagactgcgactcagagaaatgaaataattacctaatttctcacagtcaacaagtgttagagcttgaattcaaactaacaggacttgaacacaactttcataaagcaaagattgcctctctggttcattaccaaccacaactccaatacatagctggcacgtggcatccattggtgggggtaggggggtgaggcaggaggagaaagtgtgtatgtactggagtattggatggaagggtggacagatggatagctgaaccaacccaaatccaaatgactcctaaatccaccataccacaccatattgcctctccagggctctgaatgttagtagctaagtcatgttcaactctttgcaacactgtggactgtgtccagtcctcctctggctcctctgtccatgggatttcccatgcaagaatactggagtgggtagccattaccttctccaggagatcttcccaacccaaggattgaaactgtggtctcctgcattgcaagtggattctttaccatctgagccaccagggaagcccccagaactctgaagtaccatgtaagtcagtctagaggctgtatatagagagaagatgttcattaaagccagagggactcagaggctatggaaccttataaagccacattcagacacagggtgaggaggaggtagaagcagagaagcaaaacccaagagactgtggtcagacagtaagggacgaagaatcccaaccaaagtgttcaagcaagaggaagccaagaattgagagaagtcctgagtggcaggcctggggcaccagcccagcccaggaacggagcccattagcttgtgcttggattgagccgaaaggccgagaagcagtgaagcgtgctatggagccagaggctcaggaagacaggtgcttgctatatttattcatgtatttatacc

SEQ ID NO: 59986 - DNA, 1146 bp, Bovine  19866881102260
  misc_feature (1)..(1): n is a, c, g, or t
ncaacctagatagcatattgaaaagcagagacattactttgccaacaaaggtccgtctagtcaaggctatggtttttcctgtggtcatgtatggatgtgagagttggactgtgaagaaggctgagcgccgaagaattgatgcttttgaactgtggtgttggagaagactcttgagagtcttttctagtgtagcatctcattatcctaaccacactattcctgtctgaacattcagttccactcactggaataaacatctgctacaaaccttattaacaagatacatatcaaaggatccaagcaagttactaatttcctggggtaattacactgttctgtataaaaaccattagagcagtaactatgttcagaagctccctgaacatattatagacagtttatctacataacagctatttctacaagtcaccaagtattcgtcaggacaagtatagcatgactacatgtctagcactcaattaaaacaaaggcataggacatttttatgaggaaaaaaaatttacaatttacatttcaaatgtatacatttagtgaattgcttatataaaaactcaaaaccagaagctaagcaataactacaatgaattgtgtattcaatttttcttaaagcaagaatgcttgtatatatatgtgtattacatatacatatatatatacacacatacacatataatacacatacatcagaagtatatgtaagaatatctgtagctatcttttactcagtgtccactgtatgctaattgtttggaattactttatttaataaaaatttatttttatttattttaatatttaaattaagtaaaatttatatttttaatatattttaaatatttttaataattttaataatcaaagggtatcaatatttttaaacttaggaatatgaaatgtgaagctaagctctgttgtaagaatagaaccttaagagtggataaaattacaaaaagtattagtaaggattaacagaaaaagaaaaactatagaaggaataaaatacagaatgaatcggggacttggtaatttttagattataaactcataatacatttgttaattttagaagtgcccaacaaccattaaagacaaggtggtgggcagcagtcataccaaaaagtacaa

SEQ ID NO: 59987 - DNA, 813 bp, Bovine  19866881109182
  misc_feature (1)..(1): n is a, c, g, or t
ntcctctagaaaatttctctttttaggacaatagaacatgcacacatgaaaagggaaaaatccacacagaagttaaaataatgcaagacaataaaagaaatatcacaaagctgtatgttttcaaatgccaaatatttggtatagacaaaaaataaaagaataaaagaagcaatgatctttctgtgctgagtgatcagaaaaggatttcttttggagcagagaagatttgaaccattttaaaagaagcagttgagcatggacaagagcatggatggacacatggagaagagggaggcatggaataaaggcagaaaatggactatgccttagatgggaggcatggagtagaggaaggaaatagaccactgcttaacaggagtgcaggagaacaatcaggtgagcaattacagggtagtctgcagagcatcttgaccagcagtctgggattcatcttaaaggttaatggatatccatagcaggtgtaactattaaatcaaatttatcaaggtgtacttcatatacaatcaactgcacacattttgactgtaccattagatgagtttttgcaaatggacaatgtcttgagatcaccactgcaagcaaggtacagtccatctccatcactccagaaagttctcttgcaacaccttctagtcaatccctccaaaccctctcttgctcattaacacaccatagtccactaattacccatgacattttgaatagttccagttctaagctgtaatatttttaagctgttcaaatatttttcatacaactttggcatgcttagtcactcagtcatgtctgact

SEQ ID NO: 59988 - DNA, 2143 bp, Bovine  19866881157465
  misc_feature (1)..(1): n is a, c, g, or t
ncaagagcaagctagccaagaagtgttgcaaggaaggaattttctggagcctcacaccaaactttggttattatcctgggcgatgttacagtttcactgctggtttgtattaactagtactagaaacacatagtaagtgacctaattcttttccagtggattttcctttttttagggctataccctggttggctgctttatttaataataaatcaacagtcagtatgactttgagctcaaccctgaattaaattttcaaatatgttgttataatatttaataaatatgaattcagatttttaaggttttttaggtgtaattttatatttcatgaaatttacccattttaagtatacaattcaataacttttaatatttttacagagttgtgtgatcatcaccacattaagaattctttgggttttttggccaccagatggcttgtgggtaagatccctgaccagggcagtggaaacgctatgtcctaaccactggacctcccaggtaacgcccaagaattcgtttttgagcttatttttatttgaatctttcaatagatgataattttcaagagtaaatgataagccacagaaaggtctgccacctaagttactgactaaacttttatcaagttttctttgagtggccagaggtctcctgcccatcctctcagatgcctgtgtttgaagacagtgtgtccagataacgtggtttattgttccgactcatcctgtggtttcactgttacttgatcttccctgaagtaaatgaccactgagaagggaggggactaatgaggccttccagttggcctcattatcacgcatggcaaccagtgaccaaacagctcttgacgtcatcagtaagtgctttgaaatcaagcatctcaacaattcttgacaacaactgtgcgaagtgccctcgtggatcaacagtgtcacatatttctatttttgctttaacattgatttcaattcccttcacctgcctacatcaatcactatgaccttgaagtgtgggacaaatctctttccagttttcccctttcccgcatggacctctgtgaccttgattctggctttatttcctttatgcttaaaatgataatccatttccttctgtcaaaggcatcttcattactgtctccttttcccctctcttcacaaactattcctacagcacataccaaaattttagttatgaacaccttgtactctgaaactgaacacttggtctgtggagcttctgaattctaaggttctatagtcagctcttccaggagctgccttcaaaatcatcttaagcaaaccactctctgaccactgcctccagtctttgcagctctgacttcagtaattctttttttgtctgggatccataatccattaatcctcaaactattccactgtccataacactatcatgtctgttctgaactatcttccatccatgattcattactccctacacctctcccttcagcaaacttgcctggtaaaagtctaacccatggcaaaaccaactgtccatcagctcaacctttgcaccaatgcagctgaatgtggctggaggagaacaaccaaccgtgtggagtggttcacgttaaattatgaccactaacctcaggtgtccccttagtgctacctggcagccctatcccattgtcccccatcgttcactcttccactctccaaggcagctgtttcacaccttcctttctctcctaaacctcacatggatgaccttacctcccatttccttaagaaaagagaagcaaccagaaaaaagccttctaggagctccgattatcacatctgccttatcctctactctatcacatgtagtcatagataaactatccaagctccctgttcaatatcattgcctccacttgggtgctagacccactattctctaacctactcaaagatatggcttcagaaattattcctctctcccttgcatactcaaattttcctctgtactagatcattctcctcagtctatgaatatgtcttaaaatatcctcatcttagcacacaacagtatttacctctcagtttcactttaatcccccttctggttgctcagatggtaaagaatccacctgcagtgcagggagaccagggtttgatccctgaat

SEQ ID NO: 59989 - DNA, 1082 bp, Bovine  19866881165044
  misc_feature (1)..(1): n is a, c, g, or t
nggctcttgttgctatagccttttttatggcaactgaaatcattaaattgtttaaggggcatgaattaaaactttgctacagaaatacaacatcacattattctaatactatgcctggctaaattgcagttgaagaatggcgttttgttttttctgtctaagattattttgtaaagaaacttttcatgtatctttagtttaacgttcatcactttaatggctccataatggtcccgtgagatgatatgccatagattatataaccattccctaaccgttagctatttgtatttctcatttttccttccactttcataaataatgatgctataaacatctctgtacaaagagttgtttttccatcatttcaatcttttcctcagggcaaagttccccaaactggattacttagtcaaaatgcatgcactgtttttaaaaaaacttattatggaaaattccaaacaaagacaaaagtggaaaagataatataataaacttgatgagcttatcttcctgcttcaacaattgtcacctgatggccattcttgttcatctatatgcatactcactttttaaaattatttcaaagcaaattccatacagctatcatttcagatatggtaattctttggactcagtactgatggtcttattgtcttccagaaattcaagtgaattttcaatcctaaagctcaaatatgacatgacagcaaaagaacaaaacataaaagaaaaaatgacaaattagacttcattaaaattaattaaattaaaagtaaaaattttgctctgggaaagattttgttaagaggatgaaaagacaaaagtacatactgtgagaaaatatttgcaaattataactgtgacaaaggttaggtagataactctatatctatctctctatctatcctcaaaagtcaacagtttaaaaagccctaacagttcaattaaagaatgagcaaaaggcataaagtgacatttcactgaagaagatatacagatgtcaaataagtacatgataagatgtttaacatcactagttatcagtacagctcagttcagttgctcagttgtgtccgact

SEQ ID NO: 59990 - DNA, 1371 bp, Bovine  19866881217157
  misc_feature (1)..(1): n is a, c, g, or t
ncacaaaaattccacaggcctgaactagagcaaagtcaacagcaaaagagagaagatggcagcacggtctttgtcatgagatctgtggaggctgatggagcacttgagcgagaggatgggttaggggaatcctggacatgacagaagcgacttagcagcagcagcagcagcagcagcatataccttcagtcaccatggctgaaactttgtaattccaggagagtcagttctaagctgcttaacgtttaggccttcttatgccctttccccacaaacacagcaacccagatgtccaatctggcagaggtttatgatctataacacttttttaaatatgaaaataacagagtaaatttactgcaagttctggtcctttggaagtatattccatgataaatctcctgtctcaactttcttttctttttttctattttagaagctcagtcgagtcctactctttataaccatggactatacagtccatggaattttccaggccagaacactggagcaggtagcctttgccttctccaggggatcttcccaacccagggattgaacccaggtctcaactttaaacaataaaaatagaaacaacttctcagaaagcattattctatattctaacagaactctatcttttggataatgttagttgaagtagccacctagaaacaatcaattttcaaaagaacatagagtacttctccagagatttattactgatatgaatttctttttttaacttaatgactcaccagcaaaatcctttagaattggaaggctctgtacttggtgagtgtgccgatgttagtccctgatttatacccctgagtataatttggaagaaactgctgtgtaaatctgaatactgtaaacctgtaaaccatgagtcttttttaatctagtttcccaattaatagtgggtaacgcttgagagtagaatcatgaatggagtggaggagaggaatatggaatctttgctgtgctaaacttatatgtaaaaacttctactgaacctacattcagaggatcagtggcagattcagcacaaataaaagcagagaaccaggccctgggatggggcagactgaggtggttgtccatgattacaatgactgatgtcttgaagttgggtaaataatcctttgttgttggttagtcactcagtcatgtccaactctttgagaccccatggactgtagcccaccaggctcctctgtccatggaatttccaaggcaagaaaactgcagcagattgcttgttccttccccagggtcggggatggggtggtcaataatcctgaaattatcaaagggaaggaacaccaaaaaaaagtcattcttgtaaatgcatcactacaaaatatg

SEQ ID NO: 59991 - DNA, 733 bp, Bovine  19866881261204
  misc_feature (1)..(1): n is a, c, g, or t
nctgggccctttctgaagcataattggtttaagatggcttgggcttcccaggtggcactactggtaaagaatttgcctgccaatgcaggagacataagagatacaggctcagtccctgggtcaggaagatcccctggaggaaggcatggcaaccctctccagtattctctcttgcctagagaatcccatggacagaggaacgtggctggctacggtccatagcgtcacaaagagtcagacacgactgaagcgacttagcatgcagcatgcacaactggtttaagaggaatgaggctatcgctttattaaagcacaggcaaatagcccaagatgatactcaaagttatgtaaattacagaacactttaaggaggtagagttactttcaatggatcaaagggaaaaaattaacataaatgcttgcttagaaaagctacatgggaaaattttcattaaatgatgaagatactgggtaactgaactcttcattgtcttgcatttctatggagcttgctctattcaatgcacagttgtgtgagttgactcccttggaatacatgatcaacatctccaatggaaaatttaaattagcaatattttcacaaaaacagtgctgtaaagaacaaagagactgggcttagggagtcaggagaaccctgagttctgatcccaattacaatatatcatttactggttgcatgaccagggggttaagttatttaacctctctgggt

SEQ ID NO: 59992 - DNA, 4253 bp, Bovine  19866881275597
  misc_feature (1)..(1): n is a, c, g, or t
ngagcttggggaaaagaaacgagtgttgcagggagatctgaaagcaaagactggcagttctaacagaaccatagaatctgtttccccgtgcacttagaaattactgcttctggagctatcagcaccgtcgtcatgcctccagagagttttctgtgtggttgagccgaatgggtgtaaacccatttccccaggatatgctggtcaagttcactttttgaactgccacctcccccaccccacccccatccccaccatgtcggtgacaaatgacagaccaggctctgtctcagccttcccacccccagcatccaggaagatggcacctcccagggacaagagcttttgtcagagactgcctgccctggagaacacattgcaccaacgcatgatgcctacgccggaaaacctttcctcattaacacttcctccccaaggaagtcactgggatcattgtgtcatgtaagccatttgcagcccaggtgagtaaggcattttggctcctgtttatgtggaagtctttgtcataaagctggcttgacaacagtgagatttcccagtgaggttgttcccagttccattatgtcactcatctttgtagcaaaaacatgttgtgtgcctatttcatgcatacgtgctgggtgctgagactaaaaagagatgaacaccaccagtttccactcctcagcggctcagggtctagacacaaatgcagattattgcaataggggtccagaccactgggtctaatggcagctctttcaggactgtggatgagaatggagggcaaaccctccaggcagaaggatgctctttctctttcccccagtcagctggtcttcttcttagttaatcttgtcactcttagccttattttcccattttgtatttttgctctcaactctctccttgccctttcccctttctaatactcaacgcatttcttggtttaatctcagacttgctcccatgtgcttccagtccctgcccgggcccggcccccatggccctgagagccgattttggtcatgtgcccactggactccttgcccccaggttccctcttcagtcctgccatcctgcctgcatggtcaggttcctaacatatcagatcatatcactctttgtttagagacaacgcctgtctctctttagcttttggtgtgactaggcgttcacaccatctgtagacgcttggtggagcaggggtagtgatggcgatcgctgacccaggaagaaatggaatggaaggaggggactcaaccaccagctcggatgggcaaaggcagggctctggtggtgatggcacatgggaaccacagactcccggttcgcataaccgcctccagccactgggtctggaactctgggtgaggcctgagcgacagtagatttacaaagctcccctgggtgattctgatgaacagtgaacatcgcaaacttctgtgctgctgggaaacccagcaggctctgtgctgcgggttggattacgtgctttgaaaaaggacattcctatcagctccacctcacagggaacacagtcttcgtgttcctgttggtcttttggttcaaggtcccaaacaaaacagtgactgcttggctctggaagccatcgtagctctaatcttggctctgctgctctgtaagctctacccactgagctaatttgcccaaagcctgtctgtttcagagaaaatacaggttgtaaaattcaaccaattcctcatcctagatgcatatattctggtttctattgggatttaatcaacaaaattttagttgtctgctcacaatagcataggagtatggtatattttatgaagcatgtctcaaaccaaatgcaatctttgtttgcttcaggcctgctttgaaaaacattttcatattctgagtttattatagttcagtagttttggaaagtatttagatttgcttttaattcactacacattcctttttgttttggaggggggaagtctattgatcttacaagatcataaaaatatcggtttgtttcaggattcagtgtgtgtctgtgtgtgtttggaggtgggggatgactttgttttgttttttattggcattttaattcatttcttgctagaaaacacacatttcttttggtggtaaccacaacacagaaagtgaaaatgttagtcattcagtcatgtccaactctctgtgaccccacagactatagctcaccaggctcctctgtccatggaattctccaggcaagaatactggagggggttgccattcccttcatcaggggatcttcccgactcaggattgaacctgggtcttgtgcattgttggcagattctttactcaatcaccagggaaaccccagtctcaacgcagcacctgcacaaaattactccatggccacaaaaatttaaaatgtgtaggaagcctcctcttttctgtagggaagtagataagctgagacttttttgttttgttacctaagtctctgctactggcctccggctagcccaaacagccgcatcattcaaatcagggctggccaggccttgggcgaagctgcctgtgtggaagcgtttttttgctttttaccctgatatccttcatggtttattgtgtgctgtcctccacatgacacaagcctaaaaagaccatttgtctgcactgtctcatctctgcttgccttgctccttaatgcaagtctttaattttgtttcagtcatcctgtcctttcctccaatttcttcaccaattttccccacttaataattataaagaaaaacattagcaatgacacttcccccctcccctttgctcttttctcttcataaatatccttgactgcaagacatccaggtacagcacattcatccatttttaatctgtctcttcttgtggttactgtgttccagggactgaaggaccctgaacaatggtctccaaaaccttggactgagcctttcttctcatagcagagaaggtgctgagggcataatggagtgtgatcaaataaagatctgttgtctgaaacactccctttcaaggtgaatatggattttcatcacatgaaaccccgagctaggaagccagagtttttcatgcctgaatattattagcaaatgggaaaataatttggagagacagcagactgaaaaactggttcctcgtaggagcactgtccctgaggcagcccagaggccctggggacagacactcacagaacgatgacagggcagctccagtgccagttcagagcaagagcatgcagaaaacaccttacagaggggctctggctcgctgtggtgtcttcaggggtctgttgacagccaactttggctttgcggtgtacactctctttggaggacctcatccaccctttctgcctttccctagctgtacctcttgacacctcccactgttgtattgggttggccaaaaagttcgttctagtttttctgtactggattacagagaaacccaaaggaactttttgaccacccccaatatccccacccagctctctccttcagctccagaatcacttatacaacatccttctggaaatctccaggcatgtccaaaacagaattcactttctggacgcccttagtctgtcacccaaacatgctgttcttctgagtgatcccctcagatcagataaatatcccctcagataaataacactatcacctactatattcatagaccagaaaccacagagttctctggggtttcttttgtccattattttgcccaacaatttgccataaagactcctgattggatctcagacacacctccagagttagtctggaccagctccatcctagttcattcacttgccgcctctcacctggacacaagtacctcccagctgagcctgtggatgcctccactgctgtaggatctgtctgtcttctccactactgtgggatccattgttccacagcacatgtcttttaaggccacagataagaaacttccacaggctcttcgaagtctgccagagaaggtccaaacttctcttcttggcatctcagacccttcccaatctggctcaaacctaccttgctaggcttagcttccctcaaaaaatggcactctgggctttctatcatttgaatttttatggtgtctctactttgtgcccagcaccctgctaggcaccccagattcagagaggaggagggcacaggtcctggaagcactcaagactcaaaggagtaaatagacaagaatagagatgggcaaagcacaccaggagagaa

SEQ ID NO: 59993 - DNA, 1294 bp, Bovine  19866881313538
  misc_feature (1)..(1): n is a, c, g, or t
ngcctgctggggatgatcggcatccccaaggaaggaaaccttttcttgtaataatatgaatcaagataccagatgatctggattcttatttccaatgtttcaagtggaaaacatagctctttattgtctgtaaatcaaacatgattacttttcctcttagagaaatactgtattgttagatgtttgttgagctggtaacatccttgcaaccgctgcaatatctttgttagtaataaaactttgtacacaagtactagtaagattgttattcaatgtagcttcagtcattaaattactatagtgaagtagtacttctgtaatatttacaatgtattaagcccacactatattttatttcagtggtgtaattaaattgttatttattcaaagagaaaacatcccatcatgtctgttgtccaaagttacctggaatcaaataaaaatcctagattatcacaaagaacacacagtgtctttggattctgccttatttcactgtctaatgtcaaaacacttgaagtttaagttctgaaaggttgatttgttcctcaaaagcaaggaagactctatttgagaaatgagaacagattagattaatatattcatttttaacatagaaaaaaatgcaaaaagcatcatttacataataaagggaaaagcctgccataccttttaaaaatcattatttaattaaagagtttaatgattttgcactaagctagagcaaatgtactactcataatgtataaattaaatttgaacttcagagatttagtaaaatatataaatctaaagaatttatagcatcacatatcctgaatgatgtgaaaagataattacttttcagcttatttataaaagcatatttttatttgaacagtaggagaaaatagaaaattttataatgaagtaaaaaagcattacagtgaagtttatacattattactgtctgaaatacagtatgtttgcagtcaattttgaaagaagtttttaaatttttcaaatgatgaattgacaaatgtttgaaaatagatcatctttattttttaaataactgtaattaaaactcttcattcttctcttagtaagcattgtagttaactgcatgagctaaatgcttctagcaaagagcaaatgacatgtgttcttaattcttaaattttatactggggtttgaagggaataagatattaggttggtgcaaaagtaactggtttttacattgttgaaatttgccatttgatattggaatacattcttaataaatgtgggttatgttacacagcattttaat

SEQ ID NO: 59994 - DNA, 1133 bp, Bovine  19866881336501
  misc_feature (1)..(1): n is a, c, g, or t
ntttcaaaaatgaatcccgaaatttttctcccaataccaagaatttcatcttcaccaggtcttcagagctgtgaaaagagcattgacattgcctggtgagctcatagatatgtggattcatcttcagggtaatttgggactaaagagtggcaaactcttcaatggaaactaggaaccctggtgagttttttcataaataatcttttgtccttctaaagagatcttcttaatcctctagcaccctgagccctcatctgcatatgacggagaggtaaagtgaagaaaccagcaggcagattcgagctgtacagacaattaaaagcatctcagcttggtccacaagccatattcagccttatactgcaagaaacgacattgccccatcaggctgcttgggtaccacatagctagcaatcaccagattagctagctgtccactttacttcaggctatgcaggcctatgcaggctatgcaaaagctacattttatccatttagggaaaaggtagtctgcaagcaaaatttgtcagagtcgaatggcttcttcagcactatcaatgcttactgcgaaagggcctaatttggagcacccatggcaccactgaggatgaagtggagggtaagaagaaagcaagccatgttcatcattatgccttagcacctctagctaaccaggagcagaggacagcctcttccttagcccgaacctatacaggcaaagctgctgggttgtcaccaagggcatctgcttgaagtacagaagcaaccacatgacgtccaggcctccatcccaagggtgtcagctcctcactgcccttttctctcccacttgctgtctgattggccttcttaccacatgagccagatctggtagtctcactccagtgagcaaggtatagagctacttaaactgggatctcgctgcctacacatacaactaaactgtgttactacctggcttttcttctttcttttaaaaccacttcccttataatgacttacatttccatggacttgatcgacattaggcaatcagaaaccaaaacacttctatttcctgacatgaacactatacagaccgtgacttgagtgttcatggtcaatgattccttgctaaacactggtcttatgaa

SEQ ID NO: 59995 - DNA, 1845 bp, Bovine  19866881365098
  misc_feature (1)..(1): n is a, c, g, or t
ntcacatgactggctaagcctgctgctgatagaaaaacagagttttgttgcagaggaaatcttcaagtttgaaacatcgctactgtgtgtcttgatgtgactttcttcttagaacttgaatatttattccacggcagtaaatgattcagttcaggcagtggccctttaatcctttatgcactggaggctctggtgtgtgtaaatctgaactagaggtccacttggccctgaggagcttacaaaaatgaatgtgtatagtgaggatgtggagaaaaggagccctcgtgcactgttggtgggaatgtaaattggtgtcgccggcatggtagaaaacagtatggagtttcctcaaaaaaactaaaaatagaaaaaccctatcatccagtaatttcactcctgggcatatatcctaaaataacaaaaaataagtaaaaagatatatgcatcccaatcccaatgtgcacagaaacactatttacagtagccaagacatggaagccacctaagtgtctattaacagatgaatggataaagaagatgtggtgtctatatacaatggaacactactcagccattaaaaagatgagatgttgtcatctgcaacaccatggatggatttggagggtattatgctgtgtgatggcaacccactccagtactcttgcctggacaatcccatggacggaggagcctggtaggctgcagtcgatggggtcgctgagtcggacacaactgagtgacttcactttcacttttcactctcatgtattggagaaggaaatgtcaacccactccagtattcttgcctggaaaatcccagggacggaggagcctatggggtcccacagagtcggacacgactgaagtgacttagcagcagcagcatgctgtgtgaaataagctagcagagaaagacaaatactgtgtgtcatcacttatatgtgacatcttaaagcaaaatagtgaacattacaaaaaagtaacaaactcccagatatagagaactcttggttaccagtggagagagaggaaggtagggaattcagaggtacccactactatgtataaaataaatcaattataaagatacaatatggggaatatagccaatattttataataactataaatggaatacctgccttaagaattgtgtaccactgtgtagtacatttgaaactcatatactattataaatcagctctaccttaataaggaaaataacaaattttatttaaaaagtgaatgtgtcttagggttgagggttggggtaggggtagacagctactatatattgcacagttgagtgatgacacaggcagaagcagcgtgagccatgagggtacacattgctgtggaggtttaagagaggctgagggtctctgggttggctctgggaagctgcttcccggtggaaaggccgtaatctagagtgaacgctgatgagaagtttctagtgagttttgggcttcccaggtagagaatcctcctgccaatgcaggagacacggattcgatccctgggttgggaagatcccctggaggaggaaatggcaacccactccagtcttcttgcctggagaatcccatggacagaggatctggcgggctacagtccatggggtacaaaagagtcggacacaatttggtgactaaacaacaacaacaaaacccacatctaacccacgattgaaccctgacagcagctgtgggaaactgttatcatcactcccattgctcaggggagcagactcagagaaattgagtgacttgaccaagctcatgtgatccaggggaggtctagctgggacttgactcctcattctttttttgcacatggccttgt

SEQ ID NO: 59996 - DNA, 1784 bp, Bovine  19866881402315
  misc_feature (1)..(1): n is a, c, g, or t
naattaatagatctatattatgtgtcccctacagataatatttcatctttttaactgtgtatggatcatttacaaaaattgactacaaacacaatttttgaattcaaaaagtaggcattctatgacccacatttcaaggaagtcagaccaggcaatatgtctacagccagtaagtaacaaatgcttaagccaaaaatctcaaacaacctgaacagtaaaaaaaaaaaaaaaaaactctgtcctaaataaataatgggtcaacaaggacatcaaaagtaaaatcagagactctttttaaaatagtaaagtcgaaaacattatcttccagaattttggaaatggggcaagagctatacttatttctttaaattaaagactttttctctctttccaataaaggggtaaacatttatttttaatcttcatatttctgattatgttttcttagttgagatttaaactcagtcatctaattgtcccttttaaaagctgaaaactgagaccactttctcttaggatatttgaacccacaactgatcggaagaactaactggacttttgcaggtactggagatgaccctgtacagagtttgtgtccaatgatttgaagagtcattcctaataacaccatcctgtgtcccttgcatgggtttctttgctggctacaaaatgtgagagtgatactcgcctttctagaaatgatgctcttggatgatatcatcagggtgatggcagagaggccaggagaaagggagaattctctagctgagacaaatttaacgctgctgctaccagattaacgtaagcatcagggctacagtggcccatggggtcccactctggccaggcagtgataacacacatggggcagagagggaagactgcacattcagctggacggctctgataacgggaagtcagctgtggcgtgtggtcgcccactgacagacagcacggtcctgtaatgaaattcactaagtacaatgataaacaagtttcacctgctccatttcaaaagaggagttaagaaatctgaatctgagagactcatttacactccattgaaggcaataatctcagtatcagactgggccaaattttctccatacaatttggaatgagcaaaacacttctgcttccagagtatctaatatccctatgcttgcttagaatctgtaaaacgcacgtccctcactaccatttccatagtgatcacagcaagtgggtccctgactccaaaaagctcccagcagatacccgtggttctctccaagcaacagttcaacattatttcctgatgtgtaagactgagagatttgcagagtagaaaagagtctgatcatattccttaaatgtaacctgccttatcatatgacattacttacatgtgaaatttaattttaaaaaaatcacgaatttatttacaaaacagaaacagacttagagatatcagaaataaacatatggttatcaaagggggaacatggggaggactaaccaggagcttatgatgaacatacacacaccactatatataaaacagataaccaacagagacctactgtacagcacagggaactccactcactccataataatcaatatggaaaaagaatccaaaaaaaaaagtgaatgcatgtatatgtataactgaacccattgtgctgtgtacctgaaactaacacaacattgtaaatcacctatacttcaataaaattaaaatattttttttaactatgacttgccttggaaagatgctagaaaccaaaataatatcgtggtga

SEQ ID NO: 59997 - DNA, 1551 bp, Bovine  19866881470702
  misc_feature (1)..(1): n is a, c, g, or t
ntcctgcattcccttgcttccttgaagatcaccaattactgagacctgttcaagggcaagatcatggccagacttagatcacagaatggctttggcaaaaaaaaaaaaaaggtttctttcatgtcaagaaagctatgcctggttctctttctccaagaaccctcttccccccacccatcagcttataggttttcagatgccttttagcccagcatttagtgtgcagtcagttgaaccctgtgtgccttcccccatacatctgtgatgttcaaaaatgattgctaggagtctaaattactattaccttgaacaagaagcaaaagaaaggaaagtttcacattccatgaccaaagtgcttagcacttcgcaataaagcttgctttttgttctcctattagtgtatgaagtttccctatttactctactgtctctggtgagtttaaagatagaaaaaatggaatgtttaaaattcaggctaagtcaagaagtataacatatataacccagatttctgatccagctttcaaatcccagagacactgctaagctttgaaagcttggatatacatgcgacctaagcctttgaaatgtctgatgtttgccatctctgatggaacggtctgcctcaagaacgttgcctttattacactgagaatgaaaaccatccattacagaaagtggtctgatgtcttcatgagggacttgaaaatacatgaagggactcttgcccagtgaaccacagtgctgaggtgcaaaaagtcagaaacacagacggcttagtcaggcttccttagtctaaaaaaaaaaaaaaaatttttcctggaaaaaaaaccagtgcaacatgttgtgcctggaggagagaacaaaagttgttatttttccttaatgacagcactggattctgaaattgagcacagcaggtaggaagagcatgtgtaaatttcaaaagatatccaaatgttacacaggcacctcccatacggatgagcaacacaaaacgtattagcaattttctttatttttcccaaaacaaaacgttctgagaaaaagaaccccctctttttgcctctctctgccttgatttactgtcagaaaggagagatttggctctgatgaagttaggggctgggaaaggccaacctgcctgtctggtaacttctcaccttcaattaattcccagcctccggggatgcatctcctgatcctctctttgtttctataattgtcacttttgtttgttaaacatatccctgtgtgctctttattgcaatacactgtttcaggatcctaaatctacaccaggatgtttcacaaataaatcacggaaagggagaagtttaacctcccaatcctgatgctatttgatgcatttacaagagactctaagaaaggagatttttttttaaagcattgatcaaatatgcaaagtataacaaaaagtaggcaactggatcatattctaaaaagatgtttgtgacaagaaaatttggattagaaattagatggaagagaatagaatttgtaaaagtatgtacaggaggagttctaaga

SEQ ID NO: 59998 - DNA, 1901 bp, Bovine  19866881629086
  misc_feature (1)..(1): n is a, c, g, or t
natagctcaacttcattttaagatgttttgccttctatggcaatcaaaatcaaacttttgtaagtagacgtgtgtgtgtgggttacgcaactcctgtcagcagtgcctgcggtctttgcttgaccttggatgaacagctaagccttggaggtgggtgtgtgcatcaaagctgcctacaagcacacgggtatcccaggttgctcaagctccaggatgagaagagggtcaaggacagtcacctctgggctctgtataggctttgtgaaaggtcacatcgtctgcctaattggaatcaactttctttcatgcctgtttttatctccacggggagaaatgccaagtgagctgggaattaagaagtcagggagccagctgtgtaaccttgttaaagtcacgttagacgttgggtctcactttgcttatttctaaaacgggaccagatatgtttgaaggcaacttccagctcacattcaggttcttgtttttttcctgggaagatcccaggaagtgttcagagttcaggtagtcacttccccctagtcagatgtcatccagccagcctcctgcatgtcattgctttgttcctgccatgtgaacagcatctgggtcctcaccccaggacagtgtcttcctttctgcccacacctcagtgggctccctccagccctgcccaccccaccaccagccccctccactggctcccatcaacaatatatctggggtaatatatttgaaaccaggacaagctttgggaaaacctctgttactgttcctaggaaagttgagtgttgctattatcataaactcttaagtttcctcaaattttccacttacttgttctccttatatgaaacgttatctttccccagatgtaatacttcctatgcaacccctttaaaggagaccactgcattcattcaaatgaaattattcaggacctactatttgttgggctcaagaaaagcttgttgagtgaataaatgaatgggtaaatgtaccttgctgggtgctacaggagattcagaaacaagttctctccccagcctttaggaggatggtctatctatggcagtggaaaggattaaacacatacagaaatagttggaatacaagcagtgccaatattcatggtatggtaccaccacctgtaaatactgaaagctatattacttgaatactagttgggaaatagccacttccctacctaccccctgcaagtctttcccctcccagctatcctacctcttgcttggagtccccaagtgttagtcattcagtagtgtccgactctttgtgactccatgcactgtaggccccccaggctcctctgtccatggaattctccagacaaaaaatactggagtgggttggaatccccaaacctcacccaaacctagcaaccagggaggtttaacatctgaggcttggcagggagcctcagggtatgctgctgcagagctgatctgattggtcagcacccttgcctaactaaccagttagttaacatttgaactatctctactgaatgagtaaagctcaggtaactgccgaataataacaataaaaataaaagtgaggaaacaaaaatattgggaaagttggttccattctcaactacagtgatgggcaccagccaaaagagggcattacattccctggccacagagaccagctcaggaatgagcaaatgaccaaccagattaaataggatgtaacaaaactttggctggcactgttggtagagagatacttgttctttatgatggatgtaaactaagatgtgattcttgagaaaccatgggctaccatatgaagcccaatgatgctaggagttgagtgatgggaagttcctagatcaagccactcctaagtcaagcatgcctggagacttcagtatctag

SEQ ID NO: 59999 - DNA, 1310 bp, Bovine  19866881776324
  misc_feature (1)..(1): n is a, c, g, or t
ntctttattgatttcttctacttacaaaagtaatgtagaatgactgcaaaaaatctcaagcaaaagaagaatgttgtgaaagtcttttctttttttcctttctgaaccctcatcagagcaccactgttcgcatttgggtgtacattctgacagtttttttcccaggtatatgccaaagaatatgtattttagtttttaaaaagtcagatgacaggctgacaggctaattgactggtagttttgacgcaatggattactggagattgctgtcttttcccttggcagttcaaggctttgctgctatgttgggtgaagcaataagctggaaagcaaaaaggagctgcaacagctttcttaaagagggagtgtgtgcaggaaggcagaactaagataacgaaatggacatgaaagtgactcagggaactacgtgccacacttccatttaatggtgtgactgctttcgtggcaaatcctctcagtagagggtaagatccagggccagcctggagtcagcagagagagccacagtcccctttgcttccccaggtcctttcctcactgcccttgttctgctccatctctgcacagcacaggccatcaaatcacatgtggagaactgcaactctttgcagctgcctcattgctgaaaggtcattttgctcgtgttttcttctcagtggtcctggcccccctgacagtaggagcgctgacctccgctttgatctctaaacaccgagggctcctcagggaagactcatgtcacagcaaatgtgtctttatgtcatgtctgtctggacaaggagggtgcttgtcagattgtcaaatgtcaacgctctaaattcggtgtttctgtcctcaacaggaagttacagggcaggagcaggctcctaatcctgtgttcttgcaaaagtattccttcattattgacagccttgtgtgtgtgctatgtcacttcagttgtgtctgactctttgccaccctatggactgtagcccacctggctcctctggccatggaattctccaggcaagaatactgggggcagttgtcatgcccttctctaggggatcttcctgacccagggatcgaaccctcctcttctgcagttcctgcattggcaggcgggttctttatcactagcgccacctgggaagccatttatggccttactatgtatcaaaggtgatgagaattcacactaatatgaagtttgaaatttgatacgaggagagatatgtcttacctccaagctattgtttgggtctataacactaacattataccgagaatcagccgacggaaatgcagat

SEQ ID NO: 60000 - DNA, 682 bp, Bovine  19866882042279
  misc_feature (1)..(1): n is a, c, g, or t
nactatgttgcatctttaaaaaaagaaaaaaatacagagaagaacagctgtggttctgtcttcttctgtcttgggccctttgttccattgacctgctaatctcaaatcttcagaggtactagatctggtttcgtctgactatctcttaacaccagattattggtagatttaaatggtatcaaaagcgtggtactcaataagatggacaagaagaaagcaaaaaaaatattttcttcagtataaaatacactgtattttctccccccaccaaaaaacccccaataaatctcattaatccaatgtaattatgggtacagatgtaaaatcttgatttataaatattttattcttattacttgcagcctctcattaactcaaaacagggtagcagagctgattataaaaggcctaaccagatcctgttttagtaaataataatgtatgattggctgaggatgattattgtcatagtaaccaattagaatttagatactaaaattaaactccttccctgtatgccagtcattcttctgatctgaccattagtgaaaactgtctttgtacacatatgggatgtattgtgtttatcagttagatatattttattacctgaccaaatgagtacagtgtgtctgttttgggaatattattgggggtggtgaatgaacagcaatgtacttgt

SEQ ID NO: 60001 - DNA, 2649 bp, Bovine  19866880181634
  misc_feature (1)..(1): n is a, c, g, or t
ncatcccagtgcaccagccccgagcaccctgtatcgtgcatcgaacctggactggtgattcatttcacatatgataatatacatgtttcaatgccattctcccaaatcatcctaccctcgccctctcccacagagtccaaaagactgttctatacatctgtgtctcttttgctgtctcgcatacagggttatcgttaccatctttctaaattccatatatatgcgtttgtatactgtattggtgtttttctttctggcttacttcactctgtatactaggctccagtttcatccacctcattagaactgattcaaatgtatgctttttaattgtaagcaagttggagtctctacttatgaatgatcctccgagagtcaagcatgatagagaagccctatattacttaagggcacacaaaacattaactgttcagagaaacaattggtcaaatgtaagaggaaaaaggtggtttgttacgttgcagttaacaaataccttctggagcattttttttaaattaaaaaattctattcatttattttggctgccctgggtctttgttgcacacaggctatctcttggatctcttggttgctacaagtaggggctgctgtctactgggggtacacaggcttctcattgcagtggcttctcttgtggagtaagactccaatgcacaggctcagtagttgtggcaaacagacttagttgttcttcagcatatggaatcttccagaaccagggatcaaaccccttgtcatcctccgctttgtcaactagattctttaccactgagccaccagggaagtcggctggactattcctcatgagagcagtagaaatgaatattgaaaatcttgcatttccttccacatcactggtctattgctgtgtaataagccagtcccaaacttaatggtgtctattaacaataatcattttataattaatcactgtttctgagggtcaggaagacttctcagggttgacatgccatagtgtctactgaatggttttgttagccagtaactggagctggagcggtgtggggctggaagatggggctctgcaggcatgtatgcacaccctccctttctctctctgtccttgttgtctcagggcctctcatgtggtcttcccatgcaggctaacttgggcttcctcacagaatggcagcctctcggtggtaggacctctcttcctatgcagagactacgcagagacttggagcttcactttgactgtttcatctattgttgtttagttgctaagtcgtgtctgactcttgggaccccatgggctatagcccgcaaggctcctctgtccaccggatgtcctaggcaagaatactggagcgggttgtcattcccttctccaggggattttcccaacccagggatgaatccacgtctcctgcattacaggtggtttctttaccactgagccacctggggggtcctgactgttccagagaaccaggtaaaaaccaccctgcttttttgacacaatctcagaagtcttgtagcaccatttctgctgaattcagtgggtcagctagtcactgaggttgggccaagttcaaaggcaaggtatacacactgctacctctccatggaaggacttaacaatttgcagacatattttcaaagcaccacacctctctaacacaatgttaacatatcctttggtttgaatctaaatacatgctttttcctttttaaatgatccttactgagcagttgatttaaagagttaaaaagcacatatgtattgcaaagttccactgtagaacaggtatattccataaaatatcaggaacaacgtggggcctttgtgtgcatcagatcgccccaattcatgacgagcattctgtggacagtgaataaagactaccagagtgaatggatgaatagataatgaattagttcacatatctgtcatcaatcaaaaaagctcttaagccaaatagattagaagccaacagaatgaataataatttagcatcttgggcgaggaaataagtttctaaaatataattaatatagcactggttctgctttgttttgtctgtacctgtaattttgttaaaagacagttacgtatattcacaggactgtctgatgggctgaaggaaggcaaagaagagaacagtttctgaaaaactgtttttcatattttattttatttaaaattggcctgcatcaggtcttagttgcagcatgtgggatctagttcccccaccagggattgaacccaggcccgctgcattaggaacatggagtcttagccactgggccaccagggaagtccctgaagagcttcaagaggctctaggtcaagtgtttgaaatgtccagaccacaggctcccccacactcatcactgctgttggaggaatcattggaattctctcagaattctggaaggtggttaccatggggctccttggtggtcacccttggcctcttcctttgtctgcaaattgctgccagggcaggggtctaaagcatatccaaaattccagatgaatcaaatcataataattgcactattcatcaggttagaaggagttttggctcagggcccatttcaagcctgaatgtcctaagcaaacccttttacttccagattatcagggagcattcccag

SEQ ID NO: 60002 - DNA, 1898 bp, Bovine  19866880452573
  misc_feature (1)..(1): n is a, c, g, or t
naagcttaaaagactgtcaggaaatctcatctcagagctataaatgttccagttctcgccactgtgggattccaggtggcactagcggtaacgactctgacggcaatgcaggaaccacaagagacacacgttcgatccctgggtcaggaagacccccgggaggagggcatggcaacccacaccagtattcttgtctggagagtcccatggagagagaagcctggcgggctacagtccatggggtcacaaagagttggacacgactaagcaagcacgcatgcctctgctcttgtctctggaaagtactctaggaagaaaaaaagaagaattgactgtagcttacaagctgaatctgattagcaggacagcggttaaaggcactgattctggaaccagaaatcctgggttcaaagtcccactccgctacttcccaggggggcagtgttgggcaagttggttgttttccatgtctccccatctccatcaccacaataggggcagccagagcatccacccctagagggggttgtggggattaagtcagttcacatatgaagagcaagagtgatggtgccctctcgatggggctctaaagccgatgggtggtctcaaacagctttgcttggctccggaatctctgtgtgctagacccacacctaaacatacaagagagcccactggggcttagagtgaagcccgctgccatggagacaatctcctggtctgatctacccaggctgtcgccctcccagggtccatcccagcccattaggagcaaaccaaccaccacgcagatgctcactttgccctgacttcacacacagtcctccagatgggctgacatcctacaccacccatttgtgtgcacttaacctgaccaaaaggccaccaatggtgctgcctgcccgcgttcccaagccttctatctgctcagctctctactcgcccttttccttgtttccatctgtcaacatctctgatagccttcttctctcaggagtttctgtctccccattcctttctctgtctcagttttgcttttcctttctctttttctccctctacttactactctttctctctcttacacatacacgcattctctctctctctttcgctctctctctctctctctctctcacacacacacacacacacgccatgacatgctaattgggctcccaggagagtctgcctcctccacacaggcagaagtgaagggagctggtgagcaaggacgcacgtcacacctgccaatcaagctctgtcgcttgttgtgtgacaccagccctggtcccaggaacaggctgacctggccatctctgggcacagcctcagctgtccttccagagtgggcccagggaacagatgctctttgtgctgtgtatgacagcgtctcctggaatgtcctgggagcaggtgtgggcccctcagtggctggacagaggggcttactcccagtgagtttatggaactagatgtactgcagttggtcagctatttttacaaaattccaatcacacagctaaaggacaaacatcacagaaggaggaaatgggtgacatcctcgcgctcatgtcacgggagtatgtcagccgcaaggaaacgtcttgaagctggactggccataacaggaaagaaatatgacccgaaacaaaggcgcctctgttaatatatgactttcgatttaaaatggtctgccaactggaacagagcacatcaagagagaaggctggatggatggatgaaggtgggaatatttttaagtgtaggctgaggtccaagtcttcatctatcatctgatgcacttgacaactatttgaggactcatggtgttgaaagcaacctcacacagcttacagttcagagaagaagaaggaaaagggaatgagaaatgc

SEQ ID NO: 60003 - DNA, 956 bp, Bovine  19866880677859
  misc_feature (1)..(1): n is a, c, g, or t
nagactcttgttattgctctttgaggtttcccttttggctttcttttctttgtggagaaggaaaatattcatttctgatttgtagattgctttttccagttccccagatagtcattcttaaaaatcttgggatctagcttaaaatggcttataaagcatcttgaaaggactagttgctttttgtgtgtattttgtttctgtacgtttgaactccatctaactccatctgtgcagttttacctggaaattccatcacgactctaggttcagaagcccaccaggtagcagaaattcatcctttccctcagaatcctggagacaactggaaacccaggacaagcactgacccccagtgatgcaggacagctgcatgcagacatgaggcagcggtctcactggcagccctagccccttccctcaaccccgagaccaccaccttcctcctggggagactcggagcctgaatcagggaccagttcgggtccctgccgctcctccccctcccccaggctccccatcagaggcaccagccgactctcctgtttctttattctcactactggaggactctatttttctgtctgccttgacagctgccgaaagcaaaccacaacagcacttccaatggtctcctcaccttctgccgctggagcaaccccctcctgcagctgccagctgggagcacccgcctttcatccacatgtaaacgtttccaacagcttcggaagcagccacttggctcggccttgcgactgctttccgccaacactgcgatttttggattttaattacatccccttgattaggcctcaaaaatccatatgtgagcatttgaaatggcatttctaaaaggcaaatctgcccatttcaagtgcttcctcgggggtggtccgagtactgattacacttttgctgatttggaaaacactctggtgggtagcactagttactctttg

SEQ ID NO: 60004 - DNA, 656 bp, Bovine  19866880726214
  misc_feature (1)..(1): n is a, c, g, or t
ncaccacctcacagtcagagccacaggtgagcgaccaggtgtgcggggttcccgcgtacatttcaaagaataggctggagattttatagctggtatctgagaagttcatttgaagtgttggacatccgtctcgtgttggtgaacatactttgggaaatcagtggtttagaagtaggttttttaaaaaaccctgttcactgaaatttattttagtgtgagcctgtgatacacaatttgacaccgctttggagaattgatggtccctgttgaggatgagtcagagctgggctgcagggagactgaatttcccttcaagagttcagtgctgtatagcttctgggactttaataagccactcaggcttgtctcctgctgctcagcatcataagaacccctttatgaaattactgccatgtagtacccagcagggcatactttattctccatgcaatgtaaatgatggataaaagagcttgtaaaatatgggtagtgatggaggattgattattgtgaaaaatctcctgccccgcccccccccccccaaagtcctcttcctaccatcactgtgctttagttaacaaactggtaacccactgaaaaatatattaaatgcagttttgtaattcatttggtaatttgcactctgtcaggttgtt

SEQ ID NO: 60005 - DNA, 1223 bp, Bovine  19866880812119
  misc_feature (1)..(1): n is a, c, g, or t
naaaaattttaaaaagggaaaagccgggggatgtgctttccaaagggaactttaaagaacaccaacactataaagggagtacagatggccatgtgcacgagctacaagcgtattaaggaaagactggaaaaatatttaaactttcacctctggctgatcttgagactgcacaagaaggatgtgaaggctaaaaaagtactgtaaactgtttcctgaatactgatagtatgtcccaaacacatacacagagccccttggtgaagactaggagacttacagactccaagcttgtaaataagtatccatccaatccttagctgaatgagtgaagaatccagtggacataaatagaagaaaacagcctgcacacagttcaggaaagtcattaaagaatcacacagcaaccataacaaacagaagaaacaacaagtcatgggagagagggagaaactggtttccagggttgctgtgctatttaaaatgttaacttatcaacaaaaattacaggatacaaagatacaagaaagtacactccgtgtgaaagagaagtcaatagaaactgtccctgaaaaagcacaaacattagatacactagacaagtgtgatagtatcaaacactatcacaagttttaaatatgttccaaaagataaagaaaaccatgtctaaagaactaaaggcaagtgtgagaatggtatctcaccaagtgctgctgctgctgctgctaagtcgcttcagtcatgtccgactctgtgggaccccatagacggcagctcaccaggctcccccgtccctgggattctccaggcaagaacactggagtgggttgccatttccttcttcaatgcatgaaagtgaaaagtgaaagtgaagttgctcagtcgtgtccaaccctcagcgaccccatggactgcagtctaccaggctcctccatccatgggattttccaggcaggagtactggagtggggtgccattgccttctccgctcaccaagtgagagaatgttaatagtaaggtggcttccctaatgactcagttggtaaagaacctgcctgcaatgcaggagacatgggttcgatccccagtgtgggaagatgccttggagaagggaacagcaacccactccagtattctggcctggagaattacatggacagagaagcctagcaggctacagtccatgaggtcccaaagagtccgacacgactaggcaactttcactt

SEQ ID NO: 60006 - DNA, 653 bp, Bovine  19866880862418
  misc_feature (1)..(1): n is a, c, g, or t
nggaggtcaggctgcagcgtgcacaaagacttctgttgaaggaaagaagatgccttcaaaacgggaatgctatacttacagctgattcatgttgttgtacagcagaaaccagtgtaacattgtaaagcaattatcctccaattaaaaataaaatggaaccaagatcattttcctatgcatcttcacctgattatgaaacatatagagggaattccttggcgttccagtggttatactcagagctttcactgctgtggcctggcttcaacccctgcttggagaactaagatcccatgagccacatagcccagccaaaaaataatagtaataattaaaaaataattaaaagtgaagtatacagaaagttaaacatacatgtgcatacatattttatttattttatacagtactagtatatttaagaagcagttgaaagcccagagctaaaactgatatgtgtcttcttgcttattactactgacttgctgttatgagccatctgtgacattgaacacattgtgctgggaccatctgtaatgttcctaatctaatggtttaaatgacagctcgtgctctcattagaagatcttagcaccttgaaaacatttgctggaaacagcaaggcattgatccctttggatcctatcagatag

SEQ ID NO: 60007 - DNA, 614 bp, Bovine  19866881057192
  misc_feature (1)..(1): n is a, c, g, or t
nttcatcattaatcactataaggaatgggctcagtgattcataattctaagccagcccatttcctcaaggatcccgtttgccttttgttgttccagaagtggcacagttcactgccctgtgctacccacattcggacgtgcacactttctgattaattctcttacgaaaagtcacgtactccaagcgttttacttataaccccaaagcctctgaaaaatcatacttctttcagacaccaatctttttctggatccagctgccctcagattacccaagttcaaacaagtcaataattagattgaatgaattaatcacaagtcaataatcctcaggctatctttggtcctcagcaaaaagctgcatttggggtggggcatttggatggaaacgcactccccacagttacttcttcattgctactgttcacctgcaaccagatagatggtctttagtggccaaggaagagcagcaacacaaaccaggcttccccttctggtcctggcccaaagtcactgacaaggaccgcatcactgctttctacacggaaacctgcattgcactgtttaccatcctgatactattttctctaaagctgcccgtccgcataaggact

SEQ ID NO: 60008 - DNA, 904 bp, Bovine  19866881071048
  misc_feature (1)..(1): n is a, c, g, or t
naaatataccagagtctgatttcagtgatgactcttgcacaactttggaccctttgcacaactttggaaatgtaagcggcagcttgtggttgtactagtgatatgtcaggttgaataagtaacactagaggcatgttgattgctgcctaaaagaaagattttctgctgtaaatagtgtttcagcaatgttttttggcgtgcgcgtcgaaacttggtggttctctatgcagaatcctagataaagcaatgttttgcacatgttcagtagcaaatttatatactttttaaaatgctgaaggaagtggcctactggtacattttaatttaggttgtaacagtgagattggaagaggaaattcacaataactataataggaatgggtttgggaagtagcagggtgattatggacatcagcagtagtgacagttgaaattagcctttgcaggtttctctctttgagcataccgactgaacatctactgtgggtgaagagttctgctgggagtagcggggctgcaaatactagcaagttggtgctgggttcttcggaatttgccctcatgccaaaacagtgtccaggcagttcagagggaagacattcatccttgcccttgctgctgttgccacctggtccaggtacacttggcagtagactgtccaccgcgccgccttctcccccctccagtaactgtcgggtcagctgtctgcacactgggctcttaggggccattcctccatttccattcattcgtttgaccttcagggacctccacgtctatgcatgacttcccacgctggtcttctttcccactgtcactagtccctgccttcctcctgccgctgaggccctgtgcttttacctggtcagagtgctcctgcactctgtttggagtgtctctctgt

SEQ ID NO: 60009 - DNA, 1148 bp, Bovine  19866881073164
  misc_feature (1)..(1): n is a, c, g, or t
nctttgtgaccacatgctagagaaacctgtacacacttgaggcacagcatctaaaacacctaattccgtctgtacaactattcagtgtcttaggtcaaaaccaagtcacagtatgtgagtagaagaacaaataaatagaagaagaagagctgctggcttaattcagtttatctgatggggagatacctattgaggaaatctgtacttattagtaaaatgagtttaattgcttgtttttgtgtgcgagtaattttacatgtttaagagcacattataaaatatgtattagttggttgaaacacaccaccactgggcttgctgactgaatgactgaataaaagtatttctcaggtaaatgctgctactctctaggatcataattgagaagacagtatcttaaaaactacagttgttagaagaaagtcacaacataaattttaatcaaagtgtggtatgcaaaaaaatacactttacctgtttacttaatatatctttctaaaacaagaacagtatggttgctttccactttaaaatatcttcactcttaattgagaagtagcatttttagcttcctactaactttaatacttggtggtggagtgagggggagcgggggcaaggagtcagatgaattcctagaaactgcaccagaagtgaatctccatggcttctttgaactgaagcttcaacagtcaagtcacactctttggccaagttcccttctttatgtacattcaaagaatctttatataactaaatgcaccactaaatccttcaaagtcattcaaaggaagcacttcctccaaattctctcattgcacaaggccaggcacacacaacagaaaacacattgaagggaaggccacagatcctccaatttcagcgtcgtgaccccttccgtatgcaaaaaagtatcctttccaagccacaaatgtcttagcccttattttcaatattaactgacaacattagaaggctataaagacacctggagagctcacaggaaaaacatgtggaaaaatatatatttaaggtaaaatggaaagggggaaaaaagatatagctctaattagaaaagaggaatatggcccgtactttttttttcctatcattaagatattaagtgactctttctgaaatgctgacac

SEQ ID NO: 60010 - DNA, 1401 bp, Bovine  19866881089995
  misc_feature (1)..(1): n is a, c, g, or t
nccatcactctccatggatccctctgagtgatgcctccgtggctctctgtcactcagaatgtccctctggccagggttcatggctgtgggtaagacctgctagttggaaagcagtcaatcctaagggaaatcaaccccaattcaattcattggaagaactaacgctcaagctgaagctccaatactttggccacctgatgcgaagagccaactcattggaaaaggccctgatgctgggaaagattgaaggcaaaaggagaacaggcgacagacagacagatagcatcccaatgcaatggacatgaatctgagcacactccagggaggtagtgaaggctagggaagcctgctgtgctgcaatccatgggatcgcagagaggaacacgacttagtgactaaacaacaaaccagagcaccctccttccagagagaagcaggcagaggctttcaagccgtttgcctgcaacctttgaccccctctgtgctctcttggttaatggcaattatcattgttcaagagacacaccacagaggtaagtgtcctcagctaaacgggctaaatgatgaaatggaggtgcagatgtttctctcgcacacagctctgtctattccaacagcataaatgtgaatttgagccccctcagaatgagccctgaaacctcaatggaggtgagaaagaaagaaaattttaattctagattttgggaaaacaaaacttctggttgtaattttggatccccttgatggatggatttgcttcaggtgggggatgtcaaaggctcaggtgtgagtggcagggggagggcggccacagctgcagtgcagagaggccagatggcttgccaggaaggagcgaaaactcggggaattctaatgatgagcagccctcaaagagctttcagagagcggacagacgtgctggggagcctgggagccattgcaattaacatctagaaacaattgtgggacatgcttgcctaaaatatagacctgggcacactccgtgtttggagcatgcacccagggcaaacaatcaaagtagtacattggatgtatgcaaatatgtacacatttcacacacacacacacatatatatgtatatacacacatatatagtacatgtttgttaactgtatgttgattagaaaaaaatcaaatggggaggagactggcagattccaggttttccaagtctccatcttcggtccacttccccacattgccactgggaacatgccctggctgccaatctggggacagaccaacttcttgctgcacccagcccggcccaggcgtgctctctaccttttgtgtgagctgtgccaccgagggaaaggggaggctgtcacctttctcaagctgctgctagtctctctcttcctgagctgaaaagagcctaa

SEQ ID NO: 60011 - DNA, 1570 bp, Bovine  19866881112214
  misc_feature (1)..(1): n is a, c, g, or t
nctagtacagtctatggcttattgcttcagaagactcacccattgacgaaatgtgtggattttttgaaaaaaattttattgtggtaaaaaacacaccatgaaatttacagtcttcaccattctttaagtgtgcagttggatagtgttaaatacattcatatattcacatcatatatatatacatatatattttttttttcacactgtaaaaggatctccaggacttttgtatcttataggattgagactctatacccattatccaactcccctccctctctgcccctggataaccaccatactactctccgtttctgtgaacttgacataatcacataggtagaatcatacagtacttgttcttttgtgactggcctatttcacttagtataatgtcttcaaggtccatctttgggaaagcatgtaacagaatttccttcctctttaaggctgaataatagtccattgtgtgtctgtaccatattttccttatgcatctgtccatcgttgggacatttggcctccttccttctcttagcttatcatggtgctgctataaatgggaattactgatatctcattgagacctggcttgctttttttttttttttttttggtatatacatacaagtagtattgctggatcatagggtagttctgtttttaatttttgaggaacctctgtactgtttttcacagcagatgtaccattttgcaatcccagcaacagtgcacaagggaatatgtgtggacttttaaaactgtgttttgttttgtttttaatatcctgaagcagaactttcagatctaagacagcttgctatatatttggaaccctgtaatcttctgaactggggagaggatgggctgctgacccatttgctcaaatacattatgagataatcacaaatgtagttatctgtaaccaaaagcaaagtggaaattactcttttggctaactagtataattttataataaatctctgtgtaatttgggtctgtttttcagggtggggaaataatcttcctaatcaccataacagggctgtctggtttaagacaaacaacacaaaaaaaggtctctatggactcatccccaggctggtctcacatggtgtccgttggaaagaaacaatgtgaaatttttaactgaagactgtattatcagagacgttgccccctgtcccctggccccactccccttatctccctggttttgctcatctcccttactgagtttagaagagagcttcccagatcagccagaaggcccctagtagcaggcccttttaatctgtggaaactgggtctaagagctgtaattagaaaattttaacgtccatgcttcaatgaaacttgaagtgataataggtagaggatgcaaatcgacactcattaggtgttcctaggttggtgcccattcgtaatgctgaactttattaatagtgacgctaatgatgtcccacttcctgggagaggctgcggtccagcccgaggactgcagcaccagcacatggtgaagtctgagtgcaggcttccatccctggtcacctcccaacacacaccaaca

SEQ ID NO: 60012 - DNA, 1136 bp, Bovine  19866881137064
  misc_feature (1)..(1): n is a, c, g, or t
nttccgggtttgtaggtttttgcctccagggcttgtaggtgcagtttttctcctaagttaagtggatatctggaattggcccaatttgtgcagacatttagaagtttagtgcatgataaggccttgaatttgatctggagttttagaccaggtctattacatactcttcccaagagatggtcaggacttcgtgattttttttagattttttttttcccccagtaggagtatcttgggataacatactgtagcagtggttgcagtttggttggctttcctctccacagtgctgtatggtttcctagcagacatgacgtgactctgtcaccctcgggcctctgttcactctgtagtttacaagatgggttttgatcacttgtttttatttttaatgtacatttaagaagcaaagatattgttattcagcatgtcttgggtgtttagatgagtttttcaaaggtacaaaaagattttttaaatcctttaatgttgacttctatagattaatttgatctcttattaattgagagtttgagatggaaaagaatattctgtacattcatggctgtaaatttttttactgaagactggtaccaacaaaaagagcacttaaaagctttctgttgcagctggttctttgaattagcttcttttattcctaaattaatgggattggattagccagctattcttttaattaaaaacaaacaaaatctagttctgtttaaaggaaaaagtctgactgaattatcctatttagggtggagttttccatccctaagacccttctcagagcagtttgtactattttggtgttcaatccacaaaacaaattggaacacttagaataatctttaaaacatgaggaagagaaacactatggctgtaactagtctctccagatggtagttttagtcttaaattaaagaaatggctcagacgataaaggctctgcctgcaatgcagtagacctgggttcagtccctgggtcagaaagatcctggagaaagagaatggcaacccactccagtattcttgcctggagaattccatgtatagaggagcctgctgggctacagtccatgaggtcacagagtgggactgactgcagactaacacactttcagaaacccatt

SEQ ID NO: 60013 - DNA, 957 bp, Bovine  19866881631903
  misc_feature (1)..(1): n is a, c, g, or t
ncccatcatttcccactgcctgacaggtaatcaatgccattaacatctgatatcaccatatagggcattcctaaaacctctcatttattagggcaaatgcagagaatgttagataccaaaggtattttgaaatacaccctttaggacttcctgcttgacgcattttctatcatagttccatgtgcctgttggagaattatggaacttgtgaggactgtgccatgcgctttcggaactgaaacagagtgactgatatttgaacaataaataaaaatcatccaaggtgtatgctatccaaaaaaattaccataaactaaagatgatcatttttatcaactctatgtttcataaacatataaattaggcaaatacattaacaagtttcctcatgtaaaacagctgaacagactgtaaatttaaccaaagaagagatgggtgagggaggcaaggccaacccctctgttacctttaagcaaaggtggccccaaaggctcaggaaccttcaatagaatgttaaaaaaatgcacaagggacttccctgtcggtaccgtggttaagattctgaacttccctgcagggagcctgggttctgggttcaatccctggtcgggaaaccaagatcccacatgccactcagtgtaggcaaaaaaaaaaagcccaagaagacactttacatccatctccgccgtgttttccctccaacatgaaccaccattttttgacttcaaagcctatcttatttaaccatgttttttcttaattatagtcttgaagcctcaacttgctctcaagggccaatgaccatgagtcagtaaatagcatgcaatgtttccaacacagacgatccctgcaaacccaacaccattagtaatatcggacgtctgtgggcaaacattctactcagcgagtgacaccatacatataaaatcaaaatgctactttataataaacagaaga

SEQ ID NO: 60014 - DNA, 995 bp, Bovine  19866881643873
  misc_feature (1)..(1): n is a, c, g, or t
ngctcactctgcctgccaaatggggagaattaattctcctgtttcaacttctgggaagcaggactgaaaagcctgctgaaatatagtgactcccctggcttctataatccttcttacccggtttggcattgccgctgaaaatgaggttggtggtctaagcttacaaacaattatgctggtaacctggttctatttgttaaacgccaggttttcacaaaaatataagacagtgattttaaataagaaactattcttcacccagcaacatttctaaaaatctaccacccaaatcaacaactcataataatgggagtcctaaattttacaatgcgttaacaccttcgcttgctagtttgggtgtgagagaaagaagcttaacagtgaggacaaaaatcagagtgacccccacccctgagctgcccctctccccccattccataggttgtaactgtttggtgcttgtgtctctactatttggtggcgggtgtttctgcccgcagcctaccttgactttttgctggatttgggttttggcgtggcagtttttactttcttttcctttggctctttgggaatcttaggggctttcggggtcttgggttccttgggctcttttttctccttgggttctttcggttccttgggatctttttttgccttcggccttttctttttctttttctcttcttgggacccgtctagtgagttcctgtttagttcttggttatcaaccccaccagggaagtcatctttaccaaagtttttactgggatcctctgcaacaatgtggttgttcttctttttcttcttcttttgctgtggctgctgttctatcgacggcaggtaatcatcactcttcactagctgagcgttcggtccactaacctgagtcatatccggcactggtttctctagaaagggctccgatggagaatgctaagagacacaaataggaattgaaattagtttatcattcttcgtagtttagaaaggaa

SEQ ID NO: 60015 - DNA, 1489 bp, Bovine  19866881818085
  misc_feature (1)..(1): n is a, c, g, or t
ncagacactatcccagcaacagcaagacggagctgggagatgttttaaaacagtgaccgctgaatgaggagcccttggttagtgtctaaaggaactaaaaatacaggtaagtccccacatatgaacgagctctattccaagagtgcattcataagtccaacaaagttagcccaagtacccaacttgtgtgtgtgtgtgtgtgtgtgcgtgtgtgtgtgtgtgcatctactccactggcaggtggattctttaccactgcgccacctgggaagtagactaatacaataagctgtatatacctctgcttttacacttgcttccaaacatcctgggtttgaaataaagatactgtactctataacagtactgtacaaaaggtcaaccatttgtcgaggatgcacacacatgacaacatatgccagacacatgaactaacctatgtgactggacatgcaaacacacgtccacacctttgaaaatttgcaacttgaaggttcgtatgtaggggacttactgtaatattattaaatatggtcagaacaaattcatttttatctaagccactggttaagtcatgttcaaaagccaaaaagtatatagaaatagctagtaaataacaaagctgaatctgaaccttattattatctgtgtgatcattaggcaactgattcagactcacagggtaactcatcttggtgtgtttacatatttacctaaccggctactttcttaaacaatgagaaacaggcttgaacttattagaatttcttcctttttcttaaagggatactgtctgcatgcaattgctttaaagtgatgtgtttgagctctagaaaactggagagcaaaataccttgggtaatgcagaccaagaagatctcctttgcctttcttctagaaaacatttgggtttttggatcttcattttaggacagaggtactgattattaagccctaaaactaatagtaaattgataaatctcagctaaatttagaccaaggctgtgacctggctgtgatgttacaaacatttgctgtactatataaatataatatggggaaaaaaaattttttttaagtacagctaagcaaaacagaaaggtaaacatcgtattacagatatggtctttgaaacatcatggaccctgtgatacagaatttggagtaaaaatgggacttcactgcggactctcactagacaagcaagattcaaacatccaaacactttatgcagtttaatttacaagaagaagctaagtgacagacctcatggtgggtaggcatatccttactaagacacaatgctcagaagtcactagacgcgtgtttattcttacgcaatgagtagggtgccctaccaactgccctttacaacctctttgggttcttcaaagaaaaacgggcatgctgagactcagatctcacaaaaagaaggattctatagcatcctccatgaaccatgttaaatgaggcccatcaacttcattag

SEQ ID NO: 60016 - DNA, 753 bp, Bovine  19866881937148
  misc_feature (1)..(1): n is a, c, g, or t
ncttctattaacacctcagaaaaagaaaataaacctgattgaaaagtaagcccaggctggcttctatatttgagtttttgctgtttgtttttcctttgcactggaatgcccttcttacctggcttcctcctcccttctgtgggcaaaagaacacttatttatcttgtaaaacccagctcgcatgtcatttcctttatgaagcccttattgacacacctgccaccaagtaaacttggtcactcccttcttgcggctccactgcaccctgaaagcttcccctgtagcaagcataactttattgcactaacatattgataagggttcatcagagggagcatgggggctaatgtctgagtcctgccatgaggggatacagagagaaatgagacgaacctcttgccattggggagctcattgtctgttggggcagttatacaatattaatttcaaacatgatcttcatttcagggctagagatctacacagggttgttagggacacactttaaccactcgagtaggggatatcaggtggcacagtggtaaagaacctgcctgccaatgcaggagacccaagagacacgggtttgatccctgggtcaggcagaccccctggagaaggaaatggcgacctgctccagtattcttgcctggaaaatcccatggacagaggagcttaggaggctacagtgcttgggatcactcagacacaacagagcacacacacaccatgacacagtagaggctatcattt

SEQ ID NO: 60017 - DNA, 1143 bp, Bovine  19866882088066
  misc_feature (1)..(1): n is a, c, g, or t
ncctccctaggacttccaggcggcgccagtagctagaatctgcctgccatacaagagacacaagtgacatgggttcagtccctgggtgcggaagatctcctggagaaggaaatgacaacccactccagtgttcttgcctggcgaatcccatggacagagaagcttggtgggctacagtccatggggcctcgaagagtcggacacagagcgcacgcacacacgcctccctaaatctttcacgctgctattaaaaacccattgccacttgtttagtccttaactcaggaccccacgggattccagttcaaatgcttctagaccctttcttaagtaccagggacttgggggtgggggcgacacggaattgtccctagtatttctcactgctgaggtttcccaccgactccaacaagtgactcaattgtgcaccatctaatttatctagacctttaaaattattaccaaatttgatgtttattgccccagttagtacagaaaaccaagagaggaaaagaccccattatcttcattccaaaagcattttctatttgtggctccgtcaacatttcggcatctcattagacatatttaatttcattccctcaacaataacccacgtatcacaccagtgaccaccactttgctgctccagcccctaaattctattagtgttcagagagtctcctggttgcaacataatgttcaatcagcgcagagaaattaattaaattaaaattatttttattgtgatttaattagcttaatttaattactttgttcactgactgggcattctgtggttacggccagatcctcgctctcattcgtggcacgaatgttcccacagaattgcacattttctctgctcagccattggagcgggctgggggagtatgccagaaactcacgatttatcacagtcagcatcatcacaaattataggaagcatccagcagtatgataacttctaaatgaagtgtctgaaagcaggtcacaccaccagcctcggctgttaatccatcatatttcatagtcaacttgacaccttgtccaatttgctgggcctgctttatcaccagctcccatgagctgctgcctctctgggccggcaagctggggattcagctccgactcaagctgcct

SEQ ID NO: 60018 - DNA, 1114 bp, Bovine  19866881164612
  misc_feature (1)..(1): n is a, c, g, or t
ntctgctttctatctataatctctattattagtatttctttttacagatagaacgctcttggaaaagctagttttatcattgctgtataatattctatcctatggcatttatttaaccattgttctatttggaatttttttgaatttcccttttgttataaatattactatcagaacttttctacataaattactcacctatttagatgcataagttttacaattctttgaaatgttatcattgttactatgaaagattatcatcataactgttgagtttctgtttttaaaccaatacttcagacagaaaattgaatactaataattaatttcatatttatgtactgacacagtgtctaagaaacagcaattttggtagttacattatcttacccaaacattcgttgttggtagttttcatgaacttgtgtcctgttttgtgttaatacatttgttaaacatactaaagctaaaataagtaaactatgtgtcatatgtgttcttagactcaataagtagtaaacagctctaaattctgtattgtatttgaaccatattttttataatcatcatgagaaataatattactgaaaattttatttcaaatagtggataatgctgtccccagaccaatatttggacatggggagttacttgaaaattgttttatttaagcttaagtggaatcttttttttttttttacatcaaaatattccctgatagtattagaccagatattataataagtttttcagaatatacattataaatgaaatacagttatgtgaaagattgctttttccctgggtagaaatatcctgccctgttgcatttcaagagctatttctttttgttgttcttgttccaggaacataagtgctcctgagtaaatggataatgttggttgagagaagagaatagaggaggacaaatttcacatgtttctatttggaattcatcaatggtctctgctgatgttcacggcagacaaagttgcttaaaatgcagacttcttgctgttcccactacaatcgatagtgcacatctttcatactttaaaggctgattttactgtaaatctttctaacattcctttaggtgataaatggtaag

SEQ ID NO: 60019 - DNA, 1233 bp, Bovine  19866880440241
  misc_feature (1)..(1): n is a, c, g, or t
ntttctttgagcaaaaagatttttgttaaatagcagtttctaaagcctcttccaaacagagagacccccttaggaggaaaagttgctagaatagaattttcatctctctacattgggttataaaagtgaaaaagaagatcctatagcttgtgttgcataacaaatgaggcttatgtaacccgagtgttctctggcttgaccaacttatgactatcccacatcatcaacagtaactctaaatatccaagtttccaaggcatcatcctatgtgcttgaatgacagaaattagcatctctcaacttgtcctctagctattttgaagagttccacagatagcagtcacatgggtgcccagaaataagtcttcacatgattctacttcagcccccagacatgctgccacgatgccgctctgcccatgatggctgttgtggtgtcaccattctctgggcacagcggtccttcactggtgaatgctcctgtcaacaccattataatcttaagggatccagctctccctttgtggtgactaatcgcaaacctaggagagatggatttgcaattctacccagaaacacaaaatccaagcactaacttttaacttgactctacatagtgttcagaaccatagaaataatgtgaaatttacagtgtatacgtactaccgtatgtggaaacactgacagaaatcagcactgctcctttcatcaggaaacctcgatctgctgatctttggttttgttctttggcactcccatacattttagactaaacagagtattattcttaacatctaggtgatgcattctctctcaatagagcatgagaggaccactggaaattcagactccatcaaactgtgccaagttcaggtccatggtcagcacagtctctcctgcagtgaacgtgaaggaaagacatacacttacttccccatggcaccttccttatctctttgctctttctacttcaagcaactctttaaacagacaacacctaattctgcaggaatgtgcacttataggcatgaatagagaactcaaccatatgtgataaagaagcatttgttacataagggaaatgatcaacagacaatcagatctggctacccatcacagagtgtgacagtgttggaatgaaattgtcccaaagagttccctttctggaaagaagactttgcttgggtgtttaactaaatagactgattaaatttttttccagcaaaaaacaat

SEQ ID NO: 60020 - DNA, 4283 bp, Bovine  19866880462641
  misc_feature (1)..(1): n is a, c, g, or t
naattcctgacttagtgaatttctttgggagatcaaatatacagacatgtgaaggaatataagatactgtttttttattaagtatctaaacgtgtggaacagaccatggatgacttcggaagccagagacaaatgtctgtttctacaaaagaataatagctgtgcccctattacaaaatgatattgattctagctggcagtaaagctcacagattgagagccagccagcagctgaactcatgcagagaaccatatgtcaaaactaggcctttgtgaataatgcagtctgtccacagtaaagcctttgtcgtggacaaatattttaaagataattccagggttcaaaaggcatcttaactcttactggacatgaacaaaaggtagacaagaataaattttgagagtccaaaaatattgtttcatccaactgtcatgcaaactataattggaaacttcaggtttccacaaaataacatgacaaattttcctacatgacaggattgctttactgttcttcctactccactccactccaagtgatatgtattttgatattaagaaagattcttaggataataaagggaccttacttttctctggagtccttgctaaatgttagcttatgcctagggtagaaaaaaataaacaagttgaaaaatttgttccaatgagatggaaacatttattgtaagagacttgaggctttaaaaatgtacttgaaagatgtttgaaaagctctagcaaccattaagacttttgtctgatttcaggggaaatattgtagattttcattcctgttttaaaataaacatacttcatttaactgatgttgcttaaagttaactttggtttcaggacttcacttgaatgaggttagttgtgcaaatgttaaatttcctaaattctccaaagtgggcttcagagtatatttgttgcaagcttgggcatctcaccagtggcagataggttatagtagattttggtgctctggttgggctgcgtcgtgattcttcttgcctactgtctttagtctgcttttccctaagctagggataaacataagagaaaaatgtcgaatatcaggaaatgctcagcaaataccaacttgcataaatgtagcaagttctaattttcctttggtttctttatgcagagatttcttgaaacatttcctaaagtagaagtaaaatcttctttcttacactatttttgtgagacctaaatatgagccataagaattttgcttttttaaagtaaaatttcatcccagcctacgaggtaacttaaatatggcttaaatgtcatccaccctaggcatgcagaccatttggtacaaaatcagatgacctcaggggtcttcttggaggggacataataatccatttggaagagtcttcaaaaattgtttaagacagaggcatcttatcttcacttttaattcacatctctgatttccatatgcttgaaatcaatctgatttaaaaaatccttgtgtgtgtgtgttcagttgtgtctgactctttgtgaccccatggactatagcctaccaggctcttctgatatatgagattctccaggcaagaatactggaatgggttcctactttcttctccagggaatcttcccaacccagggatcaaactcacgtctcttgtgtctcctgcattggcgggtggattctttaccaccgagccacatgggaagccctaatgatatatttaattatttaaaggaataggaaggtgtaaggtattaacacagaggtagacactggaaaataattattttaaacttctttggattataatgaagaccacagtttaatacctccatgggaatagtttctggtgcaatcagcaaaagggtgtaacttaagttaaaaatacatggcctggggacctgtatgatttttctttatctgcactatcagtgcaacagcatcagccaactccagagcatttccttctgtgcatgagcttgtgggaggtactctcaaagcatatggtcaagaggtagagagtccagagaggagcagtgacccagatagctacaggcttctgagggctcaaaacaaatctaccactagataccaggctcatggaaatggtttaataaacatttataaaaaaatcacaagctgtttcctgaaagagccctaagcagtttggtttctgccagcatttatggaaagtgacaaatgtgagtctgaaatggaagtgtctgaatacatgctgttcatttagaaatgaaaatttcttcattatataaaattgttaaataaaattttttcactcatctcattgtataatttcataaatcttgctttccttggaaaaaagctgtctttcataatgataataaatgggggagaagtaatgttatccacctcacattctatgctgtttagcctgtttaagaaagaagaacttgcttttcaggatgtaactaacaataactcctgctgctgctgctaagtcgcttcagccatgtccaactctgtgcaaccccaaagatggcagcccaccaggctcccccatccctgggattctccaggcaagaacactggagtgggttgccatttccttctccaatgcatcaaagtgaatagtatatcaattaaatgtttagggcatgacaggtcaatgttgggatgcttgcatctgagacttaccatactccctactgagtctatataatatcagtccatataattttccatttagtcaaatctgtcatataatttattgctatttctgaaaaaaatatctttctaggaaccctccaacttcatgttcattctgaagtggtttacttctatagaacactttgctaggggattccctctaactctctgctttaaagagtctttcctattttagttccttaactcatttttgctggaaaatatcctctcggaactgcttaagaaaatttgtatgggaagtatcttttaagagactttgaaaatttgaagatgtcacagttctacccacaattttgactagtgatatatgtttgtgtaaaacttcagaaggaagaaaaaaggtttaaaagtgaaagtcttggttgctcagtcatgtcagctctttgcagccccatgcactgtaaccctccaggctcctttgtccatggagttctccagcaggaggatatttgctgaaataatttcctttttgttttcttgcttgaagagttgcctttgagaaatctcttgcaattccgatatcccattcttttacatgctctgtttatttgctctgaaaattttttataatgttttctttgtccttgatgttttgaaatttcatgataatgtgtctcagggagaaacttttggttccttggattatattctagagagtcatgttcatctagagcacagaaatagtctttatctcttctctgcaagtagtttctgttttttctttctgcaactgggctgttcgggcttatagattgctcctccatttatcccctcttctattttatatagaaatattaaaaaataaattattagcttttcccaacatcttttgttcattctattgaaatttctatttttgatatgattttatctctattttttgttctttgaatattctttctttaatgtgaccttgatcctttttaaaaggaatgcaatgtctttgaaaaatatctttctaatattatgtatgttatacatgaataatattatatgaaaattatatatatgcacatatatggttagtatttatattttaacccatgttgtctctgttctgagttaaatgttgctttagtttctatttgtttttctttatctttcatctctaaagtttactgatcgtaattgtaactgaggcaataaaaaattaattgcataaaagtagcctggcaggctacagtccatgaagtcataaagagttggacacgactgagaaactacgcacacacacaagcttgtagatcagtgatttcattgtgatgttatgaactgaattttttttccccttgtcagtatctatggaattcttttctggagtggttcagttttccaggaaagggtccttcagtcttctgcttaatgaacaaatgccgggttagggatgtcctgagccagttagggcaaaagagactctgccccagaccctgtactcactaaggcacccttatctcctatttcttcctcagtcacatcctctattctcaaggcaagggttctctgtctcagtttctccatatagttcctactgcttcaggtacagggaggacaagtcaccaatcccactcaccatgagggg

SEQ ID NO: 60021 - DNA, 1425 bp, Bovine  19866880574994
  misc_feature (1)..(1): n is a, c, g, or t
ntcctgtggtcctgctgagttttccaacttgctggcatattgagtgcagcactttcacagcatcatctttcaggattgaaatagctcaactggaattccatcacctccactagctttgttcatagtgatgcttcctaaggcccacttgacttcacattccaggatgtctggctctaggtgagtgatcacaccgactttaggcgtattaaaaacttatcacttttccttacaaataatactcaggataagttgttaaattcatccattatcattcatcttttagttatgcattggctattttctggtgaattagaaagcttattaaaaatagaaacaaagaaatccatagccccaaattctctgattatttgtttattgaacagagcttgggtcatctgtcaccctgttgtaactaagcaaagaccaacttgactgtgacttgcttatggagtgctgaaacatggctttagggagttctaagcttggtcttactgttgatacatggagtatctcttggttgaaatggagaccttaaattgattctatttaggccaaacttcttactactatctaaacagatgcttttggaccaaactttgttcttaactcacaagaactttaagagccatctcttctgagcttttgattcttctgagccaattaagtaaggatttggtgtgtgatgacaccagagtgggttgctatagggtagaaattaaaggggtttgtgtgtgtgtgtgtgtttagaatctgtatctataatatctattaatgcataattttaagactaaaataaatcggattctgtctataataaatcactttgggcatgtgtgctaagtcgcctcagtcatgtctgatgctatgcaactgcatggactgtaacctgctaggctcctctgtccatgggattctccaggcaaaagtactggagtggactgccatgccctcctgcaagggatcttcccaacacagggactgaactcatatctcttagatgtctcctgcactagcaggagggttctttaacactagtgccacttgggaagtcccaaattactctgtaaatgaagccaaagttgattcaaaatggaaaattgtccttttgaactagtgtaaaaacatgactatatttatacagaaagtagaatgtgcatatggccacggttaccattttcttacagacagagacctaagtattgtgaaaattccccatttgaaatcatgtttctaggggggtattaagctacatctttaatattttgacaggactgttaacagttgataaaataaatcttacagattagcatcctgatttgcaactccctggacccttggagctttcaaggagtgtatcttgtgctaaatgacataaaataagtagagcacagggtaagagaaaatttcttctcatccagaagcaag

SEQ ID NO: 60022 - DNA, 961 bp, Bovine  19866881118149
  misc_feature (1)..(1): n is a, c, g, or t
ntggtaatactgataaatagatatatcattgaaaagcataatcttaaaaccgactcaaggatattgactgtaattgatcaaaaagcatcttgcccatggagataagagtaaaaagataaattttcctatgaacttagaattttccaagtctgtttccccaaaagagaccattgaataccatgataatacacatatatatatgaggtcatccaagaagaagatagggatggcttggtttgatattgccaacactccttctgcttactccaaccaaaatgccaggaatctagccttggtgcttccatattttttaattaaaagcattgacatatacattgaaaccatatcacagtcctagagaatgaagtctggctctgctgactttcacttatggatatgggaccatctcttttgaacaagtactcctaggaaaactcttcactcaaaactgggtcaaggagagttgctttcattggagactgtttggaaaatcactctccaaggagacataatttgaaacagccaaccaaattaggtactaacctatcatgatacaaattcattacaaaacctacaactctaaggccaatccaacaactgcagattaaaaatgcactacatacacccagaaaatttcaatactgaggggcatcccttgcctgaatagattctaatgactatcaactagaataaaggtatcggcatcgacttagggcagagtgctacactctgtaaatgaaaaacttcaggtaaaatatttttcagaagctataaagtcaaaatatcagggaaatgttcaaaaccacaatctcactgtaaaaaaaaaaaaaaaagaaaaaggaatagaattaaacagaggcaattaccgatgatactatttgtatagatttaaatacttcactgagggacacaaaagacctcctaatgtttttcctctacagaacaagtacataaagcaaag

SEQ ID NO: 60023 - DNA, 676 bp, Bovine  19866881356529
  misc_feature (1)..(1): n is a, c, g, or t
ntgggggagcctggtgggctgccatctatggggtcgcacagagtcggacacgactgaagcaacttagcagtagcacagtctctcattgtctttcagttctgctttattatctgaacatcctagctttctggtactttcaatttattttggcttttcttgagagatgtataaaggtattatccacaaatttcttctagatgtcaccaagagaagctattccaagctgattctccattttgaaaatctgcaaatctgatttagttagttaattcagagggcagattcatatcaacaaaattttagaatactaatttctaaatcagatgccaacttattaatttatgggaagaatatttattacctagggacataaatattcatgtttgtaagtggactgtgattggaaattttcagtgattttaatttatgattatatatttatcaatatctctattttcccagtaatatgagtggtcagaacatttgactctccctactttattagaaaaaagacataacacaaaacatgcctaccaaagacatttaagtcacatataatacaaaggtgccaataactatttgatgcctggtctttggatgccagtttttcagatgtttccatttcattgaaaggatggacatgaactagaaaaaaattcagtagaaagacataaat

SEQ ID NO: 60024 - DNA, 820 bp, Bovine  19866881486922
  misc_feature (1)..(1): n is a, c, g, or t
naacctaggcaacacaactagggtgctcacatcttaacactctagtattctggctctacctgtgtgtataacatgacatctcatactcacaaagatcagaaaaacaggcagatttatccctattttacagatgaaacacctgagggaaaaagaagttaacttaccagacacatcacaattcagtgacagagttgaatttggactcaagactttctggtttcaaagccatgggcagctgtcctttgtcatttatctgctagcacctgctagaacctgtacacaatataaaggtggaaacaaataacttgctcatgatgagaagctggtaattttacctctctggtgcaatacaagaagaaataagttcctgttgttgcaatgtattttctcagacacacgtgcagagggctgcataatactgatacagagttgaaagatttttcaccttataaaaaatcagaaagatgttgcttaagttaatttctgcagactggcctgatgatctggatatcatttacaacattatttctatgggaaaataacaaacccacaaatgaacttctgggtgacaactacaaggtggaggattgcctgcattatataaacaacagatgttcatattataactgctaatttgtgtgtacacagacagatgtaaaatgtaaatacaaacctaattcatctttttagaaatatcagatgacttcatctatttttttatcttcagaggcagacaaaatgactttaaagtcagtactatatagcactaaaaattatttcttttagttatgtttccctacaccaagcagctagcatctgt

SEQ ID NO: 60025 - DNA, 901 bp, Bovine  19866881632857
  misc_feature (1)..(1): n is a, c, g, or t
natgaggaactgtggaaaactgaattattaatctagtaataggtcatcagttctctttgctgcccagagttttctatcactgatcatttatcactatccctacttttaacaaacaaacatttttctcttgcatgagaaaaatgagctctaaataatatatctgttcaaatgtgaatatgcaactgactgctaaatcacagattattttatggtatttaattcctcaattgtcattcatgccaaggagtgactcaattttccaaccattttatctattcaaacctgttaaagttttctttatatagtatgttatgacttcatttgcatgtgacatcaatgtttgattcatttattaaattctgtctctattcctctctcattagcttgagataaagtaatgcaatactgttatttaccatattcttctttgtgatgtcaaatcacactttcaatttattaaataactttggaagtaaaagtctaggtctatgaaaatgtctttcaattacaaattaacccaggatattatctgagttctgtcagaaacagaaatgactcttggtattgcaaatagaggaaatttgatactggtaactggatatatgcgtgatggaagacctgaggatttgtgcagaggaacatgaaacattagaagtacacaaagagcctaccatccccagaacagagaaggtagtgttagctcagtccaaaagccttgagttgtagttgaaactaaaatgatatccctgccctgccctgttttgccttaccctgtaagatttgggacaatgatgaaaaggactctccagtggtaactgaattaccaaggatatacagatactttggagataatgtctaaggtaatgagagatgggaaagaggaagacttatttccttcagt

SEQ ID NO: 60026 - DNA, 3972 bp, Bovine  19866880359943
  misc_feature (1)..(1): n is a, c, g, or t
nggcagtttttctctgtgtgttgtcctcattcccattcatgatgataagagcagtccttgcatattattaaacatggtttatatctgctcttctttgttttgtaggaaaacctgggtcttttttcagcagattcaacttctgatatctggaaaacgtatgttaactacattgatgatatgttgctggatggattctttcttgccattgagtgttccctcaagtacctcctggaaaatactggtatttagtggcttatggatgtgggttattactgggaagataacagccatagcatctgttgagttacagtgaagtgccattgagtgctcggtgacttttcccaaaaggtgtgaacactttgtgaagtgtacacagtaaaatagaaaaggcattgtgtctctgtaattgtttaaaggtaaaacacttctccctctccaaaacccagatgacaaaccaggctctaacacagtgaaacccgtagccagggtgaaaacacaaaagccgatttactctagggaactccctggaagtcagtagctaacactttgcacttccagcgttggggggcatgggcttgatccctggttggggaactgagacccacacaccttatggcatggccaaaataaataaataaatttcatggtttaagccaaatgtactctatctccgtggccttttgagaacacagggagtttgtagcagctggcttatgtagaagaaacagatgtttttctgtgtaaaaaaaaagagagacaagaagctggggatgagatagctttcagaagggaaaggtatattaaggaggcagcgggcattctttgaagctgttaaaagatagctaagggcttcaaatttatggttgatacacagggccaaagattttatagtaaaggctaaccttggttagtaaatgatgggatggaaaggggagaagagttcaaaaataaagttgaattaaacctttcacattctggtagattctgacatgctcagcaagactgaaggaagaggtgaggatgaggctagatgagagcttaaggcactgagtagaacccaagttaaatgcagagttagaataggtgggctgagaccagatctgggtatccagcccctgtaagaagctgatgatgcagagaggagcaaggccagcgctggggtaactccaccctatggtcctggtaggcgaagtgactgaggtcagaggcaaggtctctgctttcacagtataaggagacacagaagcaggaaatgggctcaggcctagtcaacaaggtgggagatcaccttctagaacctcgggcagtgaacacaggtgccgagactggggagctggttcctagggaccagtgccaatggtgctcatcttagtgaactgacccaacctcgtctgatagtggagctcggagactcgccactcagctctcctctagaagttctaggaagatgctgcagccacacttgagtgcaggcactgcacgggggacttgccccggctcagtgtctgtccagccttccggatctgggctgtctgatgtgtcacgtgtcctcctctcatgggaaggagagccagggagcaagagggtgaggacaggggatggtagccaaagtcatcttccctccgtggaagtaggaggaagggaacccacgccctccacaatgtatcggcagttaaggggcaggagctggccttaggagccacctgaggtatggttgaaatgaaaaggcactggttatcaaggggaggtgaaggagcctgaagagaacggcctctaagaggaaagccaccgtgacccttcaccatagcccagctggacaacttcagtcacctggtccaccttactgtctccacctctcacacttggccaaaccagtaccatttccatggcttggtctggcttcccagccacctctcagaatccagaccttgcctgagttaactgctacccactccgtctggaaacattcttcctcttctcaactcttaaagagattcacttgtgccaaggatgtggaaccaccaggccatccagtttgcacggtaattgtgttggtattgcatctgacatagggattatggtttcctgtggagtttcccaggtggtgctagtggtcaagaacccgcttgccaagcaggagacgtaacagatgcgagttcaatccctggatcaggaagatcccctggaggagggcgtggcaacccactccggtattcttgcctggagaatcccgtagacagagcagcctggtgggctacagttcatagggtgacaaagagatacagctgaagcgactcagcacacacaggcctcgccttctgcaaaggtccaaactctgtggactgtatttctctctaaatagatctacttcttgagaagagggaggctcatgagggaggggagatataattatatataatttatatatatatatataattatgactgatttgtgttgttgtacggcagaagccaacacagcattgtaaaatgattatcctccaattaaaaaattaaagaaataaatccacttcttacctaaaatatatatgtataagaaaataagtggttattaataagagtctaagcatttatcttgtaattggaacatcttattccatattatattttgatttaaatttagcaaggcagtttagtctagcaagtaatcaggaatttgttaattatttatactgtttttaaaaattttatcactacaggactacagaattaaaacaagtcctatttttacagaaaaggagcagatggggagggattgtgactgccctttttttccaagcctacacgaccttggacaagcacacccttgttcccctagtggctgccgatggagttgcctggtttgtgctcaggatgatgtccgccgcttccaagaaactggctttgcaaaaccaacaccttctcaaccagaggccgtattgccccacgggaagctttgagaatgtggaagcgttctgacttgggttgatcagtcacaggacgtgctctctaaggacaaggagagtaaatgccctgccatgctctgatgccggagctccagtattttagccacctgatgtgaagagccaactcattggaaaagaccttgatgtgggaaagatcgagagcaggaggagaaggggacgacagaggatgagatggttggatggcatcgtcgactcagtgaacatgaatttgagcaaacttcaggagacagtagaggacaggggagcctggggtgctgcagtccatggggtcacagagtgggacatgactgagcaacttaacaacagcagcagttccaggacagccacgcacagggaactggccttcagaatgccagcggtcagtccccgtgttgatcaacgctgcaggactgcccaccttcaccttttctggggttttagcaaagtttatatttctatttgctcagaccggaacagcagctctaaaggaaagaaacgctcggagtgctttcaaatcagtgttgcatttttgccacttacccactgtctcctgtttgttttctttgtatttcagaaggtaaggcaggactcaccccgatatttgaagcccagctgagcttagccatcccagaactggttttccgtccgtcactggagcctggtgtgaagggcggcttctacgacctgttggagggtctcgtcaccagcatcttcagcatggcgtccttggtgccccggctttctcctgagagtggctctccccactatcaggtactggctctgcgagcatctcccccgccctcccaccagcctggaggcccctgtgaaatgctaatgttacccatccactgccatcttgctcccccagggggacttggaggccagggctgacctggcgggcctgcgggccgaactgatggggcgggtgcaggccatgatggccctctgtggcgactaccgcagcaccctcagccagtactcctgcctctacacggaggaccggaagg

SEQ ID NO: 60027 - DNA, 1567 bp, Bovine  19866880455250
  misc_feature (1)..(1): n is a, c, g, or t
ngaggcagagccttcctgcatggtgtgggggacgtttttcttgcaactcaagaaagatgggtggaccaacagggcgtgcaaaatatttttatcttttttccgtgccactctcttttcctaggctgaaatcattacataacattatctttgaaatgctgagccacattcagcttgaaggaaccaacttcaaaaaatgcatccggcttactgagaagtaactcaatcgactaacagaattctatattttaaaatttttttggctgtgctgggtgttggtcactacaagggctttttctttagttgcagagagtagaggttactctctagtagaggtgcttgggctttggagtacaggctgtagggcactcagccttcagtagctgtggcacctgggctcaacagttgtggtgcatgggcttagctgctctgaggcatgtgggatcttcccagaccagggatcgatgtgtctcctgcattggtaggtggcttctttaccaatgagtcaccagggaagccccggaactctgttctcttgaatagacccacacagatcccacggtactctgtttacttatatgttcatcaccccataagaaccctgccttcatcaaagagtttggccaaggatggagggaacagggtcattgtcaagcctccaaaggtgtctcggagaggtcggactcacctggaaaatgttggcgaagtccctgaggttgaagatgtagtggaatttgatcgctgtgggaaggaacgtggtggcgattttctggtggaaggtgagggccagatggagcagctgggggacactcttgtgcagcgctgccgggaagctccccagcttgaggtgctgagtcaggatggcgctgtagatggaggacagggcgtctgctcccgggaaggagagggtgagcacactgaagtgacgctgctcgggaaaacagagccacagggaggaggccacgagttacactctgtggtcacagaacagaaatcacctcttctggatttggatacggtggtcaagaattcttagaagggctttgaattctacattctggccacacttctcacattaaacccaaacttagttgagcctagaatgaatgaagggctttggacctctggtcaaagatgtcagtgtggcatagcagaaagagaagggaacctggactccgggtccaaatctgatcgtgatactgagaatgcatgtgaccttggcagggtcattcacccctctgacgttctctcattctgaaggccaagttgaattagactaaccctatgattccatctggctcgaaaagcttctttaaaaagtggtacaaacgaacttatttacaaaacagaaataagagtcacagatgcagaaaacaaactcatggttaccgagggggaaatgggaagggaggtataaattggaagattgggactgacatacacacactccaatatataaagcagataataagaacctactgtatagcacagggaactctactcaatactctgtaatgacctatatgggaaaagaattttaaaaaggatgggtgtgtgtgtgtgtgtgtgt

SEQ ID NO: 60028 - DNA, 966 bp, Bovine  19866880535652
  misc_feature (1)..(1): n is a, c, g, or t
ntgcacactctactcttcttgtgacttggaccatccagcccccggggtgaggctgggaactgctggggtgcccacctgctggaccagaaggttgcagatctcttgcagcagcactgtgagccgccctgggcagcagtaagactcacacgtggcccagatcaggcagaccacgtgcagcaggggccgcagccggggcttcacgtcaggaaactccaggctctcgaggtcctccaggtgacgacgcagtggcgccaggtgggtgtagatgtcccgcgcctccgtcagagctggaaggaacgggagacaacccatcacagtaccagcttgaggctcacacccgcccagcagagccctggggcctgggcatgaaggataagaaaacaagggttgtgatctctttctgggctgagggagcagagagggctggccagctcttgcaaggaaacactgaaatcagaagagccctgggcagctgggagaggggtctgaggagcctctcttacagaattcttgtatctggacggcctcctggccctcccaagcccaggccctctggtgctgtgcgtgtagaaaatgcttggtgactgtttgctggtattacctctgaggtaatatgggatggatgacagaggacgggttttaagagtcagaaagatctgccttcaaatgccgatacatcaaatgtgtgacctcaggcatgactatcctgtctgaatctcaacaacaggctgaacagtcactcatgtaaagggttcttgtgaaggcagcaaagacggctagctcagtgcttgtaccaaaggaggtgttgcgtgcacgatcacatctctaataaatatttgccaataaagaatctcattgagctcttacggaggacaagtcacagggaatagagaaatagctcaggctgattatggcaaggctctgccggtcttcaaagccaggaaaacctcctgccatttccactga

SEQ ID NO: 60029 - DNA, 1495 bp, Bovine  19866880553703
  misc_feature (1)..(1): n is a, c, g, or t
ntgaagaggcaacctaggagaacagcttttgttcagcatgaaaaaggatctccatttagcccttcaacttagcattgtgttcaagtcctgggacagtggctgagccattgtacctacttatacattctggtcccatccaggcagtgggacgttccgaagaaacaggcataatcagtcggacatacagtaatgtggttgtgcctttaatgaatgtgcagaggctgtgcagatcaattgtccatttgattaattcctctggcaggagagaattaaatgtacttaagcagtacaccagcaaaaactcaatgctctttaaaatgtgattttctgggtggaagccaatttttttttttttttctggccaagacatttcttgagataataatggaagtcaatgagaaaatagaatttgccgtataagtatgcactccacagtagaagagcatctcatgtgcagaacaaggtcaagctctgtacagtattcactgatctttgcagcaaatcaagttcctatttgcattcttccataggagaggtaataatgcctattttggtaataattcattgtccaaactttaccccgtccctctaggaggtattcagcattagagtactgctactgctgctgtgctaagtcgcttcagtcgtgtccgacgctgtgcgaccccatagacagcaacccaccaggctcccctgtccctgggattctccaggcaagaacactggagtgggttgccatttccttcagcattagagtactagagatctctaactccaaaagaggcaatcatcgccttcaacccatgggcaggtgtgaagacccaggaaaaaggaaagtcgtgtactttttattacttggaataacgtctgatgtgccaggggagaggaaggaaatactctggtatgggaagctgaatgcgtcaacccaggtctcagaaatcatttcactgcttttacacaaggaatatttctcaaatgcctgttatttgctggacatgatgttgagtcctggggcactatggagtagtgagccaatcaaagtcaatgcttttgtggaacatagagtccaaagctagagacagacattaatcaagttgctcaaacatataatagcttcatttctctgctctgagtgatataaattcccaaactattagctcatagtccaaggcaggcaaaaaaaccctcactgtcagagagaacacccttccggatgcccttcctgtttagaacaggtgtcttgctgagaatcaccacaaaggcaaagacatgtgagagggtcccctgtgaatgaaactccaggtgggaaagcttttccctgtacccacagcgaatgagcccctccaactgattgtgatccagtgaagccctagtaaaacccctgagacacctgaaccctcagagttgctgctgcctttactgttctagctacagagaaatctgcctctccccctgaactggacgctgtctgccttctgtcttcagctggggcagg

SEQ ID NO: 60030 - DNA, 1030 bp, Bovine  19866880845980
  misc_feature (1)..(1): n is a, c, g, or t
nccacttttctgctgcaggtggatgagctgaaagccaagctggccacccaggaagtggagctgaggcagaagaatgaagatgccgacaagctgattcaggtggtgggcgtggagtcggacaaggtgagcagagagaaagccattgccgatgaggaggagcggaaggtggccctcatcatgctggaggtgcagcagaagcaaaaggactgtgaagaagacctggccaaggcagagccagcgctcacagcagcccaggcggccctcaacaccctcaacaaggtaggaggaacgtgtgtgtgctggcttatccctctggggaggagcagcctctcctccgacccaaaggcagcccaccacgctggcgttccgagggacacaagggcacagtccagagggctgggctgggaccagctgccactggcttattcattgagcaggcagacatttacctacgctgaatatatgtcaggatgcacaggctgccagcaaaatcccagaggtgtgagtcctgaacttatcgggacaggaggggccaactgtccagcctcctcacttcactgatgagaaagccagagcccagagtcacagacctcaatgttgaactcacatcttcaaaatgcaagcccagagaccttatggctatgcagtccatggtcattttacttcttctgtgctataggacacataggcctcttacgggcttccctggtggctcaggtggtaaagaatctgcctctaatgcaggagagctgggttcaaaccttgagtcaaagcttcccagttggcgctagtggtaaagaacccaccccaatgcaggacatgtaagagacttcagtttgatccctggattgggaagatctcctggggcatggcaacccactccagtattcttacctggagaatcccatggacagaggagcctggcaggctacagtccatggggtagaacagagttggacataactaaagcgacttagcacgcacatgcatgcaggccttgtaaggccctatgaaaatgtttaagatatga

SEQ ID NO: 60031 - DNA, 1683 bp, Bovine  19866880907471
  misc_feature (1)..(1): n is a, c, g, or t
ntatactgctcttctgaatgtgtttatcaatagatatcctcaaagggaactcaaaattctatcatgctaattatttccctgtaggaactccattttccacgtgcctccataccagagaattgggcatagggtgagggtctacttataggacctacccccatcactcaggctgcctgaccctctgctcagattgactttgactttgggaaacaccatcaggactgaagtagaggagagataggctggagtactttcctctggtttcctcccagctatgatgccatgtgcttcccaggggctgcatatgtctccaaggacctgatctccaaggaccattcagtttgcagactccttaaaaaactaaaaacagaactacatattatccagcaatcccattcctggtcataaacccataaccagaaaaccataattcaaaaacacacatgcaccctaatgtccattgcagctgtatttacaatagctaagacatggaaatactgaaatgtccatcaacagaggaatgggtaaagaagatgtggtacatgtatacaatggaatattagccataaaaaggaacaaaaccatgccatttgcagaaatgtggatggacctagagactgttatacagagtgaagtaagtcagaaagaaaaaaatatcctataatattgcttatatgtggaatctagaaaaatggtgcagatgaaaggtgttagtcagtcatgtctgactctttgtgatgccatggactgtagtctgccaggctcctctgtccatgcaattctctaggcaagaatactggagtggattgccatttccttctccaagggattttcccaacccagggatccaacctgggtctcttgcattgtgggcagaccatctgagccaccagggaagccctcaatgaacggtaggcactgtaattaattagcatcacctcaatgtcattagatcagattggtggctacgagatgtgcacagtagctgatactcaggtgctcctttccaggtggaagccacaaagagcgaggggtcccaggcagctggctggattgattgggccctattcttctgaaaactgtgcaacctttaatggggtgatgtggccccacaaacagcaagcctgttctcaggagaggccgcgcatcttaaaagaaatgtcttcagaattcattatgggcaaacacaaagcagacattcacagacgagaatctcaaaaggtcattgggaaaaagactgttttctttaccttctgaaggcagtcgaccttatgcagctaatggtctcctacgcgaccgagcgctcaggcctggctgaaagggaagcggcccaattagaccgaatgaaaggagctggcggaggggctggagacgtggaaagagcaagggaaatatggtagattgggtcagcttattacctaactgcctgctaatcactgcgcatggagcctcagcaggaaagcatcccatctttaagagaatcacagctttacagcaatttcatagtgaaagagatgggggttctccccaagctgcttacttactgcactgttggaggggagaggctgggggtggaaacacaaacagggcagctgcagaatctgcaatgttatggcacaacaacaaactgtatgtgtgtgtgcgtgcacgtattgcccgcagcgttgtgtacacagtgtatgt

SEQ ID NO: 60032 - DNA, 1872 bp, Bovine  19866881022911
  misc_feature (1)..(1): n is a, c, g, or t
ngccgagcatgcacttgaaggtacagagtgacctactgtgatagcagttcagctcaggagacaacattggccacctccaaagtggcacagtgagtttctatggttaaatgtggggaatcccacattctgcagagatctggaaggctgtctgtaggaagcctcactcctcaactgtggggtaaggcaggttcatcctgggtgagttcaagggtgagcttcaggatccagggaaaggcgcagcatctgaacaaggtacacatatggggttgccctggcctgctcgtgctgcaggtacaggcgaagcatgtgtagacttgaacctgtgccatgtgttggcttcccaggcataggctgttactccagagaaggtgttggtatgttcctaagtaaccaggaagcattttcacaagtgcttcctggatggagcatcctgctttattgtagtaggaggctggttctcaaccctgtttccttggacagaggttctgaacctcatcagaaagctgccagctgctacctgggagtttcagcaagatcccgggagctattcttttttgggaccatggtgtgacagaagcagtcctggagcaggagttcagggtcatgggcttgccgtggagttggccctgaactccacggggaccttgagggagtcccttaaccccagagtgggtccaagaagtaggggcatcagcatcgcctgggagcttgttggagaagtaggctgacttgcagacccacccccagagccaggtctgaatctgactctgcatttaacaagaccccggagggcttccctggtgcctccatcagtaaagaatctgcctgcaatgcaggagacctggctcaatccctgggtcaggaagatctcctggagaaggagatggcaatccattccagtattcttgcctggagaatcccatgaacagacgggcctggtgggctagttcataggactgcaaagagttggacccaaccgagcgactcaaccaagccagcccgaagactaacttgcaggggcagtggagaagcacagcgtcgacccctctgggctgcatcactccagcgcgttcctggctgcagcattgcagtgtccccctcggctcactgctttctctcttgctctcaccctgtctctcccctgcagccgacaaggaggctgacgagtactacatgaggcggcggcacctgcctgacctggcggcccgcggcaccctccccctcaacgtcatccagatgtcccaacagaagccgctgcctcgcgagcgaccccgccggcccctccgggccatgtcgcaggaccgggtcctttccctggagcgaggcctgcctgacgaacttcggcctgccctacgaccgcctcctctcggacgaagcagctgctctccacggagcgcctgcactcccaggacccgctgctgtccccggagcggacggccttcccggagcagtccctggcgcgggccatctcgcacacggatgtcttcgtgtccacgcctgtgctggaccgctaccgcatgaccaagatgcactcgcatcccagtgcctcggataactcgtacgccaccctgggccagagccgcaccgcggccaagcgccaggccttcgcctcgcgcagacacaacaccgtggaacagctgcactacatcccgggccaccacacctgctacacagccagcaagacagaagtgaccgtgtgaccggcgggggccaggggtcggcaggggcctgggctgcagcttccaggcctggatgggtcccctcccctcgtcctctcttgttggggccggggggtgggcccgcctgtcccagaaagccatactcctgggactcggccggtggcctgccacagcgcgtgcgcagacctgggat

SEQ ID NO: 60033 - DNA, 1163 bp, Bovine  19866881041391
  misc_feature (1)..(1): n is a, c, g, or t
ncctgggtgagggacatacaacaaaaatatcaataagaggctaataatgatatatttatggccagggaccacccccaccccaaaccacaacacgctagtctgctcttacagacttctataaggcagtgcaggcggcataacacgtcccacagacccacatgtccacagcaatcagagcgagggggcggacagtgggcagaatggaagatcctgatgcacgaggtggggaaaggtggggaaaaactatgtctcagagaggaaaaggggtctcccattttttaacttatctacaaaacaggctcacaaacaggagagcagacttgtggttgccaagggggaagaggtgggggagggatggacttgggagttttgggattagcagatgcaaactatcatctataggatggataagcaataaggtcctactgcacagcacagggaactatagtcaataacctgtgacaaaccataatggaaagaatatatatgtgtgtgtgtgtaattgaatctctttacacagcagaaaataacaacattgtaaatcaactatacttcaataacataagttaaagaatctcccttttctgaccttatgttcttaactatcagatgtgcaaaaatattagattcacctgtggctaataagatagcagctggttccatggataataccattcatttattatacgtatccgtctgtcatcttttctttctttggaggaaatggaaaaaaaaccttttaggaccaaagcttaaacccatggcccggtgggtctatcttgtttggactacacggtatttgagaaagaaaacttaaaagtttcctctattgaaaaattaagattttacataacaatttggttttctttaaaagtcaggtccgaggtgctggggcctgggggagagggctgtttgcttcaggtgggggtcacttacagcaatcttggctttaacggccgccagcttctcctgggcagcagcgaggtctgaggtggccctgctcagtgcttggcgcttgggttccacatcacagaacacctcgtgaaacttcacgatgtttatgacccaagaacagaggcctgcggctgcgtaagacttggtggccacgaactccggattgacctcggggtcctgcagatatggccctgatggccttggaggca

SEQ ID NO: 60034 - DNA, 1739 bp, Bovine  19866881056916
  misc_feature (1)..(1): n is a, c, g, or t
ntttctctcttgaaaccagggaaatgttttgaaaaatattattcctgggtggggtcaaagaccttaagccagtgcaaagttgactggttcacagagaataaccctcagctttgccctttttttatcaccaagctccagacaagatccatcttaaactatcaggatctcctcccccccagagcagctgtgggatctctagaccacacaaaaatgatgatgagtctgacttgcaaaatatcaggacatgttaatgaccgcatggagcctttctgcacttggcggcagaaataaggcttcccaactttaggtctcaggaggaaacttttcaaatatttaaatagcctctgcctctgttgacatcacaaaatcccctctggcagttcagtctcctgctttcagcatgactacctacatcgcacagtaaatgacaggaatgttgtcaggagaaattggaggaacaagcctgaaaacgcaaactttgctcccaattcagaggtgctcgattccatctggtgctcttcttaagggattttgggaatcacgtgacaatggcctgagtgttttcaatattttggcacttaaaggtatcacagaatacaaatgaacttaatctccgaaacaaaaccagacccacagacatagagaacagactggctgtcaggggggaggcaaggggagggatggactaggaatttggaattagcagatggaaactattatacacagaatcgataacaagatcctactgtacagcgcagagaaccatattcaatatcctgaaataagccataattgaagagaatatgaaagaaagtatgtatatgtatagctgaacactttgctatacaacaggaactaacacagcattgtgaatcaactacacgtcaataaaataaatttttaaaaaaacatatcacataaacctgggtgagccttagagaaacacattttctataaagggtcagaaggttaacattttcagctttgcagaccatatggcctctgtcacaaatactcggctctgtcattgtagtgggaaaatagccatagacaatatataaatgaaggagtatggctgtgaccaataaaactttatttatggacagtaaaatttgaacatcatgtaattttcatgtcattaaacattattattttaattttatcaaccattaaaaattgtaaaaaccatgcccagcttgagggcagagacagagggtcagatttggcctataaatcatagtttaccccctcaatacccaacgtgaagggctttcctaatggctcagtggctaagaatccaccttgcaatgcaggggacacaggtttgatccctgctcagggaagatcccacatgctgaatggtagctaagcccatgcaccacagctactgcagcccatgcacctagagctccacagcaagagaagccacctgcagtgagaagcccggcactgaaactggagaggagcccctgctccctgtacctagagaaagcccgtgcgctgcagtgaagacccagcgtagccaaaaataaataactttttaaaatacgcagcatgttatccacaaaacaccaaaggacataaattttacctatgttaaataatagaaaggtgaagaatgcacaccaaagggaatccaagtttctcactggaggactatataacacatttacagataagaaaatgcagactctcagaggaacaaaggagaaagaaatccagaccactgcaggcagtca

SEQ ID NO: 60035 - DNA, 1795 bp, Bovine  19866881061795
  misc_feature (1)..(1): n is a, c, g, or t
nggtctcacatatactctcaagttgctctgtctttgacatcatctttgtctacagtctgccttaaaaatgtcctctgcccaggaaggtgctttcgggatcttattattgctgtcctgatgacccccaccatgacagcatttctgtttatgccaagggcatgtttctctgggttcccaaaactccagtccttgcccatcgtgatggagcaagattctgggcagaaacagagaaaagcctttccgactttgcataccctttactaccaggtcctgaagcagcattgctcacaccctgagtctcaaaggactctcacagaagcagaccctttttctttgggctctgactcctcttctcaacaaactccccgcccagcctatggaccttgtaggagaactgtagccattcagtcccttctgcctgcttggtttttctctttggagtcatctcaccaacaagaaaccaaagcccttccttcctcctttagtccagacaagagctcctgtgttcatagcttcatgcaaagaagtgtgttttcgggttgtgtagggactgagagatcccctgagtccagataccccgttactgctgtaagaccatctgaccactaggtgtgcctcagtggatgtgacctgaagcagtatgtcagggtcagagaacccgagctggacggtataggctggctgcagtggtccctcagcccacccctcccaacaggatgtttgagccagaactcggtgaaaactgcttgcttatgcctccatggagggagagctcttttctgctgtctcctgggatttgggtgatttggggttggaaaacagggtggtcctagaagtcatgtattgttgtatcctaaacacaactgaactcatccactttgccctgaccttgtctcagggcagcatcacaatcagagaaacagtctagcaaccaggagaagacgaaaaacacttcagcattttgatcccgctgttcccaccaagggggcagggcagtcataatgcacagaaaacatcttcagagtgtcctcgaaaccactgccttctgggggcaactgctctctgaaactcttttcttgcccctactctcaaattttagccctcctaattctccccaacagccagcacacttagcttcttgtttcttctccatcatcaccctccatctctgcatcgggtctttatgatgtatgtcagcttactctttctgacacctttaattttctcttcatgttaccctctacccagcttctcacaacacaagaggagggtccagtaggtcattcagcacacagggatccctccttcagaaacaaaggtgagatggacaggctatgagtatctgccaattcttttttttttttcttctgctgattcttaattgtccatccatgaccctcttaccttggaggacagacgtatgaaggaaaaaactgggctagaggattaatgtaacgatggaaaggtggggtctgtgacatttccccatcttcctctgcctcttttgcagctgctggacatagcaggaagcctcctggagagaccagtggtagcacaggatgcctctgaaagatacctggtgctcatccgcatgtttagcgaggatctggatgctgtgaggctgatccacagtcagcgtgtccaggaggaggcagagcatggtaagcttgctgccaggagacttggatgggggcgtctattagcagaaagggcacaggtcctctggttacacgtctgctgggctctaggacattctccaaaagcacaatcttcttgcataagatccagaccatct

SEQ ID NO: 60036 - DNA, 2128 bp, Bovine  19866881088262
  misc_feature (1)..(1): n is a, c, g, or t
nccgccacactgattaatcttcagcatacctcaattccacggtatatttgcacatgtttgagaaacggttctcatccctttcagtgccgtaccaaccatgctttcggagggaggagccatcaggagtctgacagcgggcaattacacacctaggtgtggcatctctgctgttattgcaattcttagatgccctgccttgtctgtttgaaagtcaaccagttcagttcagctttgcaaacatttcttaaggccatgctgtatgcaaggtccatttgtgggcactgcatgcagaggccgaccaggataagggagagaacaattaatcctaaaaggtggttcttcagggaacacaattggcatatatggagttataaagaactgtagcaagggacttgcctggcaatgcagtggttaaaactgtgtccttccactgcaggggacatgagttcaatctcaggtgtgggaactaagatcccacgtgccaaggggcacagccaaaaaaaagaaaaagaaaaacaacaagaaaaaaagataaggtagcaaaacaggatgaattgggctgggaggtgggaggagagttaatggagatggtggccttgtgctggaccctgaaagatggggagatggacagccagagagaagaggccatgccttggaagcaaaggcatgacaggatgtggaaggtgactagtcggacctgcctgtagccaatcgaggtgtatacagggagatcaggtcagccattgagtttgggaccaggtcatgaagttctctgaacaccctattagggaatccagaattccgttattcaggcaattggaaattttcagaagttttaaatgctggagtaacaggaccactctttctataaacaggtttcacagtaaggtcattaaggatggagttccctgaggaagtcatccagaaattctgttggcctcagctttacatggggctatccccagaacgtttgggaccatccctatggtgtatgggaccaccttcatgatacaggggttgttcgtgggcagagcagggctcagggagagagccacgcttcagtctgctgtgccctgtccccagggttctcctccgtgcacaagaacatgcccactgtggccgggggcctccgctgggcacaggagctgaggcagcgcatccagggtcccttcgacaactttagatgcatgacacacccgtgagtaccctgttcctgaaacgcaggttcatttcacacttccgctatctctctgaatttcgagcatcatagcagctcgactcacttccttgaggcacaaagatcatcttcttttcttcccaacaatcagccagtgtcttagtccattcagaaataccatagatgggggggaggggtggagcttataaacatcagcaatctcactttctcagttctgaaggctggggagtccatggtccaggtcccagcagatttggtgtctgttcaggaggacctgcttcctgactcacagatggccgtcttcccactgtgtcctcagacttggcgggagggactcaagagctgtctgaattctcctcatacaggcactcatcccatttgtgagggatttgccctgtaacctaatctcctcccaaaggcctcccttaggcttcaacatttgaatgtggggaggacacaaacattcagttcatagcagccaggtagctactggccaagggcttccctggtgggtcagtgataaagaatccacctgcaccacgggagatgtgggttcagtcctgggtcaggaggatcccctggagaaggaaatggcagcccactccagtattcttgactgggaaatcccatggacagaggagcctggcaggctacagtccatggggtcacaaagagtcagacaggacttagcaactaaatgacaataaacaaaccaggctggggtctgaagggagcctccacaacaccatctaatgccaaggagaaacaatgcaatgtgagaaatctcccaactgttggaaagaagccgaaagccttggaggtccctgtagattctacttcacttcatgggtgaggagtccaaaccactttcagtagccagttcataaatatattacagagtatacacacaaatgtgagttcatgatcaaa

SEQ ID NO: 60037 - DNA, 1967 bp, Bovine  19866881304660
  misc_feature (1)..(1): n is a, c, g, or t
nttgctgcctgaaaacacgggttgtcatgccacacaggaaaacaatgtgtcttctgccaaagtcacttaaaaagacaaatgtggggctccgcgggagagctgcctgacacctgctgggatctgtttttccaggagaactccggttcatccaggcctggagacacctgagtggtgtgctctgctagcagttatggtcacatcaccgtgagaaggagtccgactccagcggactgatggtccacctggtaataaagactggagcgcatcccccagagctatttgaatcatacccacgggaagtcaaccctggatgccatggggttacctggagcgggatagggtatgagctccaggtatgtgatgcggtggctctaggggagagtgggacagtcttagcctctgatactgggccaagctggcccatcaggtgggcttcctaagggggcgctacgattgctgggagactgaatggcaaattccagattctcctcacccccagctgtaggcaccccgtcctaaaatttcctgagcttgttctaggcacccagcatgtctcctgggtgatacaaagcagctcagtattgcaaaaggtgactccagttgaaataactagaacagagggatgactgatatttacagggcctgtagtctgtggggacaccccaaaatatcccgaagaaaaagtaggtcactggaggatctgcatcctgtaactactgtgagccatgagtgtacctgacatggagctgtatttccctttatgaagtgccgtttttgtgtgtgtgatctgggtctgtattttaattttttttaattaaaaaaaagggtataattgctttacaatgctgtgttagtttctgccatatgacaatgtgaatcagctacaaatatacatatatcccctcgctctggagcctccgtccgctcccttatcccagccccctaggtcattgcagagcacagagctgagccccccgtgctgtgcagcagctccccactagcggcctgttccacacatggtagtggctacatgtcagtcccgtctcccattcatcccagcctcccccctccacctccatgtccacatgtccatcccccacatctttgactctattcctgccctgaaaatagggtcacctgcaccgtttttctagacgctacatatatgcgttaatatacaatgtttgtgtttctctttctggcttactttactctgtatgacagaccccgagttcatccacaccactacacatgactcaacttcattcttctttatggctgagtaatattccattgtccatttttaatcgacacatttgctctctaagttacaataccgactggaggacattttaagcctcatgcctggcccaagaaaccacactggcattgttaaaattcccagtataaatggagtcttactggattgggcaaagacaatcaccttttccctatcatttaccatttgttgcgtcaggcacttacagtgctaactgacaagtatcatgtcactgaaacctcgcattattctatgaggtcattcacatttcattggtggcacggagttgcccaggatggcacagaatatatgtggctgaccccagatttaagctcacatctacagaatcgaaacacagtgtcctttaactctaccctgtgctgctgtcttgctagaacaagcaagcagagattcatctgcagcatcagttgcagagctggatggagtttctaggggggtctaggttctcttgtttttattttaatcactgtgttgtgtctgactctttaggaccccgtggactatagactgccaggttcctctgtccacgaaatttcccaggccagaatactggagtgggttgacatttccttctctaggggatcttcttgatgccaggggctggaataaaatgaaaaacaaacaaaaaaaagcatttataggatggggaagatcatgggagccgttg

SEQ ID NO: 60038 - DNA, 562 bp, Bovine  19866881323427
  misc_feature (1)..(1): n is a, c, g, or t
nacagcatgagttaccgggagggtctctgtgggtaacgggggccctcctgcctgcagtagtgagccccccaaccccagtgcgattccctctcctgaaatgccccagggtgctctgacagcatgtgagtctcccactagcccacagttcgctcctcctgtctcccgccacacccgccccgtctcccccgaccccaggcctgcctggtgcacaccagcgagaccatatgcctctgctacttcctggagcggctcctggcgcggcggcggcctgtcatgctggtgggaactgcgggcactggcaagtcggtgctggtgggggcgaagctggccagcctggaccccgaggcgtacctggtgaaaaacgtgcccttcaactactacaccacatcagccatgctgcagggtgagtgtcaacacctcaataaccaagtgaatcggcctgcttctcactgcttataaagacaggtactcactcaccaacgagggaagagacatgggcctttaatcaaagtgccagcaatctggggagacggtggattcagtgtctcccaaaaactacttc

SEQ ID NO: 60039 - DNA, 1608 bp, Bovine  19866881324276
  misc_feature (1)..(1): n is a, c, g, or t
ntcttatcctggcatcagaaatgtatttcaatagaatcgttttcctttgtaatcgtattcattccattttacatactacaaaacattactgtgagaaggaatgcatcggttttatcagactgccaaaagggtccatggcacaaaaatacttgagtccccaaagcagagccagaaaacacctcattaacctgctattgcgctccttgccttcatttgttcagctaatggctgtcctttcaacgatttcctttccacaagtgttcaaagtgaataaataacagcttaattttttgtttatttcccagtactgtaacggtttttttttttaattaaaaaaaaatttaaacaattttttggctgtgccatgtggcatgtgggattttagttccccaacaagggatcaaacctgtgccccctgccttggaagcgcagagtcttaacgactggaccaccagggaaatgcactataagagtttttaaactactgttcagcaaattatcaggtgggtgggattttatgagctgatctgagaagccaaccatcactagacggtctgggctttgtgttccaaggagacacctataaatgcattctggaacacaaccctaactgtacgtggtgattcttctgtgctaactctcaggcagctgcttcttatgactctcgtcttgactgcgggactaagactgtcccgccgacaccctggtacggactgtcttctgtgcctcccgccagtggcatgtaggacaggatgaagactcggcaagtgcttgtgggttgaggaccatgagcgctgtgagagtgtcgaggggcaacacaccctgagtcctcttcggttggaaactggcatttccccatcaggtcatgtcagcgtgagccacctactcacactgagagctgaggacgtttgaccaaagccgatgaactgccttcataggggtgtctgtaggtcacagacacagacgtggtgctcggggcacagtaaccaggggggcagcatttggggaaggaggtgtgccctccactgctgctattaagtttggcacaagagcaggaaggttggagggaaatacaggatgtgtttggtgcctcgtgggtttaacagttttgagaacagtcaggagacagcatggaggtggtgggccagagttcccacgcagaccccagaaggaggacaggtgctgtccccaggtgacctggagggcagtgcatggcggtacatggaagtgtggaaggacatgggtgcccaggtctccgtcctggatcccggaggtcactaggggatgctctggaggtgacgggaggaagaacgcaggaagggactagaagatttgcattgctactgtcacgtgagctcacgagtgacgtgggccagacacacctgcagctggctcaggtagggcctccacgccgcgtctaggaggctctggcggtaccgctttgtaaagaagcccaggtacgagatggaagctgcagtgagtaaaatgtctccacataatttcctttcctgttgcttgaggttctgcacagcttctgcccatctcacgttttcagaggccaggcctcccacctgccattggaagagcagagagggggagaaggcacgt

SEQ ID NO: 60040 - DNA, 1964 bp, Bovine  19866880514973
  misc_feature (1)..(1): n is a, c, g, or t
ntgatgggaccagatgccatgatcttcattttctgaatgttgagctttaagctaactttttcactctcctctttcactttcatcaagaaacaccagagatcccgataaagtcagagaatacatataagggagatcattctgaggactcagtcatttccagctagccagtcaaatgtctgatcatatctatacgtaaactgggctacagtgagacctaactccattagaactcttattgttaagcgcgtcacatccgggagactcgccgttaagcagacatttttccaaacagggattacaggtgcttcccctccagtaaattaagtccccaagagcagaagtgaaggaagcacatttgctcacacacagactgagtataatactggcccccaatcaaaaaccatcaggaagtcagaattcaaggcaagcccctgtcctaaaatgactctttcatgatcagattccacaggttctcagagagaaacgcccacgtggagcttctgtaggttcctgagcccagaagccacagggtccccagggacaaatccgggacaagccacaagtacgccaaagctgcgtgacacacgtggtgtgtacactgtcagtgctgccttctcagttcctcccactctctccttcccctgctgtgtctgcaagtccgatctctaggtctgcattggctcaagagggaggggatatgcatgtagttacgactgattcatgccagtgttgttgtacagcagaagacactgtaaagcaatcatcctccaattaaatatatatatatatatataacatattaaaaaaaataaagtaaaagaatacagacaaaaaaaaaaaagtctgacagaacagtgggtacatctgctacatgggagcaggtcagggccaagacagagtcacatctccattcaaagccaggcactcggtaccacttggcaatgtctccatgtgtccctttcctccgtcattccctatggtggctattcaagacctctcttagaaggcggccttggggcttcccaggtgggtccagtggttaagaattcaccttgcaatgcaggggacatgggtttgatccctgttctggaaactaagatcccatgtgccacggagctactaagcctgcacacccaactagaagttcatgtgccacaacaaaagatccacatgaggacataaagatcctgggtgctgcaactaagacccaacagagccaaatgaatacacatttaaaaaaatagacgaatacagccttgctggctgtaaatagacaccaagactatcagtcatgaactttctccatctcctctctctctctgcacctacaaattattgcatttatacttactgaacacttctctccttccccagtcacaggaagacatgtcctgtccaaggcaattcctcacactgctctcatactcaattcccttctccctctcggaaacatttgccgccattctcacccacaaaccctttcagactctttcccaaaagcgttgaacaagcaaaccttgtgagcacatgaaacctcagtttcagctttcctccttctcttatcctgttttcgtagtctcagacttccttgtcctctggtccttagtcctctgtcggggtctttactagtgttttctcagcactgactgtgccctggaatcatttgcagtatgtgcctagagattgtgattcacactgagctttggcatcagtattttgcagatgttacatgtcctccactcagtcactttccctcctttgttgctccttttgggaatggcacacctctccatctgttcattcaatctagaaaccttgccttctcctcctcttccaatcaatcactacatcctatcaatctacctcctttggtgtgcatgcatgtatgatcagtcatatctgactctttgtgaccctgtgggactgttgcccaccagcctcctctgcccacagaattttccagg

SEQ ID NO: 60041 - DNA, 1565 bp, Bovine  19866880550918
  misc_feature (1)..(1): n is a, c, g, or t
nagcttcttttttttcttttttttctataggtaagaagtagatttattcaaagagaaacacactccatagatacagtgtgggccactacagagggcgagtgctgtggtcttgaaatgcggccatggttagtttttctgggccggacaatttcataggctaatgaatgggaggattagtctatctatttgcggggaggggaggagatttccaggaattgggccactgcccactttttggtctttaaaaaaaaaaaaaattatatttatttttaattgaaagataattgctttacaatactggtttgatgtctgccatacattaacatgaattagccatagtctatatcccctccttcttgaacctccctccctcaggtgaggttcttaaagctgttgtgtttactaatacagctccaagtttaagtgcctaacacaatgcaggtgattagtaaatatttattaaatgaattaatgactattatatgaatgattattgtcctgtgttactaactacatcctaaacaaacggacttcagtcggctttaaaagagcatccatttattcctagagagatcagaaataaataccttactgccatgcttgctcaaaatgcttagaacaaagtgcaacagtcataaccatataacaggttatcagttcagttcagatcagtcgctcagttgtgtccgactccttgcgaccccataaactgcagcatgccaggcttccctgtacattaccaactgctggagcttactcaaattcatgtcccttgagctggtgatgccatccaaccatctcatcttctgccatccccttttcctcctgccttcaatctttcccagcatcaggggcttttccaataagccagttctttgcattgggtggccaaagtattggagcttcagcttcagcatcagtctttcaggactgatttcctttaggatagactggttgaatctccttgcagtccacaggattcttaagaatcttctccaacatcacagttcaaaagcatcaattctttggcgctcagctttctttatagtccaactctcacatccatacgtgattactggaaaaagcatagcctgactagacagaccgttgttggcaaagtaatgtctctgctttttaatatgctgtctaggtttgtcatagcttttcttcaaaggagcaagtgtcttttaattccatggttgcagtcaccatcttcagttattttggagcccaagaaaataaagtctttctttccattgtttccccatctatttgctatgaagtgatgggaacagatgccgtgatcttagttttttgaatgttgagttttaagccagttttttcattctcttctttcactttcatcaagaggctttttagttcctcttcactttctgccataagggtggtgtcatctgcacatctgaggttattgatatttctttcagttgagctatctcaaatcctaaaagattttgccgttaaagtgctgcactcaatatgtcagcaaatttggaaaactcaactgtggccacagaactggaaaatatcagttttcatttcaa

SEQ ID NO: 60042 - DNA, 2057 bp, Bovine  19866880596646
  misc_feature (1)..(1): n is a, c, g, or t
nttaatagtgatttcaaagggaacgtcaactgtcgtgtaatctaattacccaggatgtctgtgattctatcaattatatctcattcatttcacaataagtttgaatagcataatgatatcattacatttcttaagtgaaaatacttaggcacagaatcataaaatagtttgttccatcagctttccgatatttttttttatttttgaaaagcaagctatgactatgattgtgttattatgattgcatgtaaaaagcaacctttcttctccacattgattctgttttgtggatcagtataacagctttagcagcaatgtttttaaggaatttgtgatggtttaattgttgtttttattttctttttgagatgtgcactatcctgatcaattctagtctatgacttatggtgagatttattaatatatgtgtatgtgtgtgtgttggagaaggcaatggcaccccactccagtactcttgcctgggaaatcccagggacggaggagcctggtaggaggccgtctatggggtcgcacagagatggacacgactgaagcgatttagcagcagcagcagcatgtgtgtgtgtagtaggtgataatctttggctttggtttttaataagaattttttaaaaatcagttataactaggaaacttttcttccagtttttacccagttgtctttgattccctttggaaatagtggacctgacccagttcttttttgagaattcatttcacagaacagtatgttaaaatatttttgttattctaatcaagtacaatgtaagaactggctgtcatccatagtttctgttctttaacatgagaataattctgttccttggttaagatactcttccattattatacttaactggtttggatagcaggctatgatttgaggaacacagctatttcatacataaaataaatgatttttctctgcaagcattttttaatcttgattttgtctaacttgaagtacataatgatatggtaaaagtactggtaaaagaagaatcccatagatactagaagtgaaatttattgttgaataaaattcagcttattataaaatatagcatgactttattgctacatcaggataatttttaaaaaattgatccagctaccttcccttgtttgatttagtattcatgtaagtcttagtataataaattgacatttagttttaaaagtaattttagctaagttgtggcagagaaagaaaatatatattgggttaactcttaatgattatacccttaacctatttgtaggaacgaacattgaggaccatttataatatataatattaggtttctatataatcttctgggtgtttaaagtacagtgttgttgttcttttcttatagttggttagaaaaaaactattatttgaagggaatagaatggaaaagcaaaatgaggaaagttgaggagggtgggatatattagttttagagggcttccataaccaagtgccacaaactgggggacaaaacaacaggaatttattatctcatagttcagggttagaagtctgaaactaaagtgttggcagggatgtcctgtctgacggctccagtgggaaggatccttccttgcctcttgctcacttttgatggttgtctgcagtccttggcttatggacgcatcactccagtttctgtctccgtcgtcacatgacattctccttgtgtatctctgtccaaatttccctcattttataaggacaccagtcatattggatataggtttagagcccaccctaatcaactctaacctcatcttaacttgattacatctacaaagcccctgtttccaaataaggtcacattcatagattttggattgatgtaaatttgaagggacactatttaagccaaaacaaagagttctaaattcaatttatattttgagatttgaaaccaacacactggatttatctattttatatctaacaaatggtaagatgcattttatgtagaaagcttatttttattttgcagttatatttacacgtaggctttcctgtgtcacaggcctaagta

SEQ ID NO: 60043 - DNA, 1608 bp, Bovine  19866880614152
  misc_feature (1)..(1): n is a, c, g, or t
nctaagggatgcagaattgtttgataggaggtaggtgcccaccacaaacttgctgaatcttccatgtattagctggtgttcagaagtgtctgtaatctggctcagctcatgactctttgttttgtttgtttgtttaagggaatatagttggtttacaatgttgcattagtttcaggtatacagcaaagtgaattggttacacatatacaacatacatacatatccactctttaagattctttttttaacacatatatgggagaaggcaatggcaccccactccagtactcttgcctggaaagtcccatggacagaggagcctggtaggctgcagtccatggggtcgctaagagtcggacacgactgagcaacttcactttgacttttcactttcatgcactgggagggagggaaatggcaacccactccagtgttcttgcctggagaatcccatggacggaggagctgccgtctatggggtcgcatagagtcggacacgactgaaagcgacttagcagcagcagtagcatacattctttttttttttttttaattcctttccattatggtttatcctaaggagattggatattgttccccctctatacagcaggaccttgtttcagctcactgctcttaaattcaatagtgtagggatagtagaggtgggggaagtacttctctgacagtccagtggttagaacttagctctttcactgcccaggtttgaaccccggtcagggaactgagatcccacaagctgcatggtgaggtacccctcaaatagtgtgtgtgtatgtgtgaaagcagttgcaaaccataagatcctctttagttgttaaacattatttttattattctctaccatgaaattcctcctgcaagtatttgttcgctaagcttggctttatttcaaatctccccagttccacctttttaccatctagtctggaggtttgcttttctgtggagccttcagtatggactccagctccaacatgatctctctgtctcttctaaattccttaaacacctcctacccattacgtatgttgttgttgtcatccctaagtcgtgtccaactccttggtgaccccatggactgtagcccaccaggctcctctgttcatgggattttccaggcaaggatactggaatgggttgccatttccttgacatttaaccatatattacttcatattgttttaaagtaatcatgtagggtgaatgttttataaattgtgaattttccaacagtacatgataattgctcaaaaaatatttggtccacaagtggggaacatttgaaaacattagagggaaggtctttttttgagtttggactcgggagaatcaagtatcctctacaaagaacaaagagcatcactggaaagaggaagtttttagcagaagtttgagataagcatgaacaggcagaacagagctgatgtgggaagtgagaggggcagaggtggtggcgaaggacagaacagaggtcaggaagcaaagtggacacccaccctgcgggacattcctagaactcaaggcaaagctccttctttcccaagtccctccaatagctattttcagccacgtccaattttagaa

SEQ ID NO: 60044 - DNA, 2583 bp, Bovine  19866880731515
  misc_feature (1)..(1): n is a, c, g, or t
naagagtcattgaaatactttgagttctctactaagaaacacctgcccttgccttccaaatccctatctaaaagataaggcaaatctcttctgcatttaataaggacttttttgcataccattatatcacttaatatttacaacaatcttgccagctcagtagtattttactcattttgcagagaaaaaaaaaacaagattaggtttggttaagtgacatgtccatgatcataaaactagccaaattagaattcaactcaagtctccccaaagcttctactactacaccaagcctgtcccgtcccttcactgccctaaggaaatagaactcatctgcagagaatgtgtgtgaaagtcgctccatcatatccgactctgcaaccccaaggactatacactccagggaattctccaggccagaatagtggaactggtagcctttcccttcacaggatcttcccaacccagggatcgagtccaagtatcccgcattgtaggtggattctttaccagctgagccacaaagggagcccaattaaataataactaagactttattttaccggtttttaagatgactctcagtttcagagatgttaatatgtgaaaaaatatgtatcttaatggatgaaataggatatatgtcgtctcacttactgtgtttttaggacttaattgtagtttctaagtaaaactacttcatctctatcgataggcttcaaatatcccctttaaaactaccaaatatgggaaatacagttagaaaatcatcaatcacacacaagctcccaagtaagtccggattctctaatctttccattgatctgaccctgcccttaaagtacactgctttaattacactaagcttgagccacaagcgaagcccaagaatactagcgtgggtagcctatcccttctccagcggatcttccggacccaggaatcgaaccctgcatttcaggcagattctttaaccggctgagctatgagggaagcagagaatgagtaggggctatgcttttcggatgtcttggccctatttgtgacctgcctagtaaccggcaggtaagaattacagaaatcaaatgaatcgctgtaaagtcggtgcaagatgccgcagtcttggtgaagacctggtctcaactgcacatactgaaaaataatttcataatttcaatacagcactttaagaaactgcgtggaaaatcgcggggctgtgccctcaagtggtccaaacgagcctttcgcgggagctctctactttttcagctgtacaaggccaatatagcaacgctgccgttttctgccagcctcccaaagccccgaaaagccctgggctcaccaaaagcaagggcgcccgaccccgcccatgcccaggaagcaccgcgcatgcgccttcccagcttctcgcgcggctaccaccacctggtggcgccacttccccccacatccgtttcacccgcgcagcccgctctctcgaaatacctttgtctaactccataagggcagagttagcatccagctcctgttcgccatagccggcatctgccagaaaagacttagttgagtttgacgccatgacccatacagttactcgattagcctattcatagagattgcaaactcggccccaccaccgccatcttcttccaccaccttctcgcggatttttcctccgcgctctgtcaagccgtgttacgcatgcgccctgggctcccagcagttcgccagcgcccctgcggccccccgcgcaggcgctcagggagctctggaacgctaggttcccgcggctgggcgagaaggaggcggggcttcgaagggggaagtgactcgtacgcgcccggacgccgcggcgagagccaatcagagggcgtgacgtcagtttggcggggagtttggtgaccggggcttacagtggcgggagttggaggcattagctagtcgtggtctaaggggcgcagggtacagtttccgctgaatctggaggcatttccacggctttttcctcagttgagcgttttcctccgtcccagatgctcttcaattcggtgctccgccagccccagtttggcgtcccgagaaatggtgagtaacggccctaaccgctgtctcttgccggcgggattcacctcccccagaacaactcttcggaccaatgccgatttcagttcagtttcccagccgccgagttctcccccagccagaatgagttcgtactagctaggaatactgaagaaagccgcacttgcgtgccctcgagatacttttcgtcgtaatcgaggctttttttagtcgtgtaggctgagggagggagggacgttgagttaactgacctccattacggtttatgtctgttttgcacgttaactggaaaacgcgtgcattttcgtgtgtgtggctttctgaacgaacagctgtgtgagatcgtcaaggctcgtactcattgattaattcattcatttgtagtggaaacagtgagccctaccgtttgctatatacaccagagaataggatcggctcttaaaaagagctcagtcaggcagagagaacagaacatctgcttctagcaggtcagaatttttt

SEQ ID NO: 60045 - DNA, 1494 bp, Bovine  19866880789377
  misc_feature (1)..(1): n is a, c, g, or t
ntcttcctgcttcatgaaaatcgggaccatcttcgtcttgttctcagtgtgtccctgatctagagcagtatctggtacaaaggctctcaacaagtatctgttgaatgggtaaaagcctaaataaagctgagcagagtaaggggagatgcagaggtattgaataatactttcttctacttcagaatgaatattgatattatcacggttatttaaaatttcctgaggttagccagcttcattgcttaattcatgccaaatttttcccttttttgcaggtgatcagaggattgctgaaattttggccaaaaacatgcagtcagaaagaggtgagttttaacaaaaacagtgcattttattagaacttttcaatctcagggctataaaccgtgcttccttgggttgcgggtatcaccaccactacctaccaaggggacactgttctgtggggtttagagaaacttggtggaagagctgtccattatggtaagtggcatgtactgtcaaggtatttttcgtccactgttaaccttctcatttgtgttttctgtattaacatcatataatttgtcatattatgtttcttaaaagaaaatttttttaacctaggtgatgtttttaggagaaattgaagaaatcttagatgtcattgaacctacacaattcaaaaaaattgaagagcctctttttaagcagatatccaagtgtgtatccagttctcattttcaggtatggtgttttcagtgaagccatttttattttacactattacttttcttagttttgatgtttctgaatgtcttttttaggttgcagaaagggcactgtacttctggaacaatgaatatattcttagtttgattgaggagaatattgataaaattctgccaattatgtttggcagtttgtacaaaatctccaaagaacactggaatccgtaagtgtctttaatgttgattgtgtcatttttgtttttctaacatctttgtcatttgatctcataactcatacataggaaacctatacagatttggaactcccaaggttaacatcacatggttctattctgcagtgagttttatgaagttgtacatatatgtgggtctgtatgtttgtttgtttgtagcagagaaaggtttattgcagggccaaatgaaaagaatggggtggcttatccttaaaaactctgaactcctgcatgttcttaatttcagtttagaattgcaaatctagggactgtttggtatgacattctgccagtatccaggctcacatctcagctggcttagcccagggagaagcgtcagtgctcagggtcacgtcagtgatgtttagattgcttatgttctaaattctgtaacatccttatcctgttgtctacttttctttcttctaacaagtcatagtaattgcatctttttcagctgcttttaatactattattcaggagttgtgatagtagactctagagtagtccctgtgttccctcaagctcag

SEQ ID NO: 60046 - DNA, 1352 bp, Bovine  19866881115258
  misc_feature (1)..(1): n is a, c, g, or t
nagttaagtggtctcgaggggtggagaaagggaaggaaccgaatgagtctgacaggaattctgtcaaaaagttgttcaaggaaacaccgaaaaacctccaccctctcagtctcttcaactggttgctttggggcctccttttccttgaaagtgaagttccagggagataaacatccatggaaaccaacaggtcttgaggcaaatgtgaccccaccagctgaaaaacagtccttcccaccctgctctcaggcggatccgtaataaggactgaggaagtgaccttttctcaggaagtgggtggatgaatgacctagaattcaacccttcccttcgtggaagaaacctatcgtctaaaggagggaagttgtcaaatgtgctcctctcagggcagaaggaaaagggagtggcaggaacaagttactgtccagcagtaggttttagaatatattaacagaagagaaacattttctacaaaggggcacctgtttcctctgaggcaagaactggctcctttaaagaggaggctgaaaattttctctggaaaatgtagcctctacttttataattgtcccagttggacaccaagaggaattttttcatatgtgatattgatgtgttatttattgactatgtttggtttcccatcaccttctattgaaactgctgggattcaaactcagtagtgtgtgaagaccctggaccagactgagagtggggagacggatgagggagctgacctaaggactggaggtagattgggagcaaacagctaactcaattgtgtttgactttctatgactttatttgaatttgaagttttattatgaaaggaatatatgtacctagtcaacttggtgtttttattataaaagtaatttaaatatccagtatatatattacacaatgaatataagaacctcgtgtggaggcattccagcattctccccagatctgtggtgatcagctccttacatagtcttatgaaaaagcatttatgcatagctaactaggacagtgtatcatttgtttaaaaaactcgcacagagcttccctggtggctcagtggtaaagaatccgcctgccaaagcaggagacgcaggttgcatccctaatccagaaagatcccacatgccgaggaacagctaagcctgtgcaccacaattattgagcctgtgctctagagcccgggagccacaactatcaaagcttacacgccctagaacctgtgctctgcaacaagagaagccaccacagtgagaagcccaagaaccacgagtagagagtagcccaggcagcaatggagacccagcgcagtccagaataaataaacaaatattattaaaacagaaaca

SEQ ID NO: 60047 - DNA, 1738 bp, Bovine  19866881344598
  misc_feature (1)..(1): n is a, c, g, or t
nactttcttgcctcctgagaaacctatatacaagtcaagaagcaagagttagatctggacatggaacaatgaactggttccaatctgagaaaggagtacatcaaggctatatcttgtcacccagcttgtttaacttatatggagagtacatcatgcaaaatgctgggctcgaagaagcacaagctgacatcaagatttctggaagaattatcagtaaccttagatatacaaatgacaccacccttatggcagaaagtgaagaggaactaaagagcctcttgataaaggtcaaagtggagaatgaaaaacctggcttaaaactcaacattcagaaaactaagatcatggcatcccatcccatcacttcatggcaaatagattgggaaacaatggaaacagtgagagactttattttggggggctccaaaatcactgcagatggtggttgcagccatgaaattaaaagacacttgctccttggaagaaaagctatcaccaacctagacaacatattaaaaagcagagacattattttgccaacaaaggtccgtctagtcaaaactatggtttttccagtagtcatgtatggatgtgagagttggactataaagaaagctgagtgcagaagaattgatacttttgaactgtggtattggagaagacttttgagagtctcttggactgcaaggagatccaaaccaatccatcctaaaggaaatcagtcctgaatattcattggaaggactgatgttgaagctgaaactccaatactttggccacctgatgtgaagaactgactcattggaaaagaccctgatgctgggaaggattgaaggcgggaggagaaagggacaacagaggatgagatgattggatggcatcaccgactcaatggacatgagtttgagtaaactccgggagttggtgatggacagggaggcctggcgtgctgcagtccatggggtcacaaagagtcggatatgactaagcgactgaactgaactgaactgaactgtatatgtctacgtcccccaaagtggcagaatcatgtttatttatgaagaaaataaaactaattgaatgaatgaatacatcagtaagtgctttaggggatagtaagcaagagctgttgtaaattaattatccttatcatttgcatgttttttcttgcaactaattcagtcagtcaaggggtagccatagagttctgcttcttgtatttgaaaaagtatctgtgaagtaaggaacttgattcaaatacctctatgttcctttcaagctgtaaacttcattaaaatcagacctcctcccatatgtaatggcctgattctaaagctatttagaactctactagcaaagcagagaagcatctacattgcctacttatttcctaccagtttggtttaatcctctacctttaggagaagttagaatttcccttcttctaattactcattttagtaacccaaggcaggcactacttaatcccattgcttatactttcccaagggaatcaaattaaagtacctttgatttaaatccgaatctttgaatttagtgtagtgttctgtttgtcatcttacaagtaaatgaaagaagctatataaaaggttgagaaaacaaaactttgaacaagttgaggattttgtgtagagtgaagtacttttattggaacattctgtaaaaagcaacaataaaagtcttagctacttcaattctcaggattaacaaaatacat

SEQ ID NO: 60048 - DNA, 1023 bp, Bovine  19866881355968
  misc_feature (1)..(1): n is a, c, g, or t
nattatctgcatggtgggttggctaatttccattccaggctcacctcatggatatggttctccatcacctctccttgctgagaagttggcttccagtcaaagtacataggccatttaattattaatctgagcaaaacattgttaggaaagttaaactgttgagtgtgtgtgtctgtgtgtacacacgcggatgctttctgggttatctggctgttttgttttttctgtttacttttctgggcccctgctcctcaccattggtggagacgcctataaggtgatcatgaccaacagtgaatccctatgagctgttcggtccccggctccttggatgtgtgtggaaatgtttgtcagctgtagagggctcagtacaccaaaagtggctgaccttgaccttcgattggacagtgtatctgtgaccaggaaaaagttcagtgttcatgtttgatgatggttttatgccctcctgtcagtagaaagtattttatagagcttgctgatggcccagggctccaggaactatcatcattatttagccaatgattttaatgagtctatataaactcattctatttttacattactaacagggaggggagaagttggaagattaaacagaggggaggatgggttttagcttcactgctcagggctactgggaagacttttacagaattgctgctgctgctgctgctaagtcgcttcagttgtgtccaactctgtgcgaccccatagacggcagcccactaggctcctctgtccctgggattctccaggcaagaatgctggagtgggttgcccatttccttctccaatgcacgaaagtgaaaagtgaaagtgaagtcactcagttgtgcctgactcttagcgaccccatggactgcagcctaccaggctcctccgtccatgggattttccaggcaagagtactggagtgggttgccaaggctatggtttttcctgtggtcatatatggatgtgagagttggactgtgaagaaggctgagggccaaagaattgatg

SEQ ID NO: 60049 - DNA, 772 bp, Bovine  19866881636836
  misc_feature (1)..(1): n is a, c, g, or t
nacccttactgctgtcctggattgcctgtcttctcttttggcccttttaaacttactagctggcaggctttgaatcgcaacacacagccccattcccttctgtcctacttttcccagtcagcacctgctccattacttgctattcttttactgtttcagccagcgatctcagcactgtcaggccaaggggttctctatcctgtctgtgcatcagaagcacttgtggagcttttaaacaatttgtatgcctccagaaattgttaagtaggcctagagtagagaccaagtacatgtattaccataaagctccaaatgagtccgatatgcagccagactgagaacctctgctaggtatcactgagtgaaaagatgattatcttaaaaagaaggaaatgttagctgttctgtctcaagtgcttgctgtagacttaaagtcaaacacagtacttacacaatctgttctttgatggctggaacttgaccctcatccctgtcagcagtaatgaaatttaacaaacattgtttaataattccttgctaggaactacagcagcactagacctaaaaatgagtaaatcattatcacttgccctctggatgctcatagtctaatccaggaggcagctacaaaaactatagtatattgtaaacatttcacctagctatgtaaacaaaagggtttgagaacttgcttcctgtgggagaggaagaaagaagtttgtgaaatctgcacaaaggagttaataacactgtcatcagagccggaaaagaa

SEQ ID NO: 60050 - DNA, 1444 bp, Bovine  19866881848069
  misc_feature (1)..(1): n is a, c, g, or t
naaattattaaaaaaatttttttctggtttagaaattggaactgacaacgtctgcaaggcaccagctgagtggatcacgtgctcagaggagggccaggcagggagcaccagaggctggtgaaaagcgcagtgtcacagctcacagctccccttcccctgctgagtgatggttctgctcccccacgttcatcattagccctttccatctgctgactcattctcacaccgctccagccccggaaagctgagcgtgtggaaggaggcctattaatagccttttcctgggaaactcatcccagctatttctaagaccgtgtgaaggcaagccctgaagccctgcccctcatcctcaccccctacctcaccagcccgctcctcggagttgacccgtgatagttgtaggcacgggtggagggtgggtgcccagcaggctctggaaggtctgttctgtcccgtctacatttgtcaagatttcaaaatggtggcctgtccgttttggccagagagccaggcgtgggaacggtcctctgcaggggctgacagagggctcctcgaggtaccccacacatggagcaggtgagcgagaggatgcaggacaaaccctggtggagggcagggagacacgggggcagaaagccacagtgccagcaagcagggctgggtttgcctgcagaggggctctgtggcacacagactgcagagcccagagggcacccggcctgcgcgtggctctcgggcagtggtgcccaaggctgcctccccgactgaaggaaagttatctggctcaaaatagcctggagttaaaactcccctcagagtcctccccaccattctatgcaaaacaaagaagtctctcacctgaagaaaaaaatgtgacattaaggttgactgtgcccagctcccagcaggtcccagcctctggcggatctccagaattccttcccccagccttttagagactactaatccgaacaaccttggagaagaatgggccgccttaagacagtagatttccacatacatgcctatatatactgcttcttttcttgggttagtgcagcagctcactaatctgactgctgccccttctcatctcattaaaggtgatctgttcctataaagtgacagttttattctttttccaaaccttgccttctctgactcccttaccctacacagttaataacatcctaattcatgtatgagtataattaagcccattttacaaataactaagctgaggttaggagacattcaacaatttatctaaaatcacacagcaatagaaaactaacacactatattggatatttttcttaatgaaattctttataaattgaaattcaatacatacttcagtgtttggtgcacttgtaaagatctgaattagtagtcaatatggaaggcaatgacaccccactccagtactcttgcctggaaaatc

SEQ ID NO: 60051 - DNA, 1278 bp, Bovine  19866880388879
  misc_feature (1)..(1): n is a, c, g, or t
ncactgtttatttccagattatgacttttgtttttaattttatagcttgatagaggaaggaggagattgggaccggaggaaccgcctaaaagtatatcaaggtctttattgtgtagctattcgtgatttcaaacaggcagctgaactcttcccttgacacagtttcaacatttacatcctatgaactcatggattataaaacctttgtgacttacaccgtctatgtcagcatgattgccttagaaagaccggatctcagggaaaaggtaacgactgagtctttgatactcatgtttagagaatacaccatgcttttccagaataaataaaccataatcattgaagcatacatttgttctttgaaaaacccctaggtgattaaaggggcagagatcctcgaggtgctgcacagcctgccggccgtccgccagtacctgttttcactctacgaatgccgttactctgttttcttccagtcattaggtaaggatagagttgttcgttcgggctgtctttatcttattcctcactctgtctgtggacaaccttagatgatttttcacatatatgaaaaatacagtgtgcagagatagctgttgttctttggtcagcgtgcctaatctttgtccattcttgttagacgctgatcaaatatctttttgtgtggtccacaaggtaagactgatcgttacattttttaaaggattatttaacaaaacagaacacagaaaaatgcatgacagttctgcggcctcaccagctagagagatcagctgtctggttctctgccgaggaagtatgcctgacccctgagcacgagtgagcaagtggttctaagcattgagtgttttggcgactgatgtatgggaatttgactctcctttcaattgagttagctgtgcattagctgagtctttgtgctgatttgcaaatcattttcaagggatgttggttgagaaaatgtgttgaatgtgtttgtggtgttcaacccagggttccttcccagattttcctaaaacttaaaacaacttggcattgataattctcttgtctgctgcaagtttcggaaggtatttggttaatataaataggcagcatttacaaaacttgggaaaggaggactccaaatgatgatcttttactttcgaagtgggtgttggcccagtgcttatggcgtgctttctccatgcctagaaagttcggctgccttgtgggaattcacgtgtctgtgctcagtcacatcgactctgcacctccatggactgagcctgccaggct

SEQ ID NO: 60052 - DNA, 2938 bp, Bovine  19866880484302
  misc_feature (1)..(1): n is a, c, g, or t
ntgaatgatagttgaagatgtccgtgatcatggtcatggtcacggtgggagtgtttctataggtttttattagtacctcagaagttaaacatataccattaaccttaaggaagtctgggctctagaaagggtaatggctggagtgatgtaagaaaggtttggtaacagtggctcctcttcactgaggtctccctctgaggcaggtgccacactcagcacactgttcactgttccttacccaccccaccactcaggggagacccggataatgcctcacatacagtagcttggtgtttcatccacacctgtgcatctgcatcttcagacatctctgaggaggtaacattggtccctaatcacatgaagcatgctcttatgcttgtttccatagaccgtatgttacagagcagctttatatttacagatacattgagtagatagaatattggaaccttctgtactagatggcaagttggcagactcttcacatcttacattagtatggtatgcttgcgatgattaatgaaccaatgttgagacgctattactaaaagtgtgtcaaagtccatactttattcaaagtgccttagtttttactagatgcccccttttttgataaaccttgtttctatgcttcattcagatggcctacgtttttaacctcatgcccccagatcactgcattacattagtggccatgtctccataggcttctcttggctgtgagaatttcttagtcatgtttcttatgacctggacagttcagaagagtctaatcaggcattttttaggatggctgacagctggaatttttctaccactcttctcatcctgagactggggtggtaggttattgggaggaacaccacagagggaaagtgtcatttcatcaccgcttaggaaggggacatgatgttaacatgcttgtgacctctggtgttgatcgtgagccccaggctggggtggctgggcaggtttgcacactgtaaaatttctctgctccccactctccataccattccatagcagaggcaagccactgtgtacagtctacctctaagaggtggggagttctcttccccttcttgcaagcagagtagctacagagatcatttggaattcttcttcatgggagatttgtagagtcatttctcaagtgagactatgcagaagaaaattggccagagagaaaattatggttgacagatgtgtagagatgaagtattaaaagcaacaaagggaaagcaatctgagaagtagcatttttcatgtattttttaaaattacctaaatagacaaaaaatgtacaaacatatttattgctgtattgcttataatacttaaggacagaaagcaagtagaatatacaaacaactcatggtacattcatataaccattaagtcagacacattctgtatatttgaatatataaaattattggcatagaactataataatagtatgctgatgaatgaactatacacaatatgagtatacataatgtaagtatgcacatatataaatatacttgaaatataagtatatacacatgtgtgtttaagcatatacaatacctgaaagattagctaatatagggaaaaattactgtcattatctctagctggtaagactatatgtcatttagaattttcctttgtaatacctatactttctattttcttcaatagcttttcatttatctaataaaacattaaaaattaaaagaaaattgcttgaagcaaaagctttactgacaaatgcaacactagccctagtgttagtgttctgagtcatgaaaaccccgttacatgctagcttttaaaatgcctctaatagaacttggaatagagaagaaggcaagagcttcattatgtttttatgccatttcctctcacaccagtaattctgtgaataactgtagaacatcctttctccattctgggcctctgatcctggaaatcagaaaacaaagagaaaacagagggccgtgtcgctccagtctttgcccatcttctctgttgccccaggagcctccattcagtgaacgcatggtcctctcttcaggaccactccccacctcccactcgagcagtctcctctcttggtggcctcctctcctcttgctgctcacaggtcttcctccgtgtgctaggttccttagcatcgccacctaagacccttcctcatcttgcaccagcctcttcagtttcagtctaatccctcactcgagtcaaaaacggatcactgcagctgagcgccaggctcagcctgtgcagtcggctactgccttcctgacctcacctccacacctcacctcagctctccatcctctgacccctctctttccttaaaggtctagattaattgccccgcccccactggtgctccgcctcttacacaagcacacacacacacttttcccagctatcccaaatcctgtgattcttctcctgttttatcttcaagagcacctcttgtctacaagctgttctcagcagaagaacttaagagactggtatagtttcactgaatcccgtaagagcagagcttactttctcctagtcaggtcctcctggtgcctaggagagcaatgcatgccgttggccctcactaaatgtttactgatgcttatgcctctatgacagtctcaatgagagagaaagctaatgtgtgtttgaggtacgaataagcataatatagcattcaaagcccagcaatgagagcaagactgcctccgagctctgttgctcacctcctgagtcatcacaagttccttaccatttctgagtctgtttcttcatgtgtgaaatgggcatgatgatgggacctgcctcacaaagctggggtgaggatgaaatgaatcatgtgaagctctcactggttgcaagttgtcaaacaagggtaactcttgtcatcattagctgacatgtgacctaa

SEQ ID NO: 60053 - DNA, 804 bp, Bovine  19866880504046
  misc_feature (1)..(1): n is a, c, g, or t
nttcttgcctggagaatcccagggacgggggagcctggtgggctgccgtctatgtggtcgcacagagtcggacatgactgacgcgacttagcagcagcagcagcagctgtgcaaataataggatgatatgagcaagtgtgggagagcagagaagccttcccgaggaagtgattttgaagctgagatcagaagagtagaaacaagcagtgggtgggacacagcagaagaacatgccaggagatgtaaacagcatgtgccagagacaggctgaacatggtctgtctgaagcactctaaagctgatgagattgaagggaacaggaaaggtgataacggagtgagataaagctgtagtaacatagcagagtcagggagggcactatagagtttggaagctcaattaaagattttgatcttttccctgaaatcagtaggaggctgttgaagagttttaggttgtgggctgacactgtcagatttgcattctgaaatgccatgctgattatagtggggacagtatatgtggtcccagagtggtttgaatatgagcaagtgaattaggagcctattgcaatcatctaggcatgagcgggttactcgatcaggctggggcattggcaggagacagggaaaaggtagagtaatgagagaggtaaagaagaggagaatcaatgagctacacagtgaactaacataatgtaatttgtggatctcagcttttctgacttggacaatttatgaagaaccattggaatgacataagttttggccacaaaagagcagggacagtacatgctgagatagg

SEQ ID NO: 60054 - DNA, 1035 bp, Bovine  19866880534007
  misc_feature (1)..(1): n is a, c, g, or t
ntggggttgcaaagagttgcacatgactgagtgagtaacactttcacaaaggagactacctaaactgaagatatacagccaagagcattggaaacaaagcaaaaaagcaaaaaaaaaaaaaaaggcatcgatgtatattctttctgaagagcaggcaaaaaggcttcaaggaagaaggaaccctgaccaggtctgtcactggcctcacaggcaagggaggaggcttgttttcagcagcaggagcaagtccatgagtgccctctctgatcttcagggactttctatcaaggccagacacccaataaaaactgatcctacacatgagtatccacaggtaccactcaccaaacctttgtcagagctcagttagactattccttccttttgcagaggttgctcataaggaagatcaacagttgaaacaagaagttagaacttccaccatgcattccattgattcccgagctctctagacccctgcttcactttaacgcctcacagttctttgcaacagcaccactgtactgtctgagcctcataagacactcaacagccagactgaacaaaatctacaagcaagcctttactatatctccacagaagcagccttagaagttggtacaaaggttttaaagcaacaggggcatgttcgaaccacccctaattttaaattgtgggtttgataaagattcagcggctattcttctaccctggctcctttcttcatttgacagtgcccacaaacagacgtaactacggccaaggacttccagggaaagctgtagaggggctgcgcgcacagggatcttattagaagacattttcatcaggcaaataagaacctgagtgatgatgccaaaccaactgcttgcaagacatattccccactcactccttaattaccttttcataaagctgacagcatttaaacatttcttggggatttgagagtaaaaagaaaaacttgttatctttttaaacggaaggaaaagctgtctcgaacaggggactgctgaattttaccaaaatgaggca

SEQ ID NO: 60055 - DNA, 1240 bp, Bovine  19866880555610
  misc_feature (1)..(1): n is a, c, g, or t
naagagtagctactgttgggttactgtgataataaaaattgtaatgtaggataagtggctagtggctaaaacatagtaagttttaaattattattagctattatttttaacatttaaataaccctcgactgtgaattgagagcccttgagtcaatttgctgcacaggtcaagtctttcatttatttgcttgaacaggcagtgtatttttctgtttttcaacaggctcactaataataatcattacttttgcactaaggacctgaggactggccctactttccagaactgggatagctatgatcatctgcaggttggatttgacttgtattcaaattatacaaataagaaatataatgtgcagttattatagtacatcttatttgataaatgtccaacatatggcagtaagtttggaaatacaggtcctggcctctcatggacattctagtaagtaaaaggtaggaaaaaatgtaaagccatctggttctcgtgtgtcgcaagccactaactcacatcacaggtttatttagtcatggtggattcagactccagctctcgggaattcagttcttcagaggtcacctcagtcctgcggtcatatgctggctcgcatgatcacagtacacaagtccccacagctttcctgctcagccctggagcacggtattcttcccaggatcgctggctactattcttagtcaccagcaattttgcttttatgctcattctcttgtccatttaaaaaacacatgattgtgagtcaaagctagagacaacagacatgttaggggaactggggctgggagctctcaacccagtgattaagtttttagatcatgctgatacattatgaattccgccttttaaatatagaccagtttcatttgatatgaattgggctgactcaggctaggaatgctaaacaggtcacctaattgtggtgaaatgtgcagcctgaataagagattctggatggacccaaagacggagagggttgctctgagcttctagacactgggcataatgggaaaagtgaaaaggaactccccttccacttctgtctcagtttttctgaggttatgttttttttttttttttatggcttagttttgagaacatcttgaatgatatggtcttatgacagatatgagacttgtagactttcataaaagtaatgctaacacctagtgttgggcccaataaaaccgattttagattcagcacacagacactttacat

SEQ ID NO: 60056 - DNA, 1614 bp, Bovine  19866880568204
  misc_feature (1)..(1): n is a, c, g, or t
ntggcccccaagatagtggggatgcttcactctgtctttggtcttgagagtattctctgcatggctgattttctggttctgagctaaattatagcaaaagcaatcttaaactgagtgtacatcttccattcttaccaattttattagtaaaagtagcagtctgtaataagatccagtttgctcatctgccaggaaagcacatcatgctttcttttcttcagcaagacattaacctgcatccaagtaaacatcttaatgttccccttttctacctcttctgtttgagaaggactcattcattcattaatttgttcatttcatattcatcaagcacctctttggtgctgttccaggtgttgaggatacaatataagacaggcagggctcttgcttttaaagatgttactgacaagccagtaaatggccacgtgaattgtgtgacttacgcagcactttcaaaactgatataaaccatagctacagatttttaaatctacaaagcactgagaaaccatcagtgtttcttttttctttttttcttactctctaggatacctcctgcttattggcatttagccctctgtgtattggtcttataccacagcctgccaaggttaaagttagaaaagagaagtagaagagataggattttaagtgattaaactttgttcatatactcactggcacttgttatggttttctttaagtcttggttaatacaaaagattatttcagaatgggaagggatttgaggaacatctagtcacagagccctttcactaagtaaggaagaatctgagacatggaaggaggcgagcaggagcagacctgggaggaaaactcagggttctaccctccacatcagcgtccccattcctctacctacacgtgcatgttgggaacagcccctttcccttccacggcctccctcctgtcgtttatactttcttcaagcaaaaccatgagctaaaggtcacacagattttaaaatcccactgccttcccccagaggaaaaattcccttcttgaatgacatagaaaggcaaggaaaagcacgttatattgttgctgcttcccgctaatgcttcttgattccctgtggattccggaaatgtgagccactgctgcttctcttcctctacctcctcttcctcctcattttggagaataacgtactatgaccacgtgtaagccttaagtcacggcgatgctctcctttgggtagttttctatccactcgccattacagaagggagccagactgctgcacaagagggatgtgggttggaaacctcgggtttatctgccacttactgctgtgtggccctggtaagtcactcgacctctctaaagttcatcttctttggtgaaatggagataataataccaatctcgtaaagttatttatgagtgtagtagatgctgtattcggagaaggcaatggcaagccattccagtgttcttgcctggagaatcccagggacgggggagcctgatgggctgccgtctatggggtcacacagagtcagacacgactgaagtgacttagcagcagcagcagcagatgctgtattaggggcagccatggtcaagaataatgataatgaccatctg

SEQ ID NO: 60057 - DNA, 2723 bp, Bovine  19866880570954
  misc_feature (1)..(1): n is a, c, g, or t
nccttggaagaaaagttatgacaaacccagacagtgtattaaaaagcagagatatcactttgccaaaaaaggtctacataggcaaagctgtggtttttccagtagccatgtatggatgtgagagttgggccataaggaaggctgagcactgatgcttttgagcacattggaatgtattctcatcttcaattgtcactaaaaaagaataaattaagaaatgtctttatttgatgatactgcagctccttgcttttaaaagatcatttcctttgttaatgttcaagtcgcctgtaacttccatagcactagagccattagcatcagagcagagtggaaaacacacttggttttgatcttccctcccagtccctcatatccttagctctttcccaagcagaaatttctgtgagcagaaactgccagcaatttaacatgtaacaacatacataagagctcatagtgatttgaacagcgtaagccagaaacatccatagtattgctcttgtaaattctagtttaacagagctgttttctgttgaagtggtacttgggctctatttgttccaagtatcttgtcttaatttttgtcctcatcacctgtgttagtgaaggactagaaaacggctttagtgtaactaacaaaacttaattttctatcttactttattggtgggcccaataagacattacataagctttcagggactccttcttagaatttgttctcaattatttactcattatttaaattaagatcaaacaaatctaaacttttacctccaaaagctaccctctgagcctttggcaaattgtggcacaaagataaagggcctttatagttgtcacctgcagtcaagacatcatgaatcatggaatatgatagaaggtaatacacatcaattaaagagagattaaagacacgctgtaccttgttccaaatttcctttgtgatgagaaaatggttgtttaatgaggaaggttattttatggcttctaacaagtgagcaagccaatgtcattttgccatcattatctaatttaaccacgaaaaggatgaagtataatagtacactgatttgcagcattttctcattgccttgattcaaatgagataagatgatgatataggcacttggaaccctaaaggcactaataaatacaaaattctctatcaaaatgaggcagagagcaagtctgcatattccagatccatctcttgctaaagccgtccaccaagactttggctgagtaatctatgtaagacacaaatcggattccattctcccatacttgaaatgattctgtgacacctggcaatctttaggttacacttatacatttttatagggtggctgatatcaggattctgcctacatctctagcctcatcttctactaccgcccagtccccaatcccactacttcagccttacttagtaatgctggtgatttcttaagaacaatgtactgtcagatgtctgtaagcatttgcagcactgtccccaagtcccagaatgctactcatacctattcctcaaccctaaaatacacctccaaatgtgtcttttgaaagacttctatccatacctccattgcttacattttattatgcttgcgtcttgacccttttaattctcaactacactatcagatcagatcagatcagttgctcagtcatgtccgactcttcgagaccccatgaatcgcagcacaccaggcctccctgtccatcaccaactcccagagttcactcagactcacgtccatcgagtcagtgatgccatccagccatctcatcctctgttgtccccttctcctcctgcccccaatccctcccagcatcagtcttttccaatgagtcaactcttcgcatgaggtggccaaagtactggagtttcagctttagcatcagtccttccaaagaaatcgggctcctctaagtcagcgtgtaccctttctttctctgtatgcccacagttggtactaggtctatgctcgataagacagcatggaatagggacttcccttggtggttcagtggctaggactccatgctcccaatgcagggggctgggtttgattcctggtcgggaactagatcctgcatgccactactagaacctggtgcagccaaataaataaataaaaccctgcatcaaataaatgggtttttcagtctggatgtagtcagatagtagcttcagaagattctgtttttcctctccccagttgtgtgtggttttaaaaattttatttatttacctttaattgaagtataatttatttatgatattatgctagtttcaggtatacagtatagtgattcagtatttttgcaaattatattccattacagattattacaagataacaggtataattccctgtgctacacagtatatgcttattccttatctattttacatatataggataaggaaatgtgttataaatatatacgatggaatatttttaaaattactcagctataaaaggaatgaaacgctgacatctgcagcaatttggatgaacctagagagtattttgctaagtgaaataaggcagacagagaaagacagacactataaggtatcacatatttgtagaatctaaaaactaatacatatgaatgtatatgcaaaccagaaatagactcacagacgcaaaaaaagaaaacttgtggttagcaaaagggagagggaaggggagacaaattagggatat

SEQ ID NO: 60058 - DNA, 767 bp, Bovine  19866880585181
  misc_feature (1)..(1): n is a, c, g, or t
naaaattgaaagctagcttgacctggagaagtaaggtcaagcacatacgatgccactgttattctgtctgcgtctccagcctaccttgagggaataaccattggggaggtggctagtggctgcttctgtcctgggaatttgtaggttcccttggagtgatttggcatagctgtaaaatttggcatagctgtttaggatgcaaagaaatgaattttggctcaggacacacatgttaaacaggatagtggcttttattggaaataaggcagaaaagaaacactaaaatagaaatcagagaaaaaatttttaaaaggtatgagactgggatgcaattagaaatctgagaaacagctggcttataaagattgtaggaatgattacattgctgaataatattctgtgagtgaataaaaccaacagtttaaaaagggagaggggagggatatgatccaggagcaacttaaaagccaataaaggtaattacgaataaatgttcaaacatggcatagaatttcagccactgagttttgcagaagctttgttagcacctcaaaccttagaaatatttggcttgccatcttcgaatgtatgataataaatatgagttgaggaaagcagtattcctgcctcccgaccttgatgaatagccagtgaggattataggaagagaagtgtatttgctcgtgaatttttcatatgaaagcagcctgccttgtgctttatacttgagcagcacctgtgccgtagttgtgtcgttgcccatattt

SEQ ID NO: 60059 - DNA, 1158 bp, Bovine  19866880592671
  misc_feature (1)..(1): n is a, c, g, or t
ncccaggcgaccactttgtgcctgtgaatttaaccactttaggtagcttgtaaaggcagaattacacacatctttttgtgactgacttatttcacccagcttagggtcctcaagtttatccatgttgcagcatatgtcataatttcctccctttcaaaggatgaagaacaattcattgtacgtttggatcacatttagcttatccactcatcatcagtggacatttgggttgcctcttttagctattgtgaatgatgctatcaacatgggtgtactaattatctctttgaagcccagttttcaattattttgggtatatacccaggagcagaattgctggatcatatggtagttctttttttaatttttttgaggaactaccatactgtttccacagaagatgcactgctttatatttttaccaatagtgcaaaagtgttccagcttctccccatccatgcccatacttgttactttctttttccttcttcgttttttaaaaaataccctaatgggtgtggtgggagcaaacatttttagttgtcacaacttggggcatctaataagtagaggtcagcaatattgttaaacatcctactatacacaggatggttctatgccacaaagaatggactggaccaaaatgcagatagtgcccaggttgagaaatcctgatctgaacaatcaggttcatctttcatagcaaatctcacctctcctgacatgtgcaccttctctattcctttgctgagatgctcaaaggcaaagacttccaaaaacctagaaagtaatggaagactgagaagaacggcaacatttcgtttattcaaattttattggaagtttacaaatgtattacagacatcagtaaaacatcatatccatttcacagggcacggatctcaagcaaagtgttcacaacagtctctggcagagcccacaccaaaggtccactgcagaccttctaaacaaatagcttgacacccgacacacaacacagactctggtgtgccttaccttctcaggccctttgaggttttgtttacgcgcttggaattaaagcagaagatggacaaaatgatcctgtataggaaagaatgcgtttcggagcaggagaactgccgaggtcctcatctgctagggaaaaaggaggaccca

SEQ ID NO: 60060 - DNA, 2176 bp, Bovine  19866880609486
  misc_feature (1)..(1): n is a, c, g, or t
nctttttggagccttggtttctctcttactaaatggaattaataatatctagctgtgtaactgctgcaaggattaacaaggtatggaaagcatccttcacatcaactagaatatggtaagtgttcaacctatgatacctaccatctttgccatacattcacacaagcacaaaactatttcagacacgtagacacccataacatacattgacatatatactaacagctaccctgaaaaatatctgacctggtgaccacagaaaatacagctgtttctcagttgagtcctggaactttcacgaacaagaatctctgaggactcaaaactgatgaatggatgccaagaaaagagctggaaaaatggcatcctgcccagttgaaatgaaatgctaagaattcttgtcccagttaattttaaccctggatggggctggatcctatttgtaaggtttgatatttaaaaaccaagaaggggtgggggagctgaagtcaatggtgctcccagtgcaagacaaatggagacaactcaaatccccatctaccgtgagacaggcacagagctgactgtaaaaggtgccccaccttggttccatctctgcctcccatcccaggttccctccagtgccccaagatggtttatacacgaatgccagaaccaggaagaacaggggttctcagaaatcaccactatcccttcttcctagaggtcatcccactgtcctgagtgaccgactctggttacgctttctccaacaaggccagcagtcctgactcccctgaggtctccacttccaaccagtgatgcttctggattctgtgctccaggcagtgttttgcattctcttccatgtcagctctcatgaaacttgagtcttcagttcaactgacttgatcctgatggactttacaaccaaatatgtgctgaagtacaggccacacacccaccaaggaggcaggctggctcgtactgtactaaaaactgtgctctcttgaataaatgcacttttaaaaataggccatggtgctctggtggaaaacacttgctgtgctgagccccgtatagggttttagaatctaacatggcaaatggttgcattacggattctgtgggtttcccccatggctcagtggtaaagaatccagctgcaaggcaggaaatgcagcagattcggcttcaagccctgggtgggggaagatcccctggaggaggacatggcaaccctcttcagttttcttgcctaaaaaatcccatggacagaggagcctggtgagctacggtccatgggattgcagcgaattggacacgactgagcaactgagcacatcatagacctaaagaaaatttaagtagacaaatatttcttagataggatacccacaccccttattaaaaaacaaaaaaaaacccaacaactgccctttactgtaagaaaaaaaaactgttgtgaaaacaaaaaggcaagctgtatactgggacaaaatattcacataatatattatatctgacaaaagagttgtatccaaaatatataaagaacccattcaacttaataataagaagaccagtgggctgaagatttggataggcatttcaccacagaatacataagaatagccaagaagcatatgcaaagatgctcaacattaatggtcatgaaacgcaaattaaaacgacaagacacaaatacacccatcagagtggccaatatgaataagactgataatacccagtgttggtaaggatggagagtaagtggaactcttatactcagttgctgggaacatgaaatgcaaaattttgaaaacaccttggcagttctttataaagttaaacatgttctttataaagttagacactcccctcttatttaagaaaatgaaaagcatatttataatagttttactcacaaaactcaatagaaataacacaggtggaagaacatgttatattttcgtatcagtgaacactactcttagaatgtaatacaagtcatcagtaaaaaaaccccacaatactactgatatattcaataacatgaatgcatctcaaaattattatctaagtagaagaagccaattagaaaagggtacatatactgcatgatttcattcacaacattccagaaaatgacagcaaatctacagtgacagagcagatcaatgactgttaggctaga

SEQ ID NO: 60061 - DNA, 1768 bp, Bovine  19866880631694
  misc_feature (1)..(1): n is a, c, g, or t
ngacagttctttaaatttgaagaaaatttaggtttaggaaaaactcattgcattttctttctttttcacgtttccttgtggactttttgaagatcgctgtgtattttgatatttgataatcactgctttaaattagcttcccaaaatgtctctcttgtagccctgcttctgtgtgctgttattagaaggtgttatggagaaaataggattccatgcgggaaacttgcaaatggtagctttaagtagaggctatactgagaactccagtcgagagttaaaccaacctgggttcaaatctcagctccactagaggagtcacttgagaaaaactttcatagctttgctcagcctcagttgacctacctgtgaagtgggaatcgtagcagcactttatagtgactgggaagatgaaatgatgtaatagcgtttcagccttttgtatgttatctggcagagtaactgttcaataagcattacttgctagtgttgttaattttatcaatcatgaaagcgcagtgttgggagcatgcctcaaatcaagtggttagccaggactctcaggagagcagcaggaagcaaaatgccaggttttcatttgcaggcagtctgtaggcatgagaagaaacctcagagtgctcaggacaacagcgtgagcgtagcaagtgaaccccagctcccagctttcatgaatgtgagtgaaaatgagaagtggacactgacattgcttatttctgctgttagtcgtctctttttggacttgtggagagaagcccggtgtggggtttgactttgttctgttgtataaaaccgtgcttgcttctttcctggaagcccgtagttgctgtctcttcttggaatgctttgcagagttctttctgcaagaaaggtaggcaagaaaggtgagttacagccaccagaataaagccctcctaggttgggaaatgggtcagagataactgaggctgctacttttaagattttgtgtttgcttagtggtagtcatggggttttctgtctgatgaaggaattttaaaattgccttttcaatgcttggaaatttccatttaaatttgaagcagttctccatataaatcaccttattctctttggaaactgtatctgcagatacattttaatggaggaggggagtattattgaagttaatacatattcattgtacagattttactaataattttactaatttttttccatactaatgatagtatgaaatgtgaaagccatcattctctgtaatctcattctaggccaatttttaaatcttcagttacaggatttggacttgggacaattcatacctgatcaaggacatccatgtaactgcttagggctcttggtaacaggcagggctcctctttgccagcctagtcgtcccaattcctgtcagagtgggcaggcctcaggatatcttgtccagcagtgattcctgccttgagactcctctggctgttttgccttcgttcatttgctttatccctcagacatttgacaggcacgttctctgtgcttcttaatggggttagagtccgagggtgtagctcggtggagtgaaggcacagtcctgactggcaggcggttgcttagcaagtggtgatagaattaacctgctaagtggtaggttctctcctgggtattggggtagagtgacacacatcagaaacagcccctaaccttgagtgaagtgagacccagtcaatacacagatgtttcacaagaagattgagtgctgttacatcaataaagtagg

SEQ ID NO: 60062 - DNA, 1891 bp, Bovine  19866880637953
  misc_feature (1)..(1): n is a, c, g, or t
ncattctatagatgaggaaaaatgactgcatcaaggtaaaataacttgttccaatcataaatatagccagagagcagccggagagctggatcaggtaccatatgcatctgatagcacagccacggattttaatcactctgcttgggaaggaccacccactgaccatatttcagcagagctatttctcatgtcatattcaccatccggatgaattactgatttccacacagcagtggggtccaggcaaggatggatgcttcaaaaccacgcaagtccaacttcaaaatggacttacacagtttcagtcgactgtctgcctcaaatgacatgaacagagttgccaagtggttgacaaaattagtcagttgacatttcagctcttctctctgcttgcctctccatccaaggctatgatacttgcaatgatttacaaaatgatggaaaaggaggcagggaacaaaaaagaggctgaagtgttcaacatcttaaccatcaaaacttgagaaatcataacttacttcctttcctctaccaaatactcaatgccaatgaggatgaagacaccatttcttattcctgacaccctttggcaagaatcagaaaggaggtttcctagaaacccaggatttcatggaagaaatgaaaagtcatcattgagcttggctagttaatatttacagtccatcttaagttgctgctagacttttttggtagctttatggaaattagaaaaagacaccctcctgtcaaccccaactacaagttagaaaaagcaagctcccaatctcagaaggggagtgttgtatcacaaccaggtaaactgcaaggtgctctaggttaaataaaatttcctactctggttagtgggcttctcaggtggctctagtggtaaagaacctgcctgctgatgcagatccgggttcgatccctgagtggggaagatcccctggagtggggcatggcaacccattccagtattcttgtttggaggatcccatgcacagagaagcctggcaggctacagcccacagggttgaaaaagagtcggacacgagagaagtgacttagcacacatgcacacataccctctggtctgtagtcatagagcccagctgaattagccttcaccaccgccttggccaggcacctttgtgtggcacacaaactagacaactgcacgtggcagccctcatcctctaccaagcggaaaggttacagatttatctttttggcgcaggaaatataggttcagacatcacctgaataattagcttcccttagcaagataggatcactgagttttaatcagtctttctaattgtcagagcaataaccaccacactatttatcgagggccaactgtatgtcaggcactgtctcagagcatttagagacgaagcaaagagccagtctgtggaactgattttttagtgccatccatctggatgttgatgagtttctgtcccaaatctctgtttttattgtgcataattaatattgagcaattctttctgacagtacttggccaaagggctcagttacttgctaaggcaaccaagcaacattaggaagactccaacactggcattcaaggatgcttgccttcctgcttgctaaagagcaacttcattcattcactttattaaagtatttgatatagaataacttcacatatttaaagtatacaacttgataggttttgacatagacacagatccacaaaaccatcagcatgatcaagatcctgaaatatctattaccttcaaaagtttcctctgctcatttgtttcttcctcccactctctccattcacctcttcagccccaagtaaccactggtctgctttctgtcactacagactagtttaaaattttgagagttttatataaat

SEQ ID NO: 60063 - DNA, 1784 bp, Bovine  19866880654007
  misc_feature (1)..(1): n is a, c, g, or t
ncgtaataaggagcctgtctgagagagagcaagagggtgtgacttaggcgtgggcccccctctcctgccctacagtgcttacccccatcttcttcctcccacacaagctgtgaggtcgtccgccggacccctgcccattagcaggaaagggctgggcaccacgaggtgcttgctactgggaggccaacatcaggaccaggcctgtcaccgccgccctctcctagggccggggatagggcaacccttggtctgcctctcggtggctgctgtactgagagaaagggcgagcttgtttacagccacaaacacctcagacccgtgcacttaaggctatagcgtccgctgccatcactactgggaagggcaaaaggaaccgatgccaagtttaccctccaccggcaatgctaacgtccccgagaccagtcgctaatgacaataagccctgtctctggctcggtgctcaacaactcgggatacccccaacctggtcccaaggcgggaggcgcacagagccgcacaccactctgaaagcctggaggtgctgagaaaatgaaagccccgaggtgcggataagccaggtctgatctcggggtccccgtcggggtaaacccctcaggctggggagcgcggggccgcccgggcctaggccgctgactcggcgctcccgcgggcctcactgttatcgcggacggctgccatcagctcgtcgcggaccgccgcgtccccgcggtgctcgggcaggctgagcaggaagcgcagctgcgcgatgcgcaggtccgggttcttgggcagaccctcctcttccaggttctccagcggcatcgcggcggcgacagcagcggttccgaacagacggcaactcacagccgacaactcagccgagaccggcgacggcggcggcgacggcggaagtaggaggagaccccgactgcaccgggacgcctccagcccggcttccggtcccagctccgcctccgcccgcagcgccccctgctggacactcccgtatatgcccaccccggccccgcggttttccccgcctctcagttaggagagtcccagggagggtggtccccacctccaaagttggatttcctgaacctctttctccctccattttttagctatttcactttccaatccgtttgtgattaatagaggctggcaatcttgaggattttgaaaatataataataacaacaaccagtaaccaccacaacaaaaaacgactgcagttgtctaggccctactcttccccttttacctttcttcttatacccatttcttaaaagatatggaagcatagttgctgtacaatattatataagctttaaaggttatactccatttacagtgggcttcccgggtggctcaacgataaagaatccacctgcaatgcaggagatgtgggtttgatccctgggttggaaagatcccctgaaggaggaaatggcaacccactccagtattcttgcctgggaaatcccactgacagaggagcctggcggctgcagtccattggatggcaagagagtcaaacgtgacttagcaattaaacaacaactccatttatagttattatttttaaaaaataggctgtattccccatgttgtacaacagatccttgtagcttattttatatctagtggtctgtccctctcactcccctctcctgaaacgcccttcaattctcttccccactggtaaccactagtttgttctctttatatctgtgaagactttcacttttatgaggaactcattttaattctcttaacactag

SEQ ID NO: 60064 - DNA, 2991 bp, Bovine  19866880724906
  misc_feature (1)..(1): n is a, c, g, or t
ncttccttttccttttctttctccttcttatccccctgtttctccaggatcatagttaattaaccaatacctaccctataatgaatccagtcctatagtccctggagatatggagtatttgctatggtcttcagctgtaagaaggttgtctcttgttatgatgatatagtgaatacatataaagcaaaaaaaaaaaaaaaagataatttaatattaagttatatgtgtggtgctttccttgttaaaagaagaatatgcaggactagagcattcgggggagcttcctgaaggggtgagatatacctgagtctgtgaagaatgactaggattttagagggtgaaggcttaacagtgagcatctggggcagatggttcccagtgaagacatgggaaactttacagagatggaattaagtccagtgtaactactgggtaaaggttgtctctcttgaccacatcatgtagatgctctagactcggacaatcttcaagaattatctgattccaactcatgcgttctccactgaggtgatgtccttgatagccgtccaaacaagtacctatctgggtggagaatagaaatactcccagaaaatgagcagtcagactacattcatagcaccttttgggaaatgactcccagatgatgctccaaagcagaaccgtctgtcctaggataagtagagctgtcacacgtgtacattatctgaactagtggatgtttatgaggaaagtattacctttaagactatccatctaaagcattttcttccccctccttaaaagataaaacagatacacaggccaagagatgattgcaaaagacacagtagttgcaaaactccagtgtcatgaccttgatgaacctcctgatacaatacattatgctctgagcttgcggccaattggttctggaaaactctttgagcaagtgccaactgctggaaatttcatccaggtgagcaccaggtgctgcttctccagggattttcccgaggagatggagtcatttcatggccacagtgtggttggtgtgggtgcattcagcagtgggagctgggacacagcagagaagggtctggaaggcattcgggcaagtccttcagtattttgataccggacaccatcatcttaccattagcacaaaataattgacttcctgtttagctgcggaaatgaatcagaggctaaaatagatgctgattttctcaaagtctgtttgactacatgggtgatgatggctcatccttctggcattgggagtgagagatcagcttctttctccacccttaagaggtcataaagtttccactgacagaggggggacatagtaagtttttttttccccctttgcaagatcgagttgtgctttgggagaatcctccttctaacttctaatttccacagctctattattttttctattccctcaaagttccaacccctaaaaaaaaaatactgatcccggttaggttggcataattgttgcttaaccaaagcatcaccaaacactccttctcagccaaaagacatggctgagaaagccactgatgatctttctcatttttgggtccaaacccaccctaaattttctggaaaactccacaagttacaagtttagcgtttgcatatgttatgaatttttaagattagccactgagccaagaggtttcctgagttgatgttcattttgaaatgcaatgcaaaactatcattttaaaaagagaatttggagaaagatggcagttttgtaaacacaatgctaacatttgagcctttccatatgcttgctctgcttctcaacaactccttccacctgttgcccacctctcattaatttctatattttcataattatcctttgggtcttaaatgtcattcattcctgaaagctttcttttactatttgaacctgctaagttctctaacatatgtttttgagtcgtttatttctgtgtttcaatacctttcatagtgcttggtgcatactgggtactcagtataacttaatgaatgaatgaatgatttattgaatgagatactcagtttaaaaatgtagttaaaacatttttaacctgggtcccaaacacctaggtacttgatgtcatgttggccaattccaattaatgccagctgagattcatgccaatactattacatgaggactgtcttcaagtctctgttgtgggatcatattgtttattgctatatccctaatacctacaattgtacttggcacttaattaatactcagtaaatattttttaaatggtgagtgacttgtcataataggagtagctatatttattagtatgctttatcacttccaaagtgctttcaaaacattttctcttttaaaatatttcgctcaagatcatacaattagcatgcgataaagacaggccatgacccatgcttcccttctactatgctaggatgctttctccaaaaataagctactttggaagatcaaagatgtccctttgttccaccaaaatgcctacttctgtgtgtcagttttgaccagtctcaagaatattctaatgctatcattattaaatgaaaatggctgtgccctttcattttccagaatgatctattacttaaaatatgtacattaaacaaaaagtcaataattttctctgaaataatgttgttctgcaaggttgtaaaagaattggattatgaggacccagacatagttccagctggccatatctatgaaatgacaatttcagtatttgatgacttacatcccttccgtacaggtaagcttgataaatttcatggaacattaagtgtcttttctttagactgtgcactttagattttaaaatgtaaaacttcattatattggggacagtttcgttaaactagacaaaggagaaaggggagacttagattcatgttggaagttatcattaggtctgcgagtgttgttcatctcttagcacaccttatgcaaaacacaattcttaaatgcaagtcggc

SEQ ID NO: 60065 - DNA, 1693 bp, Bovine  19866880728422
  misc_feature (1)..(1): n is a, c, g, or t
ngaactgtgcagctccgccgagaaatactaataactgtcggcggagctgctggtggtgccgaagtcgctgttgcagtgctcgcatcctccgcatgctaatgaagccgtgacgtcagcaagtcagtcacggcatctggatgtcccgtcccctctgcccagcgctgagatttatttacatgtaaattagcctcgccttccaaatcaataatccccaagccaggaaggacgaagaaagcctttgctggatgcaaacgccccagcaacacaacctccaaaggggtacaaaaatatcacataggagaagagaggctttaaagatgcacacctttttttgttgttgttttttaaagactgtgctcttatgtgccagggaccagatctgggcacagttatgaacctgagcgcctgtttcagattatgtgctgcatcaacgcagggtgcaatcagagctctcccccaaccccaattgtctctactttctttttctttcttttctctctccaactttcatttcagagaattttctggcttggggctatgtcatccttgaatgtttgtgcaccttgagataaaacacaaatgactgctttcctcaagtgcctggctgttggactggccactctgtcaagcctgaccccagcgccaagtaagtatgggagatgacaaaccagaaagcttcccagacgcttctgagggccgctggaacctcagaaagcacaactttcatctctccacttttcacactaggaaagtgaggttctggatggagaagcagcttttccagggccacagagggattccagcaaggatgggccagaatacacatttcctggactttagtctacagctctgttaaagacctttgggtcttcaatctccatctttttgtaccaacaaagaggcctatctaaacagtcaggaagaaagaattttatagtattggatagccctgggtttaaatcctgactttgcttcctgctagactttgcttccacacttagggtctacagtttcttcatctgtaccatccttttattcaataaatattttctgagtacctacgctgtgccatgaatatgttttttaaaactttatagtatgtatgtgaatagtgtatgtatgggtataggtacatgtttgctctaattcaataaagtaaaaatactgagtggaaatgtggcaaggactaacacaattaccagcaacggtaaatatggagaagtaaagtgaaagtctctcagttgtgtccgactctttgtgaccccatggactgtagcctgccaggctcctttgtgcatggaattctccaggcaagactacatgagtgggtagctgttcccttctccaggggatttcccaacccaggaatctaaccagggtctcctgcattgcaggtggattctttaacagctgagtgaccagggaagtctaaatatggagaaggaaatggcaactcacttcagtattcttgcctgaaaaaccccatggacagagaagcctggcaggttctagttcatggggttgcaaggagatggacatgactgagtgaccaagcacaacagtaagtaacagttatttctgatattttgggtaaagtaaaaaaaaaacaaaaaaaaacaagcactaagcttttccttccactgggctggccattgtatctcttctctgagtatccctagtcctcttttattgt

SEQ ID NO: 60066 - DNA, 1419 bp, Bovine  19866880766343
  misc_feature (1)..(1): n is a, c, g, or t
nctggaagaggcaagaaaataatgttcctctggagcctccagagggaagagggcactgccagcacttcaattttaaaattgtagcttccagaactgtgagagaatcaagttctgttgttttaagccaccatttattggcaatttgctatggaagccttcagcaaactaatacaatcattattaaacctcaggagaaaagaacatctccaagtttggaagcaagttgatcttgacccaatagagatctggaaccctctggttccagagtcattcccccctgaaagcagccctttttagcttcctcccaaacaaccctcatcttatggtcaccacctcggacattctttcttggccatgtctgagtggtaaacagtttgcctacagtgcaggagacctgggtttgatccctgggtcgggaagatccccaggagaaggaaatggcaacccactccagtattcttgcctggaaaatcctatggacaaaggagcctggcaggctacagtccatggggttgtcgaagagtcagacacaacttagtgaccaaacaacagctaccagtctgaaactgaaacccaaaacagctcaacagaagaaagtaaagactcatcttgccatgttccaatatttcttggtttgggcagagacagcttaagtactaattgatccattccagactttgaaaaggaagtttataaatgcgtcttctttttctcttcaaaaatgcaggtgatggcagatagagactcacatatctacttccatctgagcataattgatccagtgagagccttgctggagaggggacggcattttcccaggcaatctttggtctctcccctggtgaagaattatcatgccatctggaacaaggcaatatattcctttcacagaagttgtggagctaattatcaaccaattccaacatagactggcttagaaacatgcaatgaccatctctgtattccaagtcactcctctcagagcagccaattttgacttaatgaaacgattgctattttatacttaaatagtgcttacagttcaaaaagagctgccaaatgtagaatctcaactgttttatgttgtttctcacaacagaactatgagattgaaatgggccaggaatgacagtttacattttctaaaagaagaaaagcaaatttgtaagaggagatgtgacttgtccaagctccagacttcatatccactggagtcttccataccagcacctcctgaggatcaacccatttgagctacgtaagtaatttatgagcctgtttatcttcagggactctctcttgttgggaagtgaggtattcttgtactgaaaagaaatcttatgtgtgcacacgtgcaaaggggcataaatacatatgaaggctgatatttctgatcattcaagcatccattatcctctg

SEQ ID NO: 60067 - DNA, 1475 bp, Bovine  19866880805065
  misc_feature (1)..(1): n is a, c, g, or t
ncttgaaatggtcgcatgaggggtggaagtgcctccctgtggaaacctgagtgtgtgcctgagcctgtccccacgtgagccccttggttcagcacagtggaggagtgttccgagcaggtgccccagaatgcgcccagggccaggccgctgatccttagcaagtcctttctttggccaccttttcattaaagtgccaccatcttaaacaaagtaggcttaactctagaaacatgaggcctttctgtgttggaaaagcacactactgtccatgagtcccaccttccagatcacccacatgagcccaccttcttttatcacctcctgtccctgttattgtagagcacgttacctgtaatttcactgatcgccttagtaacccagttccaagtgacatttgaagaggaatgaaagaattcgcttaagttccacatacatcttgccttttttggggagaataggaggaccaggtgggaaggagaaaggttgtaagtgactttgattagacctggcagaaagctccatttgacatcgtgcggttcaggagagagaccccttcgctccaggcaccctggatctgcatctgtgtacccaagggctagtggtggcgcccagagctcccctggtggttttggatacatggttgtatctgagtcgaggcggctgattcccagacatatggtgtgatctgatcagtgctgcactttctgctcaccaaggcctccaggctgccctgctcagcaaggtgggagtgcccccattgaccctcctccagtctatgagtctccacaccctcccctgcctgccactgagccagcttctcggttatccagtgaggagggagaaggcgatgacaaagaagagtctgttgaaaaactggactgtcattattcaggtcatcatcctcagccagcatctgtaagttccacacccgcccccgtgccgaccctccccacgcagcagggacagggcagtgccgggggggcgtgccggggaccgcagcatgccctcatccatgcgggtcgccccgaggcggcatgctctctggcgggcgcatctgctgctgctcgcagtctcttccatgacgctcagggctaggcattgccacattcatgctttacagcccgcggtcctcagtcagtgctgtctgtcccggccgctccttcccgggccgtgcaccctcagagtccgagagcccaagcgtttgctttctttttttgcagttttgcacatttgggagccggcagattggaagaggctattacgtgtttgactccaggtggaaccggcttcgctgcgccctcaacctcatggtggagaagcatctgaacgcgcagctgtggaagtgagtgcctgtccgccacctccggggcgggtggggccttggggctgcatcctcttcattgcttatggggctgatttaaggaaggtcatcatctctctgataacataagggcttgcccagcccggaggaaggg

SEQ ID NO: 60068 - DNA, 728 bp, Bovine  19866880834996
  misc_feature (1)..(1): n is a, c, g, or t
ntctctgcccttcagttcagtgattcatcatatcacaagactcctcaagatctttctttcaagaaaagctattagcctaaaaatgaaacttcgagagcttcctttctgactaaacaggtttttatagaaatccaaggaagaaaataataaaaccaactctgtgggcaagtcaacatcccccgtctagagggagggggtgtgggagaagttttcaatcaccttttcccgagacatcctaaatcatcttctctttcagaaacaatattagttcaggtatcgcctcttttcaaccaacatcttcagctcccaggctgacagcatccttttttcttaacccgccgagaacactcctggttaaatctccaggctgtcaggtcttaagtttgaaaagatacgtgatgggtgggaattctccctccagctcagggaccaccaacactcaaaatctgacaaaaaggcgaacagtaacatttaaatgtttcatacctgttttttttttaaattttattttctgtaagtactctctgcttatgattctctaataatagaataagggaacagtctgaagccttcaggacttgaacatgaaaatgtggtggggtgggttagctctaagaagctttaacaaaggaagagaagcgaaggtgtttcgttgggtgacaaggtatctgggagtagtcttgccactgctgtttgctgaggcttggagccggggcttcccaggggct

SEQ ID NO: 60069 - DNA, 949 bp, Bovine  19866880855448
  misc_feature (1)..(1): n is a, c, g, or t
nattctccaggcaagaacactggagtgggttgccatttccttctccaatgcatgaaagtgagaagtgaaagtgaagtcgctcagttgtgtccgactcttagagaccccatggactgcagcccaccaaggctcctccatccatgggattttccagagtctgagcctctacctaatccaccactatctccccaaatgatgtaaaatggtgtaaaatatctttaggggatgtggggttattttcattttaatgatggaccattaacttataaggtaacctttactttaatgctagagatactatttttgcatttattgaaatgacagaaataaaatgagtcaacttaaaaagtatggaggaagcaatggcgtaggtggtacacagacaagcacatgcatggcagtgtacacagaagttgtgcttctttgaatagttgtatattctgtgcctctcacagtcagaagtgaaggcccaaataatactctgaagtccaggtttcagagaagtatgaaatgttttctcaataactgaatgtgagacttgcctatggaaactcctctcactctccagaagcatgtccctggtgagccagaggactgggtgtcacttccctgggtcctaagtgttttatggaaactgagctgtttgctactgtaagaggcccaaagagaacagttgttttgcagcctcttccaaagtggatcagttgactgtgaattaagcacagccagttttagcagccccctcttagagacagacaatgagagtatgtgacacaaagctgtgatgacattaaagtatattaagtaatcattccagcaggatgctgaccaaccagaatgaacttgggcagcagtcacagctctggagtgggcttccagaagttctttgctatatcaaagtaatttatcccttaattgctggatggtgggacgccacagaatgacctgg

SEQ ID NO: 60070 - DNA, 856 bp, Bovine  19866880885887
  misc_feature (1)..(1): n is a, c, g, or t
nacccaccctaggcaaccccaggtgcacgatcaattgaccaaaaataaaatgaaaacattttaaatcatttaacattgtattttgccattaatttgcctaactatttatttaaagctgattattgtgtaatttttacactccatatattttggagcaaatctgacattatagtgacgcttaacagtaagaccatgaaatcctcaaaatccagcttattttctgtgtgttcgtcaagttcagaaaggaggtctttgtaccttgctttggtttcttgtccctgtaagaatgaaaagtaaaaagcctaattcattgtgctgccttggttttatagataataagcaatagtaaacatgttattaacaacatgtcaagttgctaccagccctactagtcaagcaatgtgttacatcttttcatgggttatctgagtgctcacagtgaccttattgaatacgcattattttcccactctacagtggaaggccagagactcagtgagaataaagtaatttgccccaaacttccctggtggctcagatggtaatagaatctgcctgcaacacaggagacctaggttcaatccctgtgtcaggaagatcccctgggagaagtgaatggctatccactacagtattcttgcctggagaaattcatggatgaacagcctggcaggctgcagtccatgcggtcatgaagactcagacatgactgagcaactaacaccacatcatcacagatagctatgagcgtggaaccaggattcattgcattggctacctgattctggagtcctcactcaaccgctaagctatattgctgctactgctaagttgcttcagtcgtgtccgactctgt

SEQ ID NO: 60071 - DNA, 1476 bp, Bovine  19866880950906
  misc_feature (1)..(1): n is a, c, g, or t
ntagtattctttaaaatcccctgtgacattaaactagagtgatttagaggtaaaagacccaaagataaatcctttaaattcagggtttaatggctgtaaagaaactacttttggcttttcatcttatattaagatgaaaatatttaccttacatacagtaaaatattattaatattaccatgcaatgaacttaagatggaaagataattatgtattaaaattacatatttagctcaaaatatttgatatgtagaggaaggcatcagagtactgaaaccacacacaccactactttttcttttaatgtctatcgagctctgaaaacataagacattgaacttgagttaaatatgatacctacgggctttctggttaccttgcattccccacagtcctcactgattaaagagaaatcatactgtgtgactgatatgaaactcacatgggtttggtgaagattaaacagataatgtctgtacaacaccggaagagtcgggtcctgatgagtgaataatattatagggatagttttgaaagtgaaatatctgggagaatgaaattaactcacatatcatccaggaacctggtcctataattaggatacatcaggacagagtgaggagagggaaatggaagtcctttagggatctgaaattctcttagtgttgcagagaaatgtaaagtcagatggaactttggaaatcttggaagtccacccaacaactccaccctaggtggtagacaggagcagttccagagttaggcaggcctgagcctgagtccaatttctagctgcctgacaccaagcaagatatttaacttctcccaacctcattcttacatccactaaatcaggactaattcactggctcattcagcagctgtttaatggtgtatttaccaggtgccagatgatgggaaacagaaaggtaaaaagttagagaaaagacaaagaaaaagtaggtccctgccacctctgaagtttaatgctggaagggggttgggacagaattaaaagaacatacaaataacataattacaaattgtgttctgggggacaccttccagaccagggtgttatatctgaggatgtcacatttatgctaagaccttgaagatgaaagcgagaaagccacaggcgatggagggtggtgtggagagaagccccagggactgagggcacagcttaagtgaaagcgctaaggaaggaaaggcttgacaagttcagggacccaatggaaggtcaatgtggcagctggatggtgaattgaggttgacagtaatctacctcacgtggatttgggtatgtcaactgagagaatacatgcaaagcatcaggctcagagttctcaataaaccattagagtgtgtctctcctcttccttctccttcccttaccctcccctatcaccacactgttgaagaaattgagaactacagaagaaaatccatttgccttaactcagcaagagcaga

SEQ ID NO: 60072 - DNA, 1606 bp, Bovine  19866880954642
  misc_feature (1)..(1): n is a, c, g, or t
nttgtttattgatttacctggtctaattgtgtaaagtctgtattctttgttatgtgtgagcttagttagctaagtattgcacagggagttccttaaatattttgaaccagtgagtctcccaggctttgccaagtggctctgggcatatgctgggacatcttcaatgctctagcaataatgtagacctctaccttaggcttcatttcctgcttgtatagaaactcaaaatcagccagaggtgagagattaaggttttctcaggtcattcctggacatgcagataaccctatacatgcatgctgttttcttctcttttttaaattgaagcatagttgatttaatacacatggttttctagattctcaggaatcttgaaaatgttggggcccttcaaaaccctcagttgacatctcatttagttttttggtcagactcaacttatatcactgccttagacaactgcaatgtacaatgattgctactttaaaaaaacaacaacaacaacaacaagtgccctagggatagggtacagaatgagctctgatacagacaaattgtgagaatggagctttttagggacccactagaaagttcaaacagtgacaattttctgggcacaaagctttagggaagctccaaacctattttttccagtctaataggttctaaactactggttttcacagctaccacagttgtgaggtttacaggttttccaagttactgtggagctcggcatggtatggtgtgtggcagcattaaaatagagttaggtaaaatacctcagagtttgcctgtatttacagagatttagttctttgttttgtataaatgctcaatagatcctacaagccattaatttttagaattctgaaaaagttaattttgtcaattcttgccagtgttaccactatttttatagaagaaaagattttgggaagtcctggaaatattctctggaatggaggataacattatcagacttattattttcaaccctactcaaagactgcagaacagaagggaagttcaggcttcaaaagtgagagggccagtcatttgcatttgcaatagtacaggtaagagatctgggcaccttggacttggagatcacagtaagatggcacagaaatgattcacagatatttagaaggaactgctgacatgacttggtaatgacctggatacaagggtggtgcagtgaatgatgccaagcttcctgtcttgtagaacaggatggatgggtgggaccagtctctgagactggaagagggccaggtttgagaatgaggaacatacactggcaacatttgaaatccaggtgcctctgagatttccaagaagataacaaggaagccatcatcttaaagactctcccccagttttagagaaatgttttataaaccaactcctaaaacattatttcctctatatgaagtgtgggggggaaggcaaggcttgtatactaaatgccaataattcaacgtcaccgaggaattaaaaatatggctccaagaatggtaagagccatgcacaaatgtctgaaactattcattgcttatgtgcaaagaaattaaagcttccccaaaggcagctttatttaaag

SEQ ID NO: 60073 - DNA, 2069 bp, Bovine  19866880970613
  misc_feature (1)..(1): n is a, c, g, or t
ngtgtatatgtctaccgctgctacagccttggtctgtttataggactgtttactctgctgtgtgcaggcaaaagtaccgttgccctggcaacagctgcctgatgcagggtccgtgctgcacggctgtataaatagggaatatttggataatatggtcagagcagagcacccagacactgtggtatgcatgatacacagagcacaccctttctctgctgcaggaaaagtatgttttacagaaaagtggatttaagggaaaaaaataaatcagggacaacattttaactacagcagtgataatactgcaggccacagtggtccccctttctgataaagcatggatgtctttttatggatttcagagggaaggagaagggaatggcaatcaaagctaaagaggacagaaagaggagaaaacagaggtgtgcatgccatggtgacagatgtattttctctcttccaagctgctgggcaaaaattttaagtggcagtttctggagaggcttttcagtctcactgaaaagggacagaagaaacagaaatactaacaagcagggggatggctgctgtatgcaaggtgtctgcgcgttctgcccctctcatccaggcaggcaccttcctgtagacccagagccacggtgagcgtgctgggtcagcacctcacaccacctctcctgatcgagtcccacccccagccccttgtccagatcaagacccgcctttcctcgttgttcagtcgctcagtcatgtctgattctctgcaatctcgtggactgcagcacaccaggcttgcctgtctttcaccatctctcagagtttgctcaaactcaagtccattgagtcgatgatgctatccaaccatctcatcctctgttgcccccctccctcctgttgcccatccaatctttcccagcatctgccttcagtctttcccagcatcagggtcttttccattgagtcagctctttgcatcaggtggccaaagtattatattccataagccctgatatatatctctatattacttttcttggcaaagcatcaagagatcttccactaagtaaggtatgctgattttaaattttcatgctattttggaagatgagtattaaaaaaattgaaatttggggcttgcctggcagtccagcagttgagactgtacttctgtcacagggagcatggattcattctctggtcaggtaactaagatcctgcatgctatgtggcatggctcccctcccctgaaaaattgaaatttgagggaatttctgtaaaagagttcctttattttgtctatggtttcagctacttgcccattaaagcttttagttgcattttccataaaactttttattcaaatgcattcttttaactcattcattcaaaaacattttgttacagtcttaggagtgttccaaaccttaatgctaagccatagggatgatacaagacaatagatctcagtgtgaagtaactcacagtgtggaatgggaaacggccacataatacatgatagaatgtgttacggaatgtactgcatgggatatgcaccgaggtttctagggaataacaaagccaccagagggtacctaacccagcatgtgggtgggagtgggagtgccaaagccgccttcttggaagagattacccctacactgaatcttaagggtaggcaggtgggtggcagaagaagggtggggcaggctccaaaagaaaagcttgcatgtgtgtactggagaaccaggaagctggtggttagcaatgttggagcatagggagtcagcagaaagcagctgaaacggacgccggaggagaagacaagggctgattcaaggagcgctttgaatgacctgtgaaggaactcggctctttatctcaacaatgaccaggagccacagagacaaatgggccttgccttttaactgtctcacttaggtagctgggaggaggatgggttgcaggatgaagcaatggcattccgttttcctccctgctcgctggtgaagatgctgaagaacagtgaattagccaaaagaaaagaaagcaaagtactcagacaacctacaaat

SEQ ID NO: 60074 - DNA, 1589 bp, Bovine  19866880991428
  misc_feature (1)..(1): n is a, c, g, or t
ntagtaaaaaaaaaaaaaaaaataagttgatgatgatctttaattacatgttctgtatcccaaattcagtgactttttaacagacctgatcttctggcctgtcctcaggaaaagctgaaaacctagagggtttttagtgtaggtggaggctgagggaccgaagagtcctccaagtgccaaagactccagcgccgagacaggcactgacacatccttttggctgggagggcaggttacatgccggagacacacagagaaaatggtaaagtcagctctcaggggagcctgctgagaaagccctggcccctggggtcatcagcatgtttgcctaaatctctttttctaggaaagtttgacgggtttgtttctcccttacaaagagaggaaaagccccaagacatgggagatccgcgggactctttcttcaagaataaatgtctctgcttgcaacgagaaactcctaggctgtggagtttcacgaagggtggagacagtgggaagcagattgagtcttgctgtgggaaccatctccccaggatgtgggaatgggcagatggtttgaggaatgggtgagttacccatgtgctttcccacccttcaggttcaccagtactacagctgtctgccagaagagaaagtcccctatgtcaacagtcctggagagaaacttcgaatcaagcaactattacaccagctgccaccgcatgacaatgaggtaaggggctagaggggccttcagaagcctttgcttagaactttcagcgaattattaactttttcgtcatcagaatgctgtggtcagtgagatccccgaggaaaaactcgggcaattaattttagattttagtttccttaattagaggtaaaagaagctgtcagacatcttctggagagggttactgaaaagcagaatcttactgtgggggttgatttgcctctgtgcctggtactatactaactactgggggcagagagcactgaaccttaaaaagttcaagtccaggttttcttagttgaaagagtaggcgatgccagtttcctgagcatgttagatgaaatgagattccctgggcagttcaagcccagcacaaacctttgtgactctcctttgattttcagcatcttttcttagtaaatgaagtgtggaggttttccatgttacactgctgtagaagttacgtgcccagatttgcagctgtgaacatctgtgtttttgttatttccaatccaggcttgccaaggttatcctttttactcctgaaagtatgacttgcagattgtctttttttctgaacccagacaagggcactctaagcaggcatttatcatctttgaagtcaaatttgatcctaaaaggaaatttgtgtatgtgtttttaaaaagtcatcatgcttgggaggtttaggtttgcaaactagaaattaatgttcaagtatctggtttttaaaagtagtgatcctatagaatccagttgtctacttaactctaattgtgttttaaagaaagccataatttcaaggtaaaaggagaaatttaaaactcctttagagagctggacccagctttttaccagctgcccccacccacga

SEQ ID NO: 60075 - DNA, 1951 bp, Bovine  19866880993757
  misc_feature (1)..(1): n is a, c, g, or t
nttgtaatcatttctacctgtattgttcagtggtatgaattacattcacagtgtgggataacctttacttctatttccaaattgttttcattctccccaaagagaaagtttgtaaccattaaacactgactccccactccccctgtctctggtgacctctattctactttctgtcttcctgaatctacctatggggcgaagtacctttatgaaccagaaagcagtagaaactagtcttaggtgaaaggacttaattttgtagacaagtgaagccatacaatgtttcggagcaagaaatacgatctgatctatatgtagcttccggagcttcatctggcagaagtttgtgggatgaatcggggtctggagaccagttgagaggctgttataaagctggggtaaggagcattaggagctgctactgaaatggaaaagaagatttaggagacgttttggggaatatttgggaggaagccgctacatgacctggcaaaattaccttggggagaaaggggggatggaggggaacagatgttttgagtctaagtaacttgtgtgattgctttgtaagctatacttaaattcagcttctgtgaaaaagtcacaaaaacagttatgtaaattatcaacgcagaatataagaaaaaggtcagtatgaggtgtgatgttcttttaggataaagccaaactaaggaacaaagaattctatcttctcttaaacttcacggttcgtataatgcggcccttcatgggaaggggaagaggtaaggatgggtgatcagtcactctagagtgatggaaggtgacagcccagggcgtgagagggaattaattctgtacagaagatcagtcctcctggaggagtatgctgtggtcagtgctggacaatagtaaggtgagatcatagctaggggcctggagtctcgagttcaaatcccactctgtcacatcctggctgtgtggccttggtcaagctacttaacctctatgagcctctgacatagggagtcataagagtatctatttcattaggttggtgtatagatgaaatgacttagcatttcttgggtgcttttagaagtaccgagcctcatgtaaatgctttgtaagaatttgctgccattactattattgttattaggctaatttaaaatataaaccaagataaatgtttccctgtaagcttgaacaatatagtttaccaagaaaatcagaaatgaagaaattacagagtttcagaagcagcctatggctcaaatatctgttttctgtggtttgagttaaccaagaatactgacttccatgtcaatgctaattatccatttttgggttaaaagttattttttcagcacataatcagcatcattgtaactcacttttgaagatttgttgacttggactttttgtaataagatatttagattgtctccgtggctgggtctcccttttcttttcccctcctgacatgtgatattgagttgagcgcatagtaagggttgaaccgtcatgtggttgactaaatgaaggaaataataaattacctttatgctttccagtcatccacatctgtaattgggaatgcgaatttaaatagatcttttgcttcacttgtaactgaaatcagggactgtgttttgaaggtcatatttagctttcaggggcttgtggtaaagaaccgacctgccagggcaggagacataagggatgcgggttctgtcccggcgtgtggaagatcctccggagaaggaaatggcaaccggctccagtattcctgcctggagaattccatggacagagcagcctggcgggctatagcccatcaggtagcaaggagtctaactaagcacagcacagcacagcacagcacagcacagcacagcacattcagcttctaaatagtgggttttcctatgattttcattccggaaaattcagaagactcccagatttg

SEQ ID NO: 60076 - DNA, 2160 bp, Bovine  19866881090092
  misc_feature (1)..(1): n is a, c, g, or t
ngagaaaattccaaagaccaagaaatgcaaagcgaaggttgtatatgactgagagaaatgcagtgacacagaaagaaaccaagttcatctaactaagccagcagtatttatcgcctgtgggcagtgccaaaatgtttcaggaagtgccagtgtctttctctgtcaagctgggccaaacttttcagcgcagcatcagatcactatgtaaatcctcatttccttactctcctttacaaagaatcttaacagtaagattgatggccaatgcaggacacccccttccctctccaaaaatgcagtttcattacctaatgtttctagacctttctagaaaatcttttggtaacagcttcaatggaaatggagaatgaattagcgcagtttcatttctcttcctggtttctcactggggacccagatgtcttcatccgtacagcaacatccttctcagactcagcaaagtcagctcttccttctgaaccggaatgagcaacgacggccgagatcaagggaaaagccaaccccatgactgcccttccgtcaagagtggtatctctgggacttccttggtaggcctgaggctaagactctgcactcccggtgcaggcagccaggggtcaattcttgctcagagaactaggttccacgtgctgcaactaagagttcatgccacaactgagacccagtgcagccaaatacataaatatttaaaagaagaagaagaagagaaagaatggtacctgttcaggcttcagtcctgggggaacccaggcgtactcctccagggcacagcctgagtcatcgtctgaggtcgagttcctctggaagtcaaacatgagtttgctgacggtcttctccatcgccaggggcatcgccgtcaccatgtgctcctcctgagggcacttgcagtgcaggcagatcttcctgcaagcagcgaaggcaggaggtgagaagaaaggcaaaagaaaccatttttccacttggcctgccacactccagcccttggatcccaaaccataaacacattccttggcaactggcttttggcaaaagcatctaaaggagtgttccacaccccgcctgtctttgtagaaggcgtggccctgagtacctgcaaagcccctgaacagtcagaggccaccaggtaagcatgctaaggacatttaaacatggatgccgacctcttctaaatcagtatcccaagaggcaagtcaaaataccttttattttactaggtagaacactggatatgcaccatgaccacaatttccttgactggaatagtaattaaatatataccatacatagtcagaccagaaatattaccaggagatttaacaaatactgacaacattccatttttataaaaagtttccagaccttaggaaaagaaagtgattttaaaaataactgcaggtgagattttctttaagaagagtaaaaatagttttttttccccacaaaacaaatctgaccctaagatcgcctgggaaagacattttcatctccactgaagatccttgtgggtttgaaattctaatcagaaaccccaaattaccccacattggtagctgtttttttaatgtacaagagcaatatgcatgtgaattatttcaaaagatagcagccaaagacacaattctctcccctaaattgaacatttctcttttaagattaccatctgttcccttttccatggctacaaaaatgatgaagcaataaaaacgttgatgtcagcaacacaaaagcacttttagcttccaccagtgaaataaaaagtaaaaagagaggaaaaaagtaaaggaggaaaaagatttaaagaaaataagctgttctacctgcactctgacctttagaattagtttcaggagcaccttataaaagtgatgagacggcccagaattctaatccccatgtgcctgaatttttcgacaaaagctttgtgaagatgtaattcacataccataaaattcggcattttagagtgtacaattcactggtttttaatatatttatagagatgtgaaagcaccaccattatctaattttaaaccattttcttcaccctccaaagaaactccaagtgcattattagcagtaacttctcagcctcccctccccctgggccctgacaaccactaatctatttcctgtctttaa

SEQ ID NO: 60077 - DNA, 1128 bp, Bovine  19866881122967
  misc_feature (1)..(1): n is a, c, g, or t
ntggctgcattatattctagccctgtgaccttgggccagttaccagatctccggtctgtgcttcaccttacttatctgtgaaatacacactaggtactgccccaaagggttgttgtaggatgtaaacgagtttatttacatcaagcactttgaagcacttattatgtaaagcactttatttacgtaaaacactgtatctgttagcttgtgctgcgtaacaaagtgcccccaaatttagtagattcgatcaatatttctttctgatttctcttaattcaggcaggcagagcatgccttctggtctcctcgtctggggctgggttgggctgttggctgcttcacttagatgtttagggtgatcacaattgtgacagcaggagctggacttgtttacatggttgtcataggtttctgaacagcagcaagagggcaaagcccaaatgcacagttgcttttaaagcctctactttagttatagttgctcatatttcctctggaggagagcatggtttccctctccagtattcttgcctgggaaatcccatggacagaggagcctagcgggcaatggtccctagggttgcaaagagtggaatgcaactgagcacgcatgcacactaatatttcattggcccgagcacatcctataatcatgcccaagcacattctctaagcaagcccatagccattctgggaggagatacctcaagagtactggatgggaaatcactcagaccatgtttgcagacagtatgcttcaagcaccctataagcattagctgctactattactattattatttttattaatattaactctccaacataaagctcctaaaagtaaagacatattcaggtaaagctcttgatgtatcttcagttagtcattagcacttgccgtttccaaatattgtgggagcctcgaaaattaatacttgcaacaagagagtttttaagaggagcttattctgcagggttgaaattattgttttggttacaaactgtagctgtccctactggtctccctgggagcattttgcaggttataaaatacaacgattactatggtaatcatattgcaagtataaaatggctttgacctacttgttaaaatgcagtgtgtattaa

SEQ ID NO: 60078 - DNA, 791 bp, Bovine  19866881209809
  misc_feature (1)..(1): n is a, c, g, or t
nagcagtatgagagaaaacaagcagatgtccttttcccaactttacagctgaaacatagaaggaagcatggtaaaggacttacagcaataaagctgggacttaaatccaagcctctagggtctaaatccacagtttcctccccctcccacactctctagacatattctagagaatacctattctacataaatgcattcttagggctgttatcaaccctgaggaccaggcttagcattttcaaacagcatttgaaatcaattctgccaggaagttgtcgtgtttgtcaacagtatgtgtagccaaaatccccaagaatgaactaaaatgcttggcatcttttttcaaaagttacgtaaggattaggctggacctgcatgcacagagtggaatgtcccagaaaggaagtaattgcccagacaacccagttttgaatcatcttcacctgcagtgtccttataattgacgcaataggtatatccagaacctgaattgtggatataattgacctgattatctccatggctttatttgtgaatgtagttgcacataaaactaccaggtactgacagtctctgccctaaccataaattacctccaaaacagcatcctctggatccttagccaccgctctgtaaatgactgtgtcaggggcagtgtcttctaggatataaatctcagtaactgccaaaaaaatgtaaaatagatgtgcttgaatgagtgtcaccattataaggccagaaactcctcattcaatcctagatcttagacaaaactgaatgcattatgctta

SEQ ID NO: 60079 - DNA, 1945 bp, Bovine  19866881210607
  misc_feature (1)..(1): n is a, c, g, or t
natggtaaatctgcatgtaaacccagtgttatgctctgcgtgtttcggtctggatgataaagctggacagtggcatttcctcataaagtgtgaaacaacaggtgggagattaatgaagcagttggcacttccaaaagattctagagcgactgttccagcaccatgtcctagggttcataattacctagagaaatgcagttggaacaacagattcatcaccaatctgttgagtgcctgacagagtacttgaagaggtaggaaaatcaccgttaataacagagtcatgcgagaacaatctaaaacttgttgaatattattagtgtgacaagatatataaggaacaacgacaagcaaactgggacaggttttgttgaaagctgtttttagttcaaacacttatttggtttagaatacacatatatagcaagagaaagcatggaatataaatacatacatcatatacatataccacacatacacacatatgtaacatataaatataccaacaattataaatacataaaaatatatcctcctatcctcatgttttagttttttggtttaagttggcatccttggttgactagctcatctggggacttgtgtgggtcctttgggcattttgtggtcttatttctcctgggcttagatttctgtatgagctccttcacattttactgaggttaaaaatttcctacttgggaacaacgcaagtcctcccatcaccttcccctcaagaggtgtatcccttaattatgtgctttgcagagttacaaaatggcacttgttgcttcaacaggtacaaacgccgagtgcaatggaagactatgaggaacacagtggggtgagcacaaggacaaacacaccacaaacataacatccctaaagcaaatatctagtgcatgtatccgcagcagactttgtgagctgtctcccagaatccatccattccttggacctgagtaacagaatccactgtgatacagtaaagcacagtaaaatgagatctgtctgtaatcacaagagcaaaaaccgaaataaaaaaaaagtgagtggaaaaacaaacaaaacgtcagatcatgggaatgatgcagtagaatgtttagataattccagttttccaaatgctgtcacttatgttttctcctttgagcctttggaccacctggctgggagagtcaactccaattttctcacctgtatgttgtggacagtctgctctagaagcggtaccagcagctcctactatcactcggtccggggtgctatatcacccgttgttggtttctcttaccctgtccacacttctgtaaatggttcctttggtaatgcctcctcagctagcctgcttgtgtgtgttagctgtgccgtgtggggagccttgattggtacaacagcatgtccagttgtggggagtgtgcagtagagttggttccccaaaccaggtgtttctctgggcagagccgtgtctcatctcctcccagcatgtagaaagggggttgtcaaataacagttgcatgaatcttgcagtgtgttggccaaaagtcagcaggagaaagaaatgaattgcaagctatttatcaccagtaggcgatgcaatcaagccccttcatgatttgtgatacaaagtaggcttccacaggaaacatttattttagcttcatcattctcttcctcctaacgatgtttactctgaaaaatgcctctcataatttcctttttttttcttttttggcaactgcatcctcttgtcagtatcctcttttctgccaagagcacacacagcctcagagattccaactttttcagaagaaatatgactctattaattactctgtgaaatgagacttctgacactcagctgtaggacaaaataagaacctgagaaacgtcataggaggagaagaaagattttacccaaacagatgctagaaagtcaaagtta

SEQ ID NO: 60080 - DNA, 939 bp, Bovine  19866881212366
  misc_feature (1)..(1): n is a, c, g, or t
ntgcaagtaattcatgtcaaaggaaagactccccaaaggcttgctcatagagattaaatgtttctggtcctggccctatacttttctcagaagagaactggtttcctgggccatatttggaagtctcatgaaatgttctttgtgaattttaccaaacatggaatgacatttcagtattgataccggctgtggaaacttacatttagatccacctcctacacacatccttctaacacaggagatcagaccagatgtgttattcaagtattcatgattgggcaacaactttcttttgtatttgacttcacgttgatgcagagaaaaactggttgccatctgggaaagagctcaccactgctttggagtctgatgtaggatgatgataatgaagacatggataactgttaagggacttccctggtggtccagtggctaagaatccacctgccaatgcagggtatatgggttcagttcctagtccaggaaaaccccacatgccatggagcaactaaatgtgtgccccaactgctgagcaactggagagtagccccggctcgccacaactagagcaagcctgtggacagcaatgaaaaccaacacagccaaaaataaaagaagtaaatccattttaaaaattatgcttggaaaaacaactgtttttactggatgataggcacacacctatcattgaatccctatattaatcactgaagtagaagctattgcctacaatgatattaagtaatggatcaataaactaatgtattatgcctttaatttacagatgaagcccattagggtaataggattaagcaatttgcctgaagaacaattagtgtacttgaaattcaaactcatgttccttttgctctaaagcccagggtgtttcttctcatacaaccaaaacctgaccaaagtgtattccataaaacacaagtc

SEQ ID NO: 60081 - DNA, 829 bp, Bovine  19866881292235
  misc_feature (1)..(1): n is a, c, g, or t
naactttatggaaattgcatggagaatttcccaaaaagttgtgttgtttttttttctcaaggtctaaatgacaaaggattctttcccagtatacttagcatttgattgccatgcagttttgatttttttgtgggggggtgggggaggacactgcagagggtgatgttgtctttttataccctgctgctctgtgtgacaagcagaggaagactcgttttttgcaaagatttctatctggatgtcttccagaagatacaaaagatggagggtcagtggaggggacagacagatgcaggtactgtggaattcagtgtcagggaaaactcacgtatgatttccctgcaagtgtagcccaaaggcctttgagaattgcctcacaattgacttttagtagtcagcttgcatacagcaatcatacccatcacaagggtctccctcttcacggaacacctttccaggcaagataccagacatcagggagtgtgtaggtgacattgcttatcacatctctgaaagtttgccttgtgctgctttttctttaaaaaagaaaaaaaaaaaaagtgaccgcttgatttcttagtcccatttacaaaagatccctttgtattcacctatgctataatgtttccagggattgaggctttatttaggtttttgaggatgaatgattatctgttgagttagctttcagataaagtctgattttgaacctcagtttgtctagcctagagaaaatgtctcatattaacatgttataattgatgatggcaaccattagctattaacttcctgagtctttgccaagcacagaatgccatgtcttaccaag

SEQ ID NO: 60082 - DNA, 848 bp, Bovine  19866881309547
  misc_feature (1)..(1): n is a, c, g, or t
ntaaagtaaattaaatagcattgaattttcttatgctttttgatgtgaaagatgttttaatgatttctctaagacaatttggagtatcacaatgtgcatgtattattattttttagttgcaggccctgtaggattgtgaagtctctaagtattggtttcagacaattactctgtattttttttaatttgatgaatcaatgctcatatgatttagtgcatgaaagcattttcttacaaaatgaacatttgaactgtatgaaaattttccagtttgcatcacgaatttgttaaatggacgtttaaagaaatatattcactacattgtatatttgcaggtttgtctctctgggtttatctaaccctgaattcattgtgagtaaggtttggagtttttttcctctctgattagcagatattcagtgttgtagatggtgactgcctgatatttattctatttagttagctaaatatttacattcttgtaactttctatggtgttttgtggcttttatcctatgggccatgaacaatgggcccactagctgtgagtgttggtggagtgttgtttctttagaatgatggagatgtgggtgtcagacaccacagtcaagatattgtgctgacatattcgtttatcaaggatattctggagaacctagaacatgagctaaatgtttaaatcctacttatttgtaaagttaattaagtcctagatccaattactaagaattctgaagtctcagctcaacttacagtctgatttgtatgttacccataaattaaaaatgacttccacgaagcagtctgtcatctcattaaatattcttcaggatgtatgcattatcaac

SEQ ID NO: 60083 - DNA, 1940 bp, Bovine  19866881358889
  misc_feature (1)..(1): n is a, c, g, or t
ncttccgccatttgataattaaccatctgacacttacattctgttatttataaccacatttttagatatcttttttattagaaaaaggaacacattatttttcctattctaaaaatcccatagtacagaaattaatgaagtagaatatcagaattctcgttaatgtaacttctcagagataatcacttttaagagtttcctttcatgtgtatcatttgagactttttctttgcatgtactcattttcatgcaaactgattttggtgtaaatattatttgaaaatttttattttaaaaaagaaacaattgtaatatcctcccacatcagcttttatggatctaccacattatttggcctcatagccataccataatttattaagtcaagcacttattgttggatatttagattgctctagtttttcactgatacagtgtacaattaacagagttttataacttcattagtaaaataagttcttgagacataaaggtagaaaagtcttagatttttagaaattttgccaaactcctctccagaaagcagtttagatgttcaccaggaggatatggttcttcgcattctcaccaacaatggaatcctataaaagtacgtatttaattattagtgaagatgaacacattgttatgtaattattaggcatttatattcccggcaaaaatttttgaagagccgtacactcacctttctttatatctgatatctccctaacatgtgtacctgatcccacccctgaccccttttgccccatgaaatcagcgtgcctcactgcacattgatgaggtttgctaatccatgcaacactcactatggcccaggcatggtgctggacaatgatggaaatttaaaaatgaaaagagaagagattctttttctgtggagcttaggcttttaaaagggtacttgacatggatgaaatcaagacacagattacatggcttgtcagcacccttgcaagtccctgattttacaggaatctgcactaacgtccctgaaatccttccccaatatcactgtcacacagagtcacagtgcagatagttagaattaaggccctattaatctttactagtgacaatggggtcccaaacaaattgcctaaattgacaaattaatatttgcacagtgtgattgagttttttttaataatccgtatatcaagttaatttatggcattgtgctcatcttaaccaaccctcattaaatgttggcattgaaaacagtctgcccaaaagtgattgcaaagagaactcgtttgccaagccctggtccctcacagatacaaaaataccataaaagattttgtcttcagggttaatttttaagaatttagtcttatttatctgtgtgtttagtttgttgcttgtcaaaatgagaaaggactggtttctctgatctttttaccagtcatcataagcgattattaagagagagtgaatgctgtcagttgtaccccattaaatatgattttttgttacttaagtcatcgttttagactgactttaactttaccattttgaaacctgaaattactactctgattacaatggtcttcagaaatggaatttagtctctctgaagagtgagtattctctgaaaaaaaaaagaagttgaaattttagcatttcctttatgcagattttaaaaagtaaagcataaatactccatattggaacaaacagtgccatagaagaaaatgaatgtaaatgccttatgttgcacaagactaaatgaaaatgcaatgtgaattactttctagctcaggctcatcactagtacccagatgattgtatttctatagttttaaaaaatcacttcaattttcaaccaaatactactagtcaaataaacagtgtgtctctatcactttttacagtgcttttggaagagatacagacaatataggaaaacagtaaag

SEQ ID NO: 60084 - DNA, 3324 bp, Bovine  19866881418377
  misc_feature (1)..(1): n is a, c, g, or t
ntgctgtagggtagggattgtatggtaggtatgcaaatgtggaggaagaggagcttattaaggcagtgtttgcattggtcaagggaagagaaaattgtggcctagaccaagatggtcacaggagaaatggagggaagctcattaaacaagaaattacttaggaggtaaaagagtgggattctttggctatcctgagatgctggagggaggtagagggtcagtgatacagaggaaaattcatggaaacctaggagaatggtgaggacactcagagcaataaagggcagagtagaaggatctttggagttaaggcagatgctttatggaagacagagattcagtgtgtcctgcccagcacgtgtgggggctgttgggaaggagggagggagcaaggaagtaggagatattagatcaattcaacaaatattgagctgctgctgtgtcttaggctctgggctatctgctgggaacaaacccaaatcagagacgattctcaaaaaattctacaactgagtgagtaatgaaggtgggcatatagatagtttcaacgtcaagagtcaatgtgttgctggatctatgtgcaaaattggacaaattctgaacagcacctgtcctatgccgggatggtgcttgtactgtagtcatggtggtaagtgagtccagtgacagcctttccttggaggaaatggtattttattagagaaggtcgataaagaaagaaaggaagatgggaaagaaaaaaggaaggcagggagggaggaagaaagaaaaagggaagaaaggttggttgtataagaaaagtctcaggctgccactgagtataagaaactttcagcaaactgatgggagtcccctagccaaagtcactggtcagaggagccccacgtttcccagaaacagactgccttcaagtccctgccactggctgggagcggcccacacagcccatgggaagtgtggcttcagagcatgccgatggggagatttcagaaagcagcagcagaggcccttagacaactgtactctgcaaggcgattgttacagctgccacagctaggaaggaagtaattcaggtgaggagagagaacgaccttggtcaatgagcatttggatgctctgggatggatggtctctctgttgaaatgacatttaacttaaaatgaggaagatccagccatgtgaaaagctttggggaaagcatttaagtagaggaatcagcagcagtgcaaagaccccgtggtgctacccaagggtcccttgaaggccagtgtggctggaatgtaatcaggaaaagagcagagcagcagaagctgtacacaggataataatccagggtttggcaaatcgctttaagtagtttagattttattgcaacttcaaaggaaagccagtggagaattaagctgggcagggatacgatctgacttatacttgaagaagattctctggccactgtgtggagcatggcgtataggttttcaagagtggaagtgaattagatggtgacaggtgatgatgactgatgcagtcgaggtgtactgaccccatctggaggttgcagggtgctactggtgtggtgagaaaaggctttgtgagggagaaggcctctgggctgagaatgaaaggggtgggatttcagggcaagttgcaaaaaaggtggcatttagggtgaacttcactggctttctgaagggaggagcaatctcacagcacttttcaaaaaatcacttcactgaaacagagccaaagcagtctttaatttagtgccttttataggactgaatatagttcagaagtaaccaaggacattcacaggtgaaaagtacttaaatcagagagacagagtagttagggaaaggagaccaaccatttctttttttatggcccagaacattaactgaatacctcaggggccaaaacaaagaaaatgagagaatacttgtcttccttctcgacttggctctgaatccagactggaactgccatgcgccattttgaacttggagggctgaggtgaagttgaggtgaccttcagttgggctgatattggaggtctggttttcagaacccattctttgctactcctatgttaacaataacaacaaaaaggtaaaacctgtatccacagtcacaatgacaccaagggaaaacaacagaaagtgcaagtcgctcagtcatgtcaggctctttgcaaccccacggactgtagcccgccaggcttccgctgtccatggaattctccaggccggaatactggagtgggtagccattcccttttccaggggatcttctggacctagggatcgaacccagacctcctgcactgcaggtggattctttaccagttgagctaccagggaagtgagagagagactaaaccccaagatgtgtgaacttggtcatctttcactgttctaaatctatcaccagctcgtaaatgaatcacgtggtacctggagcctgactctgcccctacaaagtcctaactgaacagacaaggctcatgttaaaatacagtatggtcctggcaccacctgggtcatatttacctggggggctcatcccagatctactgcatcagaatttctaggagggaggctcaagaatgtgcatttctaacaagctcttcaattaattttgatgcctttaaaattacaaaacaccaaaaaaaccccaaaaaccccactgctttgaagtcatatgactgtgaacatgtaaacagatcccggcaccagctccactaacttgccagcaaccttggacttcagagtctgaaaagctgcctgttatgtaatttggttgtgccagcgccaaggaaggtgcgaggattctgtgacctgccaagagccgggtcactgtcagatacaccatttccaggacagtttgtgttacctttcccgccagatcttggctgctgaagactgatgacttaattccccaacccagacagggtagatggcaacccagctcccctggaaactgttcagatggctggtacccgagaaacccatcaggatgctggaggctggtagagagggagggattttacttggtctgtctccaactcttgggccatcagagcaggtccctccctgctctctgagcatgaaaaacacctgaatatcagagcaagtaggtgaccgctctgagcctgatgtacagcgcctgtcctcaagcaggatttggtcctaccaagggaccatctcagggcccctagtcttctaagggcaaagttacacaacccaagagggcaatgtggtagcatctacataactttcttgatcctgaaatccccaaggaattcatgctactgggaaaacgtga

SEQ ID NO: 60085 - DNA, 733 bp, Bovine  19866881642077
  misc_feature (1)..(1): n is a, c, g, or t
ngagaaagaaaagaaaagctatttattctaatggaaatttctaatgaatttcagagactacattttcatattcaattttcaagaccaatttaaaagaatacatttatttccttaccttcaggtaagaatggggtccttattgttgacattgatgaggaaaatctttagatttccagcagtaaacagtcctccaggatcaaccacattaataattagtgagaaactgaaagggtagccacaggaaaaacagctaagattttatagtaactgacaggctttcacagaaatagaatttgtttcgctttaactgaccagtgaaaacaattgattcatttagttaaaatgtcagtcaaaccagttattttaacagttggcagtggttaagaatgaaattagtcaaatccgttgaaaagacaggcaggaatttagataagtctgttaatccccatcaataataaaaaactgaagggaattccttagtgtgatagagcaaacagagctatgggtgtgggctctcaccttgaaacactgacgtttcaattgggaaactgaccgacaaatacaaagaagatgctaaaaacacttcaaagcaacataatgactatgagaaaagagtaggctggttacaggattaaaaggtttttatctcagcagaaatgtttatggatttgaagaatgaaagtatgaaatgtatcctaatgaaagagaatgttcacattcatagtctgttcta

SEQ ID NO: 60086 - DNA, 825 bp, Bovine  19866881756126
  misc_feature (1)..(1): n is a, c, g, or t
nctgtgaaaaaagagaaatgcctggtactagtcaatggtcattactattatccgtgagatctagttaacatcctgcctcatgtcacccaagaattgagtcgtaactgcagtggctagtctgtcatgctatacatagtttctactaatactgtacaggcagagaattattcagcttctaatctgctgtggctactggtatataaatgcagacaacctaccagatggcctcattaaaaaaaaaaaattctgatttgtataaacgtcttcactgctatcaacctgagttcatatcacagagataacatgggggaaaaaaataccttgagagacccagaaaagcacaatgcaagttttctgagtccatgggaagccatgtgcctctcacttgtgatatctgttgtgttctctcgaggtccatggagaacagccagttacccatcaccatctggccaggctaattctgggtggctgcagctgcaacccagagtcttagtaatcacaactccaggttctctccatactaaatagttcccagcatattctctagaggcagcctccctcttgagcaagagatccagatttcaaggcaccgaacagcaccctaatcatttataaacccaatacgatatgcttcctgtctctcctttcaggagtctcctctgagctttcaggaccaattgccttgtccacacatctcacctggataggacctcttaaatggagttgtgcagtaggtcctataacagctccctctgttctgattttccaatctataatatatcaaagccagttccacgttatcattcaaaagcccagatcaaggca

SEQ ID NO: 60087 - DNA, 863 bp, Bovine  19866881933636
  misc_feature (1)..(1): n is a, c, g, or t
naataagcttcccattatactttgccaggtgttaaatgtgaaaatggcaccctctttgcccagcaatgtaggctggagatggcaaggtcatctgtaacctattttacatggtcctgtatcagttacaacacccttctctaacagtgatgctttcacacaaacagtaggttggactttttatattctggacttgtcataatgaaacattaagttccttttcacaaatgtgttttctctgttcttggtattctgagtcatgttcattgcctgcttaatgacacattttcagagactgatgaatcttggtaaacaaagttgcaaacagagaaaaaacccatgaggttgaagggggtggggacccagcacatgaaatgatttcttcatcctaattttcattcttggttatcagcaacccaaatgtcctagataatatatgttgttaagcccagtcattgtgtggctagcctagtcattgtatctgactcctttgcaaccccatggactgtaccgcttcaggctcctttgtccatgggattctccagaccagaatactggagtgggttgccattttctccaccaggagaccacccagaccaggtatcaaacccatatctccagcactgtgggggattctttaccactgagccaccaggggagacctcattgtatcagttatctattgctaaaagtgtgccgaataatgaaaactacagaaaaggagaataaagcaacagtgaacatttattttctgtgattgtggttttcagtctgtctaccctgtgatggagaaggataagaggcttatggaagcttcctgatgggagagactgcctgaggaggaaactggggtcttgttctgatgg

SEQ ID NO: 60088 - DNA, 883 bp, Bovine  19866882129215
  misc_feature (1)..(1): n is a, c, g, or t
nattgtccccttgaagtgaaaatgagaatatgaatatctttagaagaaacataattgttaatgacacaatagcaagaaaatcagaccaaaagaaccagccagctactgtatgtcactacacgtcagtgcctttgccttcttgtacagatgaataaataccattctcggaaagcagaagtggccacctgaatggggcatgattgtggaattgaattgtcacctctggttatatcattttgtcatgtttcctacagtacaggtttaaagccaatcttctgcctatatttctgagacaggatgttctgaaccattttcagatctcacatcaaatagtgacaatgtgaggctttagggtttctttgtttttgtttttaatattaatataaaatcggttaaaaaaacaacttaaccttatagggctgacaaagtgctctcggaatgagcacctaataaacaccaccccacattttggtgaatccttgtcacgagagattcggtttaatgttaaggaaaatcaatattcacctgaagactgtgaaaagggaagaagctgtgttgttcaaggtctccttttcccatgaaggagaccaggttgaccggaggtggtttacggaactagaaatgtttgctggcatgcaaaccgtgactcacttttgttttatgcctgatgcatttctaatgttttcatatttcccatcaggccctcaaagaatcctgagagagaagtggcatgattacaatcagcctcattctacagattccatttaactcctctttatgtagcaccaggcatgagaaaatgagtctctgggagattagggaccttgcctgtggtcaggcaagttcatggcagaacaaggactcaaattcttaagccagcgat

SEQ ID NO: 60089 - DNA, 1389 bp, Bovine  19866880255754
  misc_feature (1)..(1): n is a, c, g, or t
ntaatgattgcagcctgaaattaaaagacgcttgctccttggaaggaaagttatgaccaacctagatagcatattcaaaagcagagacattactttgccaacaaaggtccgtctagtcaaggctatggtttttccagtggtcatgtatggatgtgagagttggactgtgaagaaagctgagtgccgaagaattgatacttttgaactgtggtgttggaaaagactcttgagagtccctgggactgcaaggagacccaaccagtccattctgaaggagatcagccctggcatttctttggaaggaatgatgctaaagctgctttggccacctcatgtgaagagttgactcattggaaaagaccctgatgctgggagggattgggggcaggaggagaaggggatgacagaggatgagatggctagatggcatcactgactcgatggacgtgagtctgaatgaagtctgggagttggtgatggacagggaggcctggcgtgctgcgattcatggagttgcaaagagtcggacacgactgagcgactgaactgaactgaactgacactggaatcggcccacactcccgtttcccagaggtgtgaccttaaactttcttaaccttaatttccacctgttcgatgagtactgataataacctccaaggatcattgtgaagctttaatgaaataattcaagtgaatgaaagacacttaaaaaaaaaaaaaaaaacagctgactcagtatttaggggatcaagcaggctacccaggaaaggtgccccattctctgaaataacttcttcatcttgagacatttttacagaagtctagggtaagaaatccttcttataagaggaaggtcttagactgacattctggtggaatagagaagagatgtgggtgataaaatggggaaaccaggaatatttacttcataatatgttatgggccaggctggggtggttattctgtgtcctttctccacccagcatcacaagacactgtgtttcttagaatcagaggacccatgggtcatgcaggacaggtgtacagtgtgctctgattgttacagtccactgataggaagggaaattgggaaataaatcacagtgtgacagctccaagtgaagtcaagttcatttcattccaaatgaacgtggtagtttaaaaagccttggtgtgtgtctgcttatgcaaaccattattcaaaatagacttgtttctttggctcttggaaatgtagcaagatgagcgggacttcctgagaaaactgctgcaacatattctatatttaagtggaaataaattttaaagagagttttaaaaaattctggtaacagcaaaacaggcctcctacttcttttgtgctggctaaattccaaggacactgac

SEQ ID NO: 60090 - DNA, 953 bp, Bovine  19866880597738
  misc_feature (1)..(1): n is a, c, g, or t
nattagtctgcccccacccacccctgcaaaccaaaaggcacaagacaacggcttactgacaacagctgcaacattaactttgaaagtgattcagagagtgatcaaagaaagtagattcaaacgatatgattatctaggctctcattaacatttaaatactgtgtatccctacaaattgtggggaagtaatgcaatctgttactattacattaaattaggtcactgatttttaaagacttatcttgacccaaagtaactgaagtaataactctgcccagctgggagtcctgaatggtcagaatggcctgctgtgtatttctgcattgtatacatatgtgtgtgtgtgcgcgtgtatgtatatctgttttcaaactatgacttaatatttaagtatttcgactgccattttcaggctttcctggtggctcagacattaaagaatctgcctgcaacgcagaaaaccttgttttgatccctgggtcaggaagatctcccgaagaagggaatggcaacctactccagtattcttgtctggagaatcccacggacagaggagcctggtgggctacaatccatggggtcacaaagagtcagacacaactgaatgactaacacacacacacacacacacacacacacacactgccatttttgtaagtgactgaaaaatacatatgaagaaatgtcttagaatttccccatagagggaaaacagcacttgggcaatctgtcatgtttttcagcattcctcatttttctcatgatttgtgtcgcacggaacatgtttatccaatatgaagaggaagagttttcattgctcaaattccctgtttgtagctttttgccttgaagcaataaatcatcagcaaagtgacttagtggactgggtgagttttcctgtattttcagttattatgaggcaatgatggaacattgaacactcccagtaaatg

SEQ ID NO: 60091 - DNA, 1181 bp, Bovine  19866880707480
  misc_feature (1)..(1): n is a, c, g, or t
ngatccctcgggccgtgtgacggcacctcacatcatcccagactgcagtgactggaacccacgtgtgaacatcaaggacgctgtgttcccagggaagaatctcttctctagaagggatgctggacttccggcctcgggaaatcctctgacttcttacttccttggaaataccgccctatttctactgctctcctgaccaaagaagacctcctctatcacagaaggggacttgatctcttttgattaattattttacaactccaaacacgactcagatttcaaatagtagtagccacggctgcctcatgttgacaccatttcagagtatcatgaaaagatgcacaacgaggcaagatatgggtccctgcgagggaaaacccaaccctccccaggtgactgttaagtaaacaggccgagtgaaatcacatgacatacgggaaggccaccgtatgcacagacccgacagatccatgggcccagaaagggaatatgagctacacggtggtggtgaccgtaggtggaaaacatcttccacgtctaaatctgataacactgacttacaaaaattggaagtttcagaatcagacaataccaagatcaaaggccagttatgtcacttttggggcaactttcacactaggtgagcgacttcagctaagtctcgtcagatgagtcttggctttcgtacatgtaaaagttgagctcataatgtttatctaaaaggagaattgggaggattgactgcgacaacactagtaaaatgtctggcctgggttttaacagagcagagacattcaaaggtggtgcccctttgattatgctatggacccagtggtgctcaagggtgggcaattttgcccccccatttaagagatacttggcattgtttggagacagttcggttgtcacaatttggtgtgcatgaaggaggtgcttccaggatctgacaggtaaggaccagtgctgttgctgaataaacaccctctcacacaagggacagcccccccaaatgaagaactgtctgtctccagattccaggagtgccgaggctgaggtgtcctgctggatcgcatggcactgtagggtttctctttcgggcaggacccgtgaggacttacagtgagtctggctgaaagctccagcataaacggtagttctgccctcaggacacgggacacagg

SEQ ID NO: 60092 - DNA, 2721 bp, Bovine  19866880723744
  misc_feature (1)..(1): n is a, c, g, or t
ngtcccctggtggctcgtggtaaagaatccgccggtcaatgcaggagacagaggtttgatcccagatctgggaagatcccacatgcctcggagcaagtaagcccgtgctcggcaactactgagcctttgttctagagccggtgctccgaaacgagaagccaccacaatgagaagcccccacaccacacctagagagtggcccccaactagagaaaagcctgagcagcatccaagacccagcacagctaaaagtcaatcaatcaataattttttttaattttctcttaaagttattttgaaattaagaaaataaaaaacagctagaaaccttctcagtatatcaacaggaaaattgttcaataaattatgatatatccatactacaatttaatagcctagtgtgaaaaagattatgctagagttctgtgtgccctggcctggaaacttgaccttaatataattgttaagcaattactatgtacggcgtgcatagtattttctaagcatacatctttgccatgatagtgaacttgtaggaagatgtgattgctagtaccactcatgtcaagaggtggaaaggtaagacaaattattagttataattagatctaggtactcttgcctggaaaatcccatggacagaggaggctggtaggctccagtccatggggtcgctaagagtcgggaacaactgagcgacttcactctcacttttcactttcatgcattggagaaaggaaatggcaacccactccagtgttcttgcctggagaatcccagggacagaggagcctggtgggctgccatctatggggtcacacagagtcggacgcgactgaagcgacttagcagcagcagcagcagccatacaatagaaaactgaaaaaaaaaaaggaaaacaatcaaaaacccatctcacacagagtcggacgcgactgaagcgacttagcagcagcagcagcagcagcagccatacaatagaaaactgaaaaaaaaaaaaaggaaaacaatcaaaaacccatcagcttaagtaaataggtttcaatgctcttacaaaaagttcagaaatacatggtccagaactaacgtggcagtaggtgcgtggtcatcaattcaggcatcacctttcgtttcatcatccttgactctacccccaagaccagctgtggtcccagatggcagctgatgctccagccatcacatctgggcaggaacacgggagaagctgtttatgcctcttttaggaatctatctcagaagtgccgccaaccatacctaattgcaaaggaggctgggaaatgaagttttttagctggcaataataactgtatggtattttatttcattgagccccaataatataaagctttattactaagaaatggagaatggatattggacaagccaactcatggtccctgccaaaagaggattattcactttttttctgaaatagacttttgtattctctggctaaatataatgagaattcactgctttacaatttaaaagaatccaagtgggaaagatttttaaaggagaaaagaggaactgacttatcttagcatataccatgagcccaccaggcatttcgtgtcatcccaaaggggacaggaggactcctcctcctcttttgcaagaggaggagtccaggatggagagaggtgacacaaatttccaaaagtgtcactgtcaccgagtagcagagccaaggtgggagtacaggagtgtgtggttcccagttctgtgctgcataatctaagaccactttcaggagggggaaaaaaaccccaacacaactcatgtatgattctagaaccctagatttgagagggtctgtattccctaatcaaatcattaggtgaagaacaagacagtgagttctgacctttctttaacttccagacctctgatgggcgttatctaatgacctgggcttacttcaccagcctctagaacatattcaattcctggcaacataaatctttcttttcttcttttttgttccttttattcatttttcacatgaacatctagacaaacacacagaggtaaaaaataaagagcaccttttcatttttttcctgttttcctaacacatctaatttcttaagagtgagaaggacaagactagagccttacataaacactgggctcctctcggatttttattgacatgaatttatgagggaatcatagaggtgaatctacagaataatattattccagccaagatgctgtctgctgcctgctgggtgggaaaacacgagcaccggggggtattttccttgaagcactttcaattttagacaggacagaaacaagcacaaaagaagacattgtattcctccatcctgccctaacaggggtgcaaatcttggactcttgatcccatcagaggtagagttttgtccctgaaataaaagcttttcccagagaaaaatgaactgtccgccacggagaatctttttcatggtgggttctggttttctccctataaattccaggaagggactagccctgccctctggaagcacagagaatgagctggagctttctcttctggaaggtctgttgaatactggtacatgcctggtgtttctgccaaatgcgtctacacttgcctggggatgtggtagagagtcagccggacctggggaggaaccccagcttcactcctcactcgcgctggaactcaggcgatccctcagctcttcgact

SEQ ID NO: 60093 - DNA, 1835 bp, Bovine  19866880769236
  misc_feature (1)..(1): n is a, c, g, or t
ngtccagcggcttctcttacccatcttctccactctcatgatgaatgtcaagacatgtaggttaactgcccgagggaccacagcacccatgtggtgaaatcaagcattcttcccaagtactctctctcagccccaagttcccatgaatccaagacagagcctgggaatggatgatgcctctggtccttctagtgagaacagtctatgaaaaaaaaggtgtccatgctgctaactagaaatttccagggacattagtcctgaaaatccgatctgatttggtgatggatctgcatcacgtgtgcattcactaagcaaatctaattctgttgctgaccagcgagaaagagaaataatttaaacggttcaacacagttgcacccacgtttggctcagagcttctgctgtctcagctgacctgggctgggggaccagcggtgcaggaagctctcagtgccctggggccacttcacagggggagcaccttctaccccggtgcccatccagggttgcccccgagtccttccttcctacaagtggatgcaggaaaacggcttcatctgggcactcagagcattgcagaaacagcaaagtattgcagcactgaaggaaaaacaggctgtattggacccatgagacggagtctgtgatccaaacgacacctccttcagaacttttccgagctgctttggactctgcaatgatctcctttcaccctggttggagaatgccacagaaaaatgctacccacccacccctaccccatcccccactccggaataattcttcttttctcctctctttgtctctggtatcttgtctccctgatccactcacttgttctctgctcattgttttccagaaggcttgagttcctaagcagaagactcgtctgccattggacagagcctgctgcaggtctggaccgccctgagtgctccaccccccaagtcgtcctcaaaggggtggaagtggcttcttctggcaaagtgccctctccagtccacacgccagggctcccattttttattgaggaagtagtggcctactccacttttgaacttgagcctctatatcttttgccaggtaataaacagagcagctcagtaaatgttgagaatcgaaataggggaggtaaggggaaatggatgtgtgtaagtggagtaaaagaaagctggcctaattttgttcattaccatgcccccagtgtatacaacagaggctgagcaggtgctcaatccagttacccaagaaatgagcccagcttaaccttctctttgggtgaatggggaaactgaatcttggcgctcctcagcttttcagtccttttccccagcagctgaatgcagaacttggctcaaagcagtggctcaataaatatttgtggaatgacgtaataggtaaataccaggactcctggaggccagtgggctgcacagaggagaaccagggccctctcttgagcaaaacctgggctggtggagggaagaggtttaccgccatcaggcagagggctggaggaggagcgcagatgcaagcaaacacaagtctgggcaaggggcctggggacaacggtagggtcttccttcacccataaaataatattctcccggtgcaggtgcagtgagtctcacccgggttgcacattagaaccatctgggaagctcttaaaagacgcttgggctgcactccctgagattctgatcaaaccgacctgggatggagccctggcccgtaccttcttaaaaaaaagttccgcgggggatattgataagcagagcgcgttgggaacacggagtcacaaaccagacagtagacaaggcggctaacgcggaaag

SEQ ID NO: 60094 - DNA, 1744 bp, Bovine  19866880780745
  misc_feature (1)..(1): n is a, c, g, or t
nctttcttgctagtaattttcgcatccttatacagcagcttgggaaagctaccctacgctgggacagactgtattctaaaattttgataacctgtaagttctaagatgtcttttctacctcgatacaggtaactcattaagaatatatgtagtttggatttgaatgacttgaatatactttagttccactttttgattcgaccaaaagaagcccaacaggtctcaaggacggcctgttttagaagcttgaagatgaaactcaatatcaagaatttgaagctaatcaacttgtgtagaaggaatgtaaagaaaacaatgggtagcttgaccagagcataattagaatagcacatatgaaccacattctctggttttcaaatatctgaactgtaataaattttttgatgtgctatttcaattttcagttgggcttccctcatagctcagtcagtaaaaaatctgcctgcaatgcaggaaacctgggtttgattcctgggtcggaaaggtcccctggagaaggaaatggcaacccactccagtattcttgcctggagaatcctatggacagagaagcctggcaggctacagtccacagggtcgcaagagtcagatacaacttagtggctaaaccacgaccatatttcaattttcagtagcaaagaaatttgtgtatagagaatctaaagtttaagacatatctaaatatcttttaaaaagaaagaaaaaatacttgcatgccctctttatcacccatattctagtcaacttatggaagaaaatatgttaagaaaaaaatatctgcccttggcctggaggaaccctctcttgctggactaatccacacttggaaaatgagtaatcactggtcgtcaagctgcatgttcatttcctggaggaatgaaaggtatgttcccaggttcctctatgtctgttccagttgtgataacaaccatgcttcacatttgtatagagcttctgctttataaacttgactcacatactgtaccgatcttcgaaaatcacccttggagattggttcatatatcagtacttatgaggaacctgctctgtgtcaggccctcggaaagaaatagcaaacaggacaaatgatctttgcctcccacccgaagttgaaactacagtgggaaggaaatacaaccaaaaaaaaaaaaaaacagagtgaacaaagaccttatggtaagtacagaggaccatataaagaggaaaaaaacaagaatactatcagttcagttcagttcagttcagttgctcagtcatgtctgactctttgcgaccccatgaattgcagcacaccaggcctccctgtccatcaccaactcccggagttcacccaaactcatgtccatcgagtcggtaagaatactataaagcaaagcaaataagtagacatacacagggagccctactctagagaggggatgagtcaaggcccctctgaggaggtgctgtttgatgagaaacagacaacccagcggaggctggagtagcacctcccattcagagaaatcagcaagagtaaaggtgatgtgtgcaagggggctgtacggggtggacaaacagcttggcatactctggaaactttcagaaggtaaattcctctgaaaaaactaggaaggaagcagatagaggtctgaaatgaggtcacagaggaaagcaggggagagatggtgtttaaagctgggactaacaggcaatgtatgaagggttttagttcaataaaggg

SEQ ID NO: 60095 - DNA, 973 bp, Bovine  19866880854183
  misc_feature (1)..(1): n is a, c, g, or t
ncttttaaagtgtttctattcttagcctcctctgatttcatgtggaatttgaaacatattttctcccagaaataagtgtaggttgacaaactgcaaagatccctagacttgaatactgaaggaagactgggtttaaactcaagttctgtaaagacatgcgttgtgattgtggacaaggtggtcattgcttcattccatcagtagccattcacttagcatcaattttggcttggctcaagtgtaaactccttcaggaagtcttggatgtcttcacctcccccttggcccttagctgctctgtctttgaaatcccattatacctcatgcatgtctccatcaacaacctttccacactgaattaaaattattgttttatttctctatgtttccccgtcagactattgacaatagctggcatctatttgctgttcttcagcagcagtgcccatattttccttgagaagtcccctctcccttcctcctagtgtgtggttccagtgaacagactgatttccctcccagcctttgatgcgctccaatccacttggagcttcacatgcatgcatgtgtgctatgtcactccagtcatgtccgactctttgcagccctatggaccatagataggcctgccaggctcctctgtctacgggattctccaggcaagaatactggagtgggttgccatgccctcctccaggggatcttcccaacccacggatctaatccacatctcttacatctcctgcactggcaggcaggttttttaccactagcatcacctggcaatcccctggatcttcatatacttagtgacaaagggataggttttgttgtgtaattgggacccttccagaaccaaggtagccagccctcttgtcctaagtctagagtttgtttctgctgactttgactggggggaagttgcaggcacagagccagcagaactaccatggagtaataaagagcatttcaa

SEQ ID NO: 60096 - DNA, 1416 bp, Bovine  19866880884116
  misc_feature (1)..(1): n is a, c, g, or t
ntccaggctgccatataatgttgagcagagttccatatgctgtgcagtaggtcccttgttggttaaaaagaaaccattttttaaaaatacgttttaaatcaaattaattcaagattaaggcagaaaattggaaaaaccacaaataaaaaaatcacaaaagggaaaaagaaatgaaccataattgcatttcccaagggagaaccacagttcacatggggctgtgtggtccagagttctgtatgcccggggcacgtgagggctgtgcccccaggcacacagcagtggccctttccccttcattgaaatgccgcactagacagatgcttttatcgtcgtcctgatcatgaccagggcctcacatcactgagtgttctgttgtggcccttctttgtgatagctgcacagtttttgtagtcaggaaagtcttggaccctgactgattgatgcttaactaatcagagatgcgcgtgttagcatgatgaatgtcactgacattactcggggtccatttcaggggctctcaggtcctttgtatcctgaccagacattgtattcaaccatatgtaatctgacggccaattatttgccggacattctagaggttaggaatgctagcatgaatacaaaatggtttggctgtctaggctctgagcccacaaaatatagtctcaactctatcttagatttctgtctctgagaagtaagaggattcttactgattcctggagagccgattaccttgtctgatttatgatgtccgtggtatgatgtacccatttcacagctggggaagctgaggggcagcggggtgaagtgacttgtcccaggcaggtctgccaagtgtgtgtgcttctactcttcctatggtctcctctttgtactctctcagaagtcccacgtagtgtctactatgctggaacctcagttttggaagttggggggcatatccagagcatcagcctgctctgggggtccacacggaccctctcggacttttctctgtcttcagtttgactttaaagttcacagtctctcctgtggccaggttgtctctctcacctcgtgccttgaattgcagctcaacaaccccgagatggtggagggccttgtgctcatcaacgtgaacccgtgtgcggaaggctggatggactgggctgcctccaaggtgagcctgggggcctgggtcagccgggggtatcccaatctgcagaggggcaggcgtgcccgactctgcctggagggcagactgcaaggaacctctccttgcacccccttccactatccccagcaaagaaggctgctttcctctgcttggctttgaatagtgaacatgatctcagccatgcaccattcggatttcaacaaatcagctactgtccaagtcagtataccagtaggatgtgggtctccagccag

SEQ ID NO: 60097 - DNA, 3159 bp, Bovine  19866881077420
  misc_feature (1)..(1): n is a, c, g, or t
ngtgtgggcgtgagctggaagactagcagggctgggtcctctgaacattcaggccggtgtcctgcaggggctgagctaagagctgctcaagacagaggctcccctgcagggcatccccacacaggccccgggtacagatgccgaggggtacactcagaggaggaggagctcagaaaatgtgtccaccaacccatgtggtagctgcctgttacttacatcaaagatataagagcgtcaggaagggcagaccacagcgtgcccccagctctgggcccaggcctgtgtccacgtcctcccactgcccccagacctctcttatcagtgaaggaatgagcagaaactgcttccaaatagggaaccctttccttaaagcccccagggcccagctggggccggctcaggccattcctatctcaaccctgccccctggtggagtatctgggtgtggctgcccacaagtgggcaagctaagctctggactattctgttcatggagtgcttgcccggggtgtgccaggagcagtgctgggcactcaggcattaagaaacggcatcctgtccctgaaaactccacaagagtctcccatatattttttaggggatccctggcaacctgggctcaagtgcattgcagctctcaccaccctatgttgcaatcttataaatgtgtctgtactgtgattgccgtggggtaaggaccaccatgcgtccatctgaataccagcccagccatgcaggaggtgcttagtgcatagcatgtgatgggaggatggaggaatgaatgactgaatacaaatgtgaatgaatgagggggtagggcagcctggtgacaagtcacctggagggatattttggggacactttcccagcttcaaaaccctgagcaagttacttcaacaccatgggcctcagtttcctcctctgtgaaataggggaaaggctataactgctcgttagggccactggaggatgttgttatcatcactgctttacacacgtgtacacagacgctcagagagggcgagcccagacccaggtcacacagcctcgggaaatgggttcgctcactgcagacgccccgcccttacctcctggtcccagggccccactcatcgatgaactgcacacaccttccaaggacggtggggttcagctccctcatctatcgggatgattaaggtctcctgggcggcaccccaccaccaccagcctcctactcgctgctaccattcccatcaccacccacttttgtaaaaatgaagtgaaactgttggtaaaagtcaaaggatagatttacatgttcctgaatctatttttagggagttggagaacatcagaaaattcagtcactgcccacttctaaacatcacccccaaattatacacacagggtttcctatggggtcttcgattgaacattcttctagtttttcccttcttaaatttaatctgcttaagtttgtccagtaactatgattgaatggattgctttgaacctgcccactgagtgccctccttgtccagagggtgcagtatcgggcacggtctcggtccacctgggctgctggaggaaaacaccacactcgctgggcggcttacagtcttgctgcccacagccctggaggctcgaaatccacggtcaaggccggcatggtcacattctaatgaggccccttttcatagttggcatctttttgctgtgtcctcacgtggtggaagggatgagggagctctctggggtccctttcaaaagggcactaatccatgagggggtccacccacatgatccaatcacccccagaggctccaccttgtggctcaaatggtaaagaacccagctgccaatgcagaagatgcagggtcagcccctgggtcaggaagattctctggaggaggaaatggcaacccactccagtattcttgcctggagaaacccatggactgaagaatctggttgcctacagtccatagggttgcaaagagctggacatgactgagcgcacgcatacacacaccaagaccacctttagagcggttagaatgccaacatatggatctgtggccaacataacattcagtccccagcagatatttagcttaccgtggggagctagtcatttttaaaattttatttttgttgttgttgttgcttttcagtccttctcacaaagcatgaaaagcaaagtaaaccattctcagttaactacatgaggcctgctcacggagcccggtgccaccccatgaaaccacagaacggcgtgtgttctgcgggccggcctggctgttttgtgtccaggctgatcaagcagccagcagggtaggcatgtaagtgcagttctagaaaagccacgcattaggaaaggaaaatggcctagaacctccccccgccttacactcccctggcccagttctctaagacacgcttcccgttcccacaagaatcaccagggacgcaggatgaattacggattccgggcccagcagagaagagttgaagctgaggattccaagtggactccaggcacctgtaccttacaaggtcctgaggtcagcggttctcaccctcaaccacattcaaggtccaggatcctgcccgggatcctgcctcagtctggctgcctggggacggtggccaggcaccagtgtttattaaagctcctggatgattctgacaggtggcaatgcttgggagccaccccaggaagtgactgttagaggcgctgccctgaggtcactgctgatggaggcggcggctgagcggacagaaccaggcaggggcctgagccctgggtgcctgtcttgggcagcatcagggcacagccccaccccgtcttccccataaacacagtggcatcctcagggagtctgcctccagaagcacgtcgtaaaagagactttcatgtgaacagctgcggtttggaagtagccaaggctgttcttgactctctccggcctccccagacgatagatactctcctcgctgtctggttgttatccttcccttttttcacccttagcttctgatgttagaaaaaaatgacgtaggccacacacagcagtgagcttacaacggtccctgtgccaaggccaagggcaggcggacgtgcaattacctcttgggcactcaagatggctgatgtgcgtgcgtgtgtgtgtgtgt

SEQ ID NO: 60098 - DNA, 1329 bp, Bovine  19866881098399
  misc_feature (1)..(1): n is a, c, g, or t
ngggggtggggagtttgtagaggaggaagatagagagagactgattcgttagtgaaaggcctgtaataaagtcttaataaaagcttgcattcttggcagcgagaacagtgccttactcatctccatgatctccagcagcaaatagaggacttgaagcaaagtgagtcttcagaaaatgtgtgttttcatagaatcacagagagggaactagagaacccccagagatgacagtgatcagatataagggtccgcatgaaaggtgagaaaggaacatttggaaacatctggcatttgtgtatcaattttcatttggaaaacatataaggctgcttccttctaatttaatcctcattacaactccgtgaagtagacttaagattctcacgcacctgtgaggaaaggaaaatcagagaagtgtctagaccccagccactctggtaacagcgtcaggtctaacatacaatttctggtattcttaatctctgcttttcatatgctttcttattttaagttgccgttaaaagacaacagcaagaaatacattaatggattgatttccttcaaatatatagtctcctatgatcttcatggtactcatagttctcaaaaatagatacataaaaaggaaagcgcataaaggaaatcaaaggatgtttacctttttcttggggacactgactctgttgaatgttttgcaaactgcaaaagaggaagtaatctaatacctgaccacaaggttggattgcctcagtgctttttctctaagacaaaactgtggactgtggcaacacatgtcctaacaagttctctgccctggtccagccctctcccatcccccacaggtagaactctctttcatctgagtgtctggacaattaccttggagatattgatattgttttctggtcctgaccaacaggacagatacttagtcaaattgcaagtgaccagttagagcacatattttgaccctgaatgtgccttcacgctgtatcaagatgacctgttagtgtgttggtctactggactacactgttaacgcctttgatcaagaattaagcttattcatcctcatgcttcttgggcctagcgctgaacttggcacattgccaatggtcaacaacagctgtggaagaactggaagtagcatgctgtttttgatttgtcagagtttgaatcaaaactagaaagagtatgcatcaacaaacgagtggataaagatgatgtggtatatggggaacggaatataatggaatacccactcagccataaagaaaggatgaaaattttgccatctgcagcaacacggatggacttggcatgatgcta

SEQ ID NO: 60099 - DNA, 732 bp, Bovine  19866881251906
  misc_feature (1)..(1): n is a, c, g, or t
nggcaagagtctggagtggggtgccatcgccttctctgtaagaaggccctgggaggtggcaaaaatcaggtgaactatccgtggatgtttaaagtttgggaatcgccactctaaaggcagagtttcacatatttggaaattcacatgttgtttttcccattgctgcctcttcaaaatatgtccaaacaatctgaaagcaattggaccacagcagtgctgcacgtgcatgaggtatcttgttaaaactctcatggtttcagaatgtcttctaaatataacaaaatcaagtacccccacccccaatcagtaattagtcaacccgggtacacatggggctttgaaagcgctcatctctgctgtcaactgtaatcaaatcttccccagacttcttgttttccggatttacccaaagccccctgacttttatcagcaaatcctttttctctggaaacatcgccgagttagaagactcgagagaagaattcaaaattaaattgttctgccgttttctctctgggaaatggatgcaatcaaaacttacttcctctgattttcttttccttaatttttcaggctaaaatgggcttttttttgtggtgttgggtgttgttgcctattttgtttatcctcagctcaccccttccacagctgcatccagacaccttttcctcattagctgcaattcatcttctagctctgatgtttcgggctgcccagatccaatgctgcaat

SEQ ID NO: 60100 - DNA, 1886 bp, Bovine  19866881319479
  misc_feature (1)..(1): n is a, c, g, or t
ntttccggaatatcgaagattaaaggaaagctttgtttcaaggattacccttacatatcacctctccctgtagaaaagggatctttgagacaaaaggaaagcataacccatgttttgtgatgacgtttggaagatctgaaggtgttagttctagaagtgaaggaagagtaacttccctcttactcttcttttccccgatttccaatggttttctcaaataagggaactacaagtttgtaggttcaccacacaagtagtacttcatgaggttgttgcctcacacactgcttcagagttgcttttttctttttttaatttctctaataagcaatttttaagttttaagaatgtgggaaataggagacatagtttttgactgacttgtgattaaacccatttactaaagcacatgttaatgggtgcaacaagaggaagttcctgaaatagtctactttaagtaaagtaaagctcatggtaagtcatgactcacttttgtgacgtggattaagaagtgagcgggccgaagctgcaggaggactcagccagctagctgaagagaaggggcttgtctcggttcccggcaagtaaagcgcggttgtgttccggcagtgtgaagagtgcctgtgctggcagcacagcgtgtgcatggggctgctggaggagagcatcccggagcagtacctctgctacatctgccgggaccccccgggtaagcctccatccctcctgcgcttacaggtcccactgtatgtccaccgcctgacatccccaccttccgtgtcagctagacactgcttccttgttaaaacttaaaaaggtttttcgctgttaagttttattttccacatcaattacttaaaacattagcataaattcatcagcataatttaacaccttacaggaaggaccgggttgtggctttttcctggagaagaactatctctttaatgtactcctgtgtgttgatttctaaataggctaatacatggttatttgaatgcattcatagcctgaactcaggctcctcctgacgggattttgaatgctcttctgggagtgctgcatgacgttgcagtattagagcaggtgggatgcccagggaccatggccggcccctttgtttcactgatgaggcaagtaggaccctgggtatcacgtgccttgtgctcaagacagttagactggcggcgccgggaggaactcctgcacctgcctcccctgcacctgggccttcctcgccacaggggctctgagcagcagtgtcctgcatgtggtgtgtgcttccagctccccggcggaacccatggaggcatctcagataaaggctgctgccttttcttgtgtctatcagatgaataacacgaagaagcaggagagttatttaaaccttcatgaatgtaggcatttgttcattcattcatctagcagcacttatgggattcctcctgtttgccagtctctgtggttagaggtaagatgaggtaagaggtaactgtgccatccactcgctcactgtatagtaggggacacagacatagaagcagctagttgtaactggatatagtcactgttgatagtgaagatataggattatatcagattctatagatacagagctcttagacatgaaggaggggtccctatttacttaactagaattctgtttcatccagttcaactagtttctgtctacccctttcaaccttttttagagaacagaagacagatacataaaaaatagaaagtaacactcaaggttcctctgcaggtgtgacctgccactgaccacatccttaatggagtttgtcttccttagtggacaggaaatctgactgtgggaagaactctaaacagcgccaactgctcgaaacactagccttgctcgt

SEQ ID NO: 60101 - DNA, 963 bp, Bovine  19866881384408
  misc_feature (1)..(1): n is a, c, g, or t
ncctttgccgatgtacatggtctcctgcctgtgcacacgtgtgcgtgtgctcaatcgctacagttgtgtctgactttttgcaaccccatggactgtagcccaccaggctcctctatccatgggattctccagacaagaatactggagtgggttgacacgccctcctccaggggatctttccaacccagggatccaacccatgtctcttacatctcctgcattagcaggcaggttctttaccactaacgtcacctgagaagccccctcatgcctgtagacagtaccaaactactaaagagacatcataaagcacagagttgggaagagaggtgcacactggctctggggagcacacacaggccggctccagcccaccacccaaaggttacagagcactgcttccgggaaaggcctggccttccagcccatctgatctgtctaatttgagagcttgtcgttgtcgtttgctttgttgtttccttagcagggctgatctttatcaggatgccggagttatttcgagctgttgacggcaaacatctggaggaggggcaggcagtggggagccttggaagaaagcatttgggattggaggaccaaggcctctgtgagtctgggcctgagaactcctgagcttctggaggaagaagagggatttggactcagttatcagcagagggagacacagaaggacactccagggactgtcgaggtaaaagaagaaactcgctagctgacaggctgcagtgctgaggctgcgggcagacagttcaggcatattgatctggcttctttgctttgtgctgggtttgatcgctgacaggtcatagacccagacctgtggcagctgtacaaggcacgccgctttgatttagcctttcgatgtcatttgctaacaatccgcccaccaagattccctaacacaacagtcactcgtcctatctcaggccaggtctacatctt

SEQ ID NO: 60102 - DNA, 901 bp, Bovine  19866881419063
  misc_feature (1)..(1): n is a, c, g, or t
nccttgctcgtctttggaatttgttcttagtcctagagcttgcctcgtttactgagtgatattggtctggtagtagttgaagggaagtctcgagtgaatggactccttcgtcactgtaatctcaatttcatctacaggtcagagatggagtgcaaagtatcgctacgataaggattggttgaataatgggagaatgtgtgggttatcatttttaaaagaaaattactctcacctcaatgccaaaaagatagtttccacacaccacctgcttgctgacgtctgtggtgttacagaagtcctgcacgggttacagctgaagatcggaatactcaagtaagtgaagggtggccaagggaggggttcagttaggtgtaagttttaattcaagctaagtcagttgttttttgtttctaactaatttttactggagtgtagttgctttactggccaactggaactgatcatgtccttggtagactccatgcatcctggtatcaggcactttggtgtaccttgtttatgtctgtcttcccttactaagccttgagttcctagaaggttgggattgtgtcttactcatcattttattcctagagcttagtggagggatgagttctcagtaacaaatgaaattcgcttctgttggatgtcataaacctgaagatgaatttcttcataaaaaagtcacacaaatgctaaaactcaagagagaaactaatttataaagttaggctttaaaaaaaaaatgtggttgtccttgatatcaatatgaatttctgaacatttgtaatttcagtaaagatttcaactggacaaattttgcctcatgcctataggttctgtttatgttaatgtttctactaatagtagttattatcacagctagaaggcaaggcactcc

SEQ ID NO: 60103 - DNA, 611 bp, Bovine  19866881653437
  misc_feature (1)..(1): n is a, c, g, or t
nacacttaaggtacttggaacggcttcagacacgtggtgagtttcatcagtggcacctgtgacctacgggcatcagcatggctggagtgtctcatgaaggtactggctgtactcagtgggctggaggagggccaggggccgggaagggatgaggttttaggaagaaaggactaaacgcacacaaagaacacactcggctcagggagtcagcggtccccaccaaccccagcaactcaccggaactcaggaagccgaagatgcccgtgcgatagctggccgtgaccacaatgaggttaccaacagcagccaggaaggagccatccactgccggccggtccccactgcccttgccctccgcggcattgtggaagaacaccagcacggacgcgttggggggctgcagggggtgcagaaatgtgggggctacaggcggccacctccccctccagagcttgggcagggcacctttgccatgtaggtgccagaccgagccaacacacaactctgggtgtgtcaacacacctaccccaaggccaggcaggggcaacagagcagcccaagagagaagtggcaaagctacttttgactggaaactccctgatggggaaagg

SEQ ID NO: 60104 - DNA, 1261 bp, Bovine  19866880584431
  misc_feature (1)..(1): n is a, c, g, or t
natgctcaaggaattcctgcagaagagacacctccatcttccctcctgatatggagacctgcaaaccggactgagaattggaggccgcaggctcgacgggaggtagggagccacaaactagaacatctgcaacgcattctcatttcccttctctgtcttccgcatctccccaacgggcatctgaacttggacttcccttccacgagctctgaggaaagcaccatatgtcagtttcgtcaggcccacaagctggtttccatccagcccactgtgatttcctcccagctgcagttctgtggaatgacccatcccccctggggcacatggaggaagagagagacagcagcagctgtggacacgtactgagcgcccgccaccagctgggagtcattctgatgacgtgtgtgttgctgatgtacagccctaagagtcccactgccatcatccctattttacagatggagaaactgaggtgcagaggtgttcagggacattcccaaggtcacctggccactggaggcagagcagggatctgagccacgctgatcatcagacttggccaatttgctgtgacagaaaaccccatcttggctaaaagatgttggccagaagaggtgagggtttagaggaaggggatcccacccagctggtcaggagtggggacaccagaggaaggattaacgaatccacgagaagggccaaggccgggccgatccgtctccagcagagcagtgttgagcccagtgactgaagccatcacaagccagggagtcctgggagggctggaaagcaaggaggactccctggaggcagccccctttggagagctggtcagggagcagcaagagccctcaagagaccctggaggctggtttgggccccttgccctgcataggtccttatcacaggcccttccactgctatttcctctgctccccagtgacaagcgcaccctccctgaagcctgcggaggagtgaggctacactgggcatagaggaagagagcagccctttggggcagagggacctgggctcacatctctggtccgagttggccagtagttaagtccccctacccccgaagctgtgagcctcacctgcaggatggcatggctgagaggtgtgaatgagctaagtgtcaagaacccagtgaggcttctggcacaccagaggtgtgtgacccgtgtgccctgcccctgttcttccttctagaacaaggaagaaggaaggcaaaatccctccacctgctgagccatggagg

SEQ ID NO: 60105 - DNA, 1266 bp, Bovine  19866880700307
  misc_feature (1)..(1): n is a, c, g, or t
ncggtcatggtgtggaccggaaagcggcagtagaatgtgcttacatttccatagtagacactcactgaagtatggctatcagttttcctatttctctgctccttgggagaagacgtaggattctgctggcctcggaaaggccaggatcctgctggaccagtggctgtttccaccagcactgcccaggtcccaaagtcactgagcctgctgtcctggctcagcacagacttctttggcagcaaggatgctccagccagccctatcttttaatcagcagactgcgtcagccctgtcgggattgtttaaggtcttcttcctcccgggactttcttgctcttttcatcctcaaatgccaaccttaccctccctgccaacagatcacacacacacacacacacacatacaccctgccatgttcaccaccacgtcctcatagtaagttacagggaattattgatattaactcaagtttttccactccatatcaccccactatccacatctcccattgtcgcctgccccaactcagggggcctgacgttattccagcaacacatatcagagttggatgaaggtagaaggagtagaaatcacagccacaggcatcctatggggcgagctgaagaagcctcagtgatcaccacgtggcccctggagtaactagaggaagaagggaataagaaatcctttgcacacagaatgttctttctagtttcaccagcacgtggaaggaacctttgcttattcacttattcaagacatatttacggagcacctctatgggctgggtacagacagctgtctgccctgaaagggagacagccaagtagaagccggtgggtgctgagcagctcagcaggagtgctgagatggagatgagcacggtggggtgagggcggggggacgggctctgattggagccacaccgtgggacagagacgactttcctgagaaggtggctctcctgagcccagtctggagggaaaaggaagctgctccaggtggcactggggcggcatgtgctaggatctgaatgggtgtgagtttgaggagcagctggcaggtcactggggctgcggcttagagccagaagggaaggtgttctgggaggagccgatggcagggtggggtggcggggtaggggggtcctccagggcctctctgaggagtccagattatcccagagtagcccctagtcctgctatgtccccaccttccagcctgtcctctgccctccaccgggcttagcaagcgaggcctcaaaga

SEQ ID NO: 60106 - DNA, 641 bp, Bovine  19866880990257
  misc_feature (1)..(1): n is a, c, g, or t
nctgccagattctcagaggccaacacctggcaagctgttcttttgcttatacgtaagacccttgcagaacacgaaaaggtttcctggttgtctttttcattttgatgcctaccgttaaaatgcagagaaaatagtatctgatgcttcaaaaatataggctgagctgataagcatattgtcctcattttaagggcttattcttgttttaatcaaccagttgaggaagcaataaacaattactcgtttatgatgtttgccttcatccagaggagtgtaacagggtaagtgaaggtgatctctgacacctcaagaagccgaggtggtggtggtgcccatattctaaaaccctctctgctccctccaacctccatctgacacacactggccaactgtccccaccttcttggtgccgctcggtacctacctcagactagtggggtcagaaaaaagaaaggaattaggaagagtgagatggagccaagactccaggcagatgctcctggttcaagctgttcaagctctgtgtctggataaatgggttcagttatatccctttctcccaagtcagagctccctctgggtctcagggtgatgctgggctgtgtagaggctgagagcagctacattagttcaaatccagg

SEQ ID NO: 60107 - DNA, 3524 bp, Bovine  19866881109197
  misc_feature (1)..(1): n is a, c, g, or t
ncttaaaggcagagaaggggacaggaggaaaacaaaggggaaaggcagaggtggaggaaagtagggtctggctgtccccaccacccagcagagaggccctcgccttgctcctctgtgcttctcggtgaggcctaaagccaccagaaacagactgggaggcacagagggtcggggctgggcaggggcacaggatgcaggaggatcaggatttttcgtgacaggggttgcattcagtgcttggcggtttaaaaaaaaacaaactgaatatccgagttgtacttttagtcatgaagccatcatatcgtaaggttccgatttgcccagaagtacccagtttgagccaaggctctgaaagcgatgctgtcattctataccacctcctcaccaaagccaagcaagcaagagcgcctctaggatactatcaagctttccttcactgtggtgtgcgagtgggagggggaccaagggtcagaaggcccagcaatggattgtgtccactctataaagtctcagagaaatcacctctaccacacccatgatgagaagttcctctaccctctgcttgaatgcctcctgtgatggggatctcatcttcttacagctatgtcctctccccagtcctgggttccaattttctctcgctaatatttgtgctattcttttcattaaaaaaaaaaaaaagccatgcttcttattcttttctccttacagagaagatcaaccacaaatagcatctgggtgtatctgtcatccatgaaagctaaactagccctcaccccaagcaggttttcctgattctagccaaacttttaaagctcccttctttccctctcccctctccaatcttctgaaacgctgtcttgcccttggccctttctgcaagcctcagccccaggcggggtgcagcgggacgggttctattcttgccagctcagacgcgcctttattcttgtccttggttctgtgcccttcctccagctttgaacgtgtccttctcagtctgagctcatccgccagctctgcgatgatgcacctcgtctcttaggctcctccccttctccttctcatcagaatctgtcacggttacacggtcagcatctcgtttccagaccggtgcaacattcttcttttaaggctcacctagagggtcatgcctggcttttccttctgtgctgagtgttaccggcccacgttagatacgttagcatcctcctctcggttcctttgaagtgggagagattatttgtttcctaaggcttccgtgataaattaccacaaactagatgacttagagcaacagacgtttatcctctcacggttttgggggctagacgtccgaaatcaaggtgttagcagggccgtgctctgaaggtttttcgaggcaagcagcttgtttcttcagcttttgatggttgccggcaatccttgtagactgattacaccagtttctccttccatcatcacatggctttccctgcaggtctctctgtacctgggcccatatttccttcttataaggatactagtctttggaactaggacccacactgttctagtatgacctcgttttaacttcactatatctgcaaagaccctatttctaaataaggtcacatttccaggttccgggtacgtatgacttttgggcgggggactcttatgtgactccctcaccctcatctttatttctctctcccgtgctcccacaaccctctaaagctttccagtcagcctggttcttctttcttgacatcctttcagtccgtcctagctcaccatcctgacagccgggcccattccgcccagcaccgactctgggaccagactaggtcctggctcccctgtttccatgtggtaacctgagaatgtcacttcaccccctgggcctcacttgcctggcctgtaaagtggggatgaaagaacctgcttcataggactgtcgcgatgatcaagtgaattcctctttgcagagaagagcaacgcctggcacagacaaggccataagtgtgaggtgtcatgtcaggccttggtcctcttgagcaggggtctctgcggccgctcccgagccagccgcttccagctccggtctgtcctcgagacacagatcttaccacgtcattccatgtcatctaaatatgttccaccttcaagtcaagatccagaaatttccaggggagaacacaggacctttggcgaggtggctctaacctactgtgcccccaactcaactctcaaagtcctgtgcatgtaggtgcacacgcatatacccgtgtacacacacacacacacacacgaacataaattgttcttaagccgtgctgcgacctaactgtggctcttgagaagcaccaaactcttccctgcctctcagccttcataccactgctcctctccccagacgtctgctacttctccttccaggtagattaagtcaggtccaccatctccaaggggcttcccaggtggaactcattgtaaagaatatgccttcaatgcaggacatacgagattcgtgttcaatccctgggttgggaagatgccctggagtaggaaatggcaccccactctagtcttcttgcctggaaaattccatgggcagagcagcctggcagactacagtccatgaggtcgcaaaaagtcagacacaatggagctactgagtgcgcgcgcacacacacacaccatctccaggacacacttacccccgccccgccagccttctagcctcatctgggccctgactcccagggccttgcccagtctttgcccctcacagctggggagctgctccaggactaggactgtgtcccatctctgcatctttggaacgttccttggaacacagcagggatgtagacatgaatgaagcacacgggaagaaacaataccgtatttcccagaccttgccagcacaccttgatctgttttccctgtttcccacttgacttgacacccacctgtcttcaccagcttgctgggaccctccgtctcctgccagccccagagcttcttcccctccagcaccctgctcttctgcggcctttcctggccttctgggcatccccaaacagcctgattaagatcccatccctccaattttcgctgatcttgttccattcttcccttgctcgggcgactcacgggctgtccctccctggaggctgttgctggtcccgtgattggattgcttgcacaccaatggggactgacgggaaaccccttcccagcgcagctgtgtgtgggcagacggggcgagaaggcccaggagcccttagagaaggagtgctgggaggcaactgagagcataaacactcacccctggagggggaggcttgcactcaacctccaccactgcagggcaacaccccagggcaccccttgccaggtgtttgccagggcaccagagcccctcggggcactttgctggcagagaaggaggtggtgagggaggaaggctttctcctggggtgtcgcccatggggaagagcctcatggggctgctccagggcccgacggctagcaga

SEQ ID NO: 60108 - DNA, 1429 bp, Bovine  19866881674704
  misc_feature (1)..(1): n is a, c, g, or t
nctcagctgggagctggaatgttctagagctggattcctggcctggacctgacgccccagggggctcctggcggtgggggagtggggagagctgcccagtggctctgttgccctggagagggggtaccgcagtgaggattcatggatgacaagtgctcggtctttctctgggctctgccgggccccagagtcttggctgggggggtccaagggctcggagcggggggatgtcagcgtgcagccgtggacacccagcctctggttgccagcgccgcgtatgagcttggtcaccttgggctcttgctgccttggtttccccacccgctgggctgaaattggactccttgaggagcctgccagggttttaccatgacagggcttggcagggtgcttgggcaccaggcaaggttgtttgtcacgggttctcgccggggtggaggggcaggcgggcccgtgccagcacggagcccacgcgcttcctctcgccagctctgctgggctcaggctcaagtgtggcttctttacagggacccaccccgggggcccagatcccatgagcaggcgctctcagccgtgatttagtggcggttgctaaggaaggcctggtacccagcctggagggttgagctgtggccaacctggattcggtaggcgaggcgaggctcccgccagccgcaggaaaaatcctcttttctgagctcagggtcctctggcctaagatgaagacaaggccgggttcacggctcctgctgattttgacatgagatgatgcagggcaggagtggaaatgaagagtaaagcaacgacaagatgtaaaacgggctttaggcatcagtctgttgcctaatgctcctggcagcgggacccgtctactccagggaccactgctgggaccccagagttcagcctctgggcttccaggtacatgagcttcctttttgactgttttactctgtaattcccaaacctgacaacccagatagaagctctagccccctcctggtgagagtaaggctagcaagccgggtgctggctttgtccagtgcggctgcagttgggggtgtgggccagctattttccagataaaggaaacagaggtgcagaaatgtaaagagaatgagattgttagtcgctcagtcatgtccgactctttgcgaccccagggcatgtagcctgccagactcctctgtccatggaggaagaggagtattttctccaaggagtatatatctccaagcaagaatactggagtgggttgccattcccttctccagagcatcttcctgacccagggattgaacccgggtctcctgcattgcaggcggattcttcaccgtctgagccaccagggaagcccagagttgtaaagaagcatctagtaagtaatagggccaggattccagccacagaagttgtctccagagcccag

SEQ ID NO: 60109 - DNA, 878 bp, Bovine  19866880431771
  misc_feature (1)..(1): n is a, c, g, or t
nctggttgagaacttgagcaatggcttgagcatcattctgtacgctctgtccagaaagaaggaaagtgcctttgatttagctgtatgcctatcaccatcattcttgccctcaaaaagcccacaaaatgtgaatgattcaagagagagttgacccttcctgtccttcatcagggaggccttaccagcctctgttgggtcaatcaaccctcttccttagaaagtacacctcagacattccaatgctgtgcccaggcctggctgagcagaaggaacgactgaggctgacgccgaagcacctgggctgcagtcccagctccacggctcttacacccactcccccaaccaaatctctccacgtccatttcctgtttgcaaagaatatcactctacctgtctaacccacatcatacgctgtctcgggcagaagccaaattcatgcttgtgaaaacttaggaaatctacaaagtactatattgcagaaaaggaggaacacacagcctgattcagcaacgcatcatctaacagcaaagacagtttaatccccaacctggtattgttcaacaaatgtggaagcatgggaaaggaaaaaggaagtcgggccagaagccttttattgaaaacgaaggttttcaagcctaaaaatgtttaaaccaggaggttttttccattagttctcagttaaatataaatatacctggaatcaagcaaaataataacgagcgcctaccttgagctcgtttattttcactgtgatgtggtggggaagacccctgatctgccagaaggatgttcttcagggccatcctgctctcacagagctccatctgccggcgtatcttctggagctctatcaacatccacgcttcttgcttgtcatt

SEQ ID NO: 60110 - DNA, 1158 bp, Bovine  19866880433075
  misc_feature (1)..(1): n is a, c, g, or t
nccatgcatgaaagtgaaaagtgaaagtgaagtcgtgtctgactcttctgcaaccccatggactgcagcccaccaggctcctcggtccatgggattttccaggcaagaatactggagtggggtaaggtggggtgccattgccttctctgacctaagtgcctatcaatggataaatggataaagaaggtattttgtatatttacaatagaatactactcagtcataaagatgaaattttgccatttgtggcaacatggatgggtggatcgtgagggtatcatgctaagtaaaataagtcaggtggggaaaaacaaatatgatttcattcatatatgggatacaaaaaaacccaaacaaaaaccaaaaaataaatgaacaaaataaatgaaatgagtaaaatggatcaactgtatggtgataaatggaaactaaatgtttggtggtgagtatgctgtagtgtaaacagaagtagaaatgtaatgtacacatgaggcttacataatgttaaaaaccaacattacctcaaaaataattttttaaaaatgtctttgcagatttagggtaatgaataactttgttttaattcatttgaagtcaaaggaaatatcttgtatgtatccagaaaagtttgtgtcatagaagatggtgagagtatcaatatttaattttttttttgtaaaagcataatacagataccatacctgctgtgctgctaagtgcagtacatgacattcagcaattaatacttaagtatttttgttaattagatattagtgttggacgtacacgtcttccctattatttcagagctgagaaaaccaaatttagggatccagtgttcaagggcagctctctttgacctcaaagctcatgatatttctactctttcagacttattttacttactgtaatttacagattgcaggttcttccaaaggagtacagaatgctatggatattcctgagatgtcagtcagacaccaaaaggaagtcccagaaaaaggcaggtggagtccacagatggtctcaacttgggctcctacaggcatttgttggagcgatggagcgtctcaggaggcctgcttgatacctgacgcagagcagagcttggaaagcttacaacctctggaagaggacatggctttaaatgaagtccta

SEQ ID NO: 60111 - DNA, 4401 bp, Bovine  19866880494807
  misc_feature (1)..(1): n is a, c, g, or t
ncaaggacaaggttcacacttcttcacgtggcatggaagactattgatgatcatggttatctcctgccgtatgaagaaggcaggttttagattttacctgtggttcagagagtatcacagggtacctcgggctgctgtgctatgtgaaaggagcttcctcttctgtctacctggggaacatctagtcagcgagaaggatcgggctcaggcatcatcacttctgcaaaacctgccctgaggttttctcatcatcatgtccagggccaattcatctatgcttctagagcatcccacatggtcagacccatgtgccaatcgagaaaagaatcaattatccatctctctgatacatcgtgtggtccttggccatctctgcctggcttttcatgatacctttggcatctctcagttggtaaagaatccacctgcaatgccggagaccccggttcaattcctgggttgggaagatcccctggagaagggaaaggctacccactccagtattctggcctggagaattccatggacagtccatggggtcgcaagagtcggacacgacagagtgactttcactttcactctggcatctaacatagaggctgttcacatggtttgttgaaagtcactaaatgtttatagggagaagccctggcttagatgctgcatccctgagccgtgtgccaaaggaggtacgttcactgtgagacagcctggaggtaaaggtcatgaacgtctagtagcccatgtggtgagtgcagcacttaggcacacagccctgcgtgtggacagcgtgtgttaacctgtcccttccaaagatctcaccacgtgtgtgtgcagagtccagatgctatgttagccatgacaatatttgtctttcttgtagcacaccttaactttccctagagaaccccatggaactaataataatgtctctttttaaaacttgatcacttccaaagctttcagagcttacatttttcaaacgaagcatgattatagctgcaacttcatttgcatttctcatggtttgtcttaaagtgtattgcaacttcttaaatttgagaaattaactttgtttcaacattcatataagatgtcttataaaattcctcaacaaaaataatatcaataataatactttttttttaattattcatcacttcctttggggccagattagattctccatatatttcccccttgtaacttgcctgcctaatttaagtgcaaagctaatttcagtgagataaaataatttcttcccctccattcaaggtatatcttcattcaataattaaacctccaccctggctctgggatttatcaaaaagataatatatttgttatgtacattcgtttttccaatacatattacaaaatcagcttctctggttcatttttttaaactcggaactaattcctcaaaatatgttaagggtggaagttacaagggtcagatctcctgtcatcggggttttaattccaaacgatttcagcattagtctttttaaatttgattgatagtagagagagatgcctggccagagaagaaaaaaaaagttggggtgagataagagaacaattttcataatgttattaaaggcctggcaataggctttcctggtaaagattcagtggtaaagaatccacctaccaatacaggaaacgtgggtttgatctctgggtcaggaaggtcccctggagaaggaaatggcaagccactccaggattcttgctgggagaatttcacggtcagaggagcctggcaggctgcagtccatggagttgcaaagagtcagatgtgacctaacgtctaaacaacaataatacaagactgttgtgctgtaggaatgaaacttggcaggtattcagaaaagaagacactgtatccacttgtttattttatattagaatatgtttgattgttcacaggaagaaactagaagaaaaataatcacatacttttggattgtaaagtttcactacttatacagattttaatgtatcatttgtgtggatcgatctgggtacagtactcagtaatgactctgctcctggagaggctgacaaaaatgattaactgttaatcttcagttctgtttaatctaaatcatttctatttccttctaaaataactggcatctaaaaatgaaaggaaaaaaataagtttgcaggacagacatttgggaacagaagagctaactcttgattacatgtgaattcttgatcacatacagaactcctattccataaacagtgtgttcttgattacatacaaaaaaacgggtgcaaggaaaacctacagataaactccacagataatactaatactatattttaatcaacatttttgtttcaaactgttgggacatcaaggggactaatacaattaagggaggggcttccaattgcgggaccagctataatcacagcccagaggcccttatgtggggcagaggggtaagctgtgctgaacattactgaaatataactttaggaactcttatttaatcttgtgtaatttgacaatgacatggaaacatcgcattctttataatgatcgtcaatcagcatgacctaccacggtcaggggcttcggatgacttctcggtctgcagtaaacagagagagcataacgtcaaagaaaacagaagcaagtggggtgggggtggaggagggttaagacagagaactggtgaacgtcgaatgagcatcttaggaactggaccagaaagagttccatttcaacgtcctacgatggttctaatcaaccccttagggtttgggcatacacctttgtagcgtcgaatactgagagctgagagtcttctattaataacataacagattataagatttcataccagtggaagaaaatctgatcataagatctgggtaagctgttttattgtaaactaaatcttagttcataatctgcatagtatttttcttagaaatgatcataagttccctgagggcagtgaaccttgctttgcaattcaggtcctacaaaaagacatgaagcaactatttcacgctaggcaagataccaagcacttttacatagtttatcttgtttgtctcaaattaagacaaggaaaaaggtgttttttaaaaatgtttaacattattatgcatatattctaaagttaaagacattatcatttagaaaaagaaacaacttaccttggttttctgactctctctctggaccttctaattaaatcttccaactgtttatttctctcttctaaactgaaagaagaaacaactgaagtttatgattaaaatggacttttctaagctaacctcactggaggatttgagtagataaatttaatgatggtctagctttctatacatcatccacccatcttgtgtctattcaggagttcagttgtgtccaactcttcgggaccatggactgtagcccgtcagactcctctgtccatgggattttacaggcaagaatactggaagtggttgccattctctcctccacattttcccaacccaggggtcaaaactgtgtctcctgcatctcctgtttggctggcagattctttaccactgagccacctgggaagacagctatatgggaacttggaattctttcctagcaactcaaattatttaattaatttttccctttaaaggttccagtggtgaagaaggagagtgatccctccttcccagccctctttgcccccacatcctggatgaccactcatctgctttctttcactatagttttgcaccatctagaattttgtgtaatgaaatcttacactcagcctaattattttgcaattcatccacactgttgcacctacccagaggtcattcttttttttattgttgtatagattccactgtgtggccatgtcacaatttgtctgtcatctcaccatgtgagggacatttaggttgttcctaggttggggctattacaaataagtaagtaagtaagtaactgttagagctcagtcatgcccgactgtttgcaaccccatggactgcaggcccacaaggctcctcagtccatgagattttccagacaagaatactgaagtgggtaccttgaaattctcttttgtgttaacacatgtgttctttcttcttggatccatacacaggagtgggttggctgaatcatacattgggtatatttaacttttaaagaaggcaccaaattgtttttaagaggttgctccattttacatttccaccaggaggctatgagcatttcagttgctccatgtcctgccaatacctggtatggtcagtcttttaggcacacttataggtgtgtagtggtcttcactggggtttaatttgcttattaatgatgttgactatcatttaatgtacttacttgtcatccatgtatccatcttcttg

SEQ ID NO: 60112 - DNA, 926 bp, Bovine  19866880558773
  misc_feature (1)..(1): n is a, c, g, or t
ntacatgaaactcccggctgtgaaaacaagacgaaaacccggggctgtttttcccaccagcccccaggggaagccgtgtggcagtcggatgcccgtttgtttcagaaagtctcaccgttctttgcacgctctgttcctctctttcctccagaaggaagttgatcctggtgatttcagcccatgcattaaacaggaaacaataataaatgtgtagaattcatatttttctaaagggaacttaaaaaactgctgctacatgttgtgtacaaaactggtttatgccacaagaacagagaatcacagatccgggtttggtacttctcgtccctctttgtgtccagttgtatagacttccagattcaaaatgagaagaaacgctgttctgtatcaaaccatctacaagcaataaatgttatattttaaaaacggcaggttgctgatcctgcggccgtcctttgatttgctgtgatcctctgagctcgtccccaacccgggccgctgcctgttgggggtgggggtgggcgtggggggccatcattggacgtgggcatctgtggcggtgggtgggagaacctcaggcctgcttgctgcctgctaggcacctggggttcccacaacagccctcacccaggcagcatctctcagcctcgggcccgcgtccccgctcgccccgggggtctcttcggggccccgaatggtcggcggcggcagctcaggcctcgctcacgacaggtgaagcggggggctgtgtctccgggccacgaccccctggacacactgtgctggccctccccctacagtcaggctgtgtggggttgagttgtcccctgggcggagagctcccgactcagacctgctggtgtgcacaggccaggggcctggacagcacgatgactccagagttggggggacacagccagtcagaa

SEQ ID NO: 60113 - DNA, 658 bp, Bovine  19866880773053
  misc_feature (1)..(1): n is a, c, g, or t
naaagtgtgatttgattgaaaggtttttgttttcaatagtatttttttttttgtagctgcctccgtgggtcttaaccttcagatctgcattctgagtaactgcctaaagtagataagggtttttttttaacgtctgacagacgttacagtttgcaggtgaatctcaggtgtcccttccctgtcactctcctccccactgtctgcacagccggcagagcctgagtggcgccgctggtgagctctgcaccacgcgcagccgccctgggggccctgactgctgcagcacagcgcccgctgctcctggcgacttggcagctccattgagctcttcagttggagcgctggcatgtcaacaagggtttcagcttacactgaagctgctggagcacggctgcaatgttctcctgaaatgggttctgaaaccaattccatacacagcaggaacagatgtcagaatccatttgtaatgtctgtgtcttttgtaccttttaaatgttttctaaccttcctcttttttgtttcgtagattttccagcaaataacattgtgaagttcctggtaggctttacaaacaagggtacagaagattttatcgtcgagtctctggacgcctcattccgttaccctcaggactaccagttttatatccagaatttca

SEQ ID NO: 60114 - DNA, 1425 bp, Bovine  19866880784094
  misc_feature (1)..(1): n is a, c, g, or t
ntcccttactgtgttccatctggggcaacccctagagcagcatttcctgaaaggaatataagtcctcagcagtgatgctcacaaagctagtgaccgcacacacacatttaggaaactgtgacgcgtaacctccgtgtggtgattcacaaacacctaagcacacacaagaactccaaaaggcctggctacgaggctgtttgttgcatttcttggttacaaataaacttgtttaactcagcatttctcaaacttcctaatttcatgtcctgctaaaaaaaaagaaaagaaaaccagtgccagttaaactaggctcaaggatgctctcaaataggacattaaagatggcaaagtttgaaaatatgtgtatcttgcagtagatgaaaggacttccctcatagtccagtggttaagactctgcaattccactgcaggaggaacaggttcaactcctggtcagggaactacaatcccacatgcctctccacacaggcaagaaatacaaaattaattaaaaagaactcaaagaactaaatatattgaatctaaaagaaaaggataattggccctgctgtaacctgtggactcaaccaacctcgaacagaaaacgtttgagaaaaaaaattccagaaagttcgaaaaagcaaaacttaagtttgctgaaggccaacaactatctacggaacgtttattgtatttatgaccatttatcttacattagggttattaagtaatctagaggcgctctgaagcacaggggaggatgtgcacagattatatgcaaattcgacaccatcttccatgagtcttgaacatccctggattttggtatctgcaggggttcctggaaccaacctccctgacaccaagggaccactgtaccggtcactcgggggggttttggtgcaaaacagactttgttcacttaaaaagtaacttccgggtccacctcagaatctaactgtccagctgtcctcagtgagcatgtgaagctctttaaattcagatggcgtgtaattaaatcattcagctggtcgacaggtagttgactttcacttgaagccacccctttgcctctcagagagccccacaccctgaaatgactcaagttcttaacaccaccattaaaagccttagcgctttccaagcaacaggcttgggcgtaaagcacagtaagtctgcagtgagtcagatgaactttgtgagtcttgcggggacgctggaggattcgtaaacctgctcctagcggaagggtgcggcggctggggctctccaggcccccctgcaggactggaagggcctggccccggtcagccgtcttcatccttccccatctcgccaatccgcccccagaggggctgcaggccgggcttccgcgtgtcccaccccagaccggcccaggcgttccatccaggtgcccaagttgag

SEQ ID NO: 60115 - DNA, 954 bp, Bovine  19866880910088
  misc_feature (1)..(1): n is a, c, g, or t
nctgactatctggagaccggggatgggcaggaaggtaaacctgttgggcttttgtgagttagttttcttttttattaataatcccaaaagtgactgtccttatgcagaattgtctgagcacagtccttccagcccagcgtgatggtcccctatacactggtagaagtccagcgtgagtcacggcccccggtacagggtgccctccagaaaaagtcccagcctcacatccctccagcgacggaggcggggtctgtttctccacctcgtcctcaaggctgaagactcggagttaaatgatgctgtcgggtgggggcattgatactttttctctctttttttccttttctccgcgtgcctctcttcctgtgggtacctgagaaaattctcagcctgtttgactgtggcctgagccaagaaggagcgctagctctgggaagaaaaggtttactttcagtctcacgtgactgtccgtccatccatctatccgtccgtccatccatccatccccccatttcacagtgtttgcccctcattccttccagccaggcactgtgtgctgggtgccagctctttctgagagagcccagcacgacccagcaggggcagagccggcccaagtccaggctcggtcccgtcccagggattcagagagtaggtagagccgtggagggacccgtggccttctgtctgcacgtggggcgtgcaggggacccacaggggtgtctgggccattcgtcacccgcctcctgtgtcctctgggctcctcagggcaccagcttaggcttttgaaaagaggtctgggcgagaggcaggatggggaagatagcacgttagaaaaacgcagcgtggtccctaccgggctggacgggagggctggagggcgccctgaggagcagagttccagggcagattagccaccgctggaagccagcaagggtgccagattgtttcatt

SEQ ID NO: 60116 - DNA, 1606 bp, Bovine  19866880935399
  misc_feature (1)..(1): n is a, c, g, or t
naggagctgaagagacaggccgagtctggacggcaagtcggccaagcaaaacctatacaagtgctacgggcagatcaaagaactcaacgagaagatcacccggctgacgtacgagatcgaggatgagaagcgcaggagaaaggccgtggaggacaggtttgaccagcagaagagcgactacgaccagctgcagaaagcacggcagaacgagaaggagagcctcggctggcagaagatggagtctgagaaggccatcaaggagaaggagttcgagatagagaggttgagagtgctgctgcaagaggagggtgcccggaagagagaatatgagaatgagctggcaaaggtaagaaaccactataatgaggagatgagtaatttaaggaacaagtatgaaacagagattaacatcaccaagactaccatcaaagagatatccatgcagaaagaggatgattccaaaaacctccgcaaccagctcgatagactctcgagggagaacccgagatctgaaggaggagatcgtccgtctcaacgacagcatcctgcagaccacggagcagcggaggcgggccgaggaggacgccctgcagcagaaggcctgtggctccgagatgctgcagaagaagcagcacctggagatagagctgaagcaggtcatccagcagcgctccgaggacaacgccaggcacaagcagtccctggaggaggcggccaagaccatccaggacaaaaacaaggagatcgaaagactcaaaactgagttccaggaggaggccaagcgccgctgggaatatgaaaacgaactggctaaggtcagggccaattatgacgaggaaatcatcagcttaaagaaccagttcgagacggagatcaacatcaccaagacgaccatccaccagcttaccctgcaaaaggaagaggacaccagcggctaccgggcccagatagacaccctcaccagggaaaaccggagcctctcggaagaagtcaagaggctgaagaacactctggcccagaacacggagaccctcaggagggtcgaagagaacgtccagcagcagaaggccaccggcttggagatgtcgcagcggaaacagcagctggaggttgagctgaggcaggtgacgcagatgcggacggaagagagtgccaggtacaagcagtctctggacgatgccgccaagacgatccaggacaaaaacaaggagatcgacaggttgaagcagctgatcgagacagaagccagccagaggaagtgcctggaggatgaaaacgccaggctgcagagggcgcagggcgagctgcagaaagctcacagcagcgccacggagaccatcagcaagctgaaggtgcaagaacaggagctgctgcgcctgaggctggactatgagcgggtgtcccaggagaggactgtccgggaccaggacatcgcccgcttccagacctccctgaaggagctgcagctgcagaaacagaaggcagaggaggagttggccaggctgaagagggcagcctccgaggactcctctaagaggaagaagctggaggaggagctggagggcatgcggaggaccctgaaggagcaggcgatcaaggtcaccag

SEQ ID NO: 60117 - DNA, 1247 bp, Bovine  19866881124481
  misc_feature (1)..(1): n is a, c, g, or t
ncatccttcaacccctacccacttctttttgtgcctttatcagactttattttaatggccttcttaaatgccagtctcccgtgctatcttatgagtgccttgaatacaggattgtatcctttattgtttatatttgtttttccaacacaggactgtcctttgttcatgtgagtgtgatcaacatttctggaattttacactgaaagacaaaaaaagttaataaggggaattcctgaacttattttactccaacaggttaatgatcttctcctggggttgtttccatcttagttattgcttagaatgaaaattacacccttttggggacactcccagaaaagctagtaaatgttctcgaagtctttgtttatctataggatggcataatgccataaatgaataattacacgtgtgaagtatataatatgctgtgtaattaaagacgagctgctaatagaatctacctacctacaagagctgcctcttagcaagtcatcttcagggccagttgtgcaacgtgtctgcggaggacattccaagtagaatggagaaaccataataaaggaaaaccgagacttccctggtggtccagtggttaagactctgcgcttccacttccgggggcatggttttgatccctggtccggaaactaagatcctgcatgctgtgcagagtggccagataaaccaaacaaaataaaggaaaatcaagcaaagtagccgccgtaagaaatctaaccaaacatcacttatgcagaagtatgtgtatctattctcctgcgcatacgaaaggctctcttttcatttttcgtttgtgcttttcaggaggaccattttcatttaggaggtttaaatattcaaggacctgtccgatttgctggcagctcactcttaaattcaatcatatagatccctgaaaattggcttcctgatccaatcggaggtttagcatcatccaaataaaaccacagagatctttcaagaggctggaagtacataaggaccatacatgctctcttttaaacatgtctctctttgaaagctgaatgtaaacttcttcggtatccgggatgtcgttttctttcctcctcaccatcccctcttcacacttctttgtccctctcacggggagctgggaattctctgtatttcacaaacacatttgagcagctacagtgtgccaagcaccaccttgtacactacctcaatactcatgcttttctagagacggatgggaaaacggcagc

SEQ ID NO: 60118 - DNA, 2892 bp, Bovine  19866881235539
  misc_feature (1)..(1): n is a, c, g, or t
nttttcccaggcagtttttttaaggctcttaattttatgatgatttaaataattctttttaaatttactgattatggaacgaatcccacatcattatcagaaatatggaaatgatgaagaatgaaagtccatgtaggctaggactgcagggcaacatagcctgcaaatctttcagtaaattcgagagccacaaaaagtcctttaaaaaagaaggcgtctctgaatgtctagaatatttcaagtgcatttttaaaaacctcttgggtaaaaaataaattaaaaaaaaaaaacctcttgggtaaatgtgattgatcctacccttcccttagggtactcccctaagtattgatgctttaatagttaactatgaaccaagggaagatgtgatgaactttaggcttgtatgtaaatctagagctttcatttctgaaactcatttcttccaggccaatagacagactcccagcttcaatgcagctaaaatgtctactccagcagacaaagttttacggaaatttgagaataaaattaatctaggtgagtttttaagatataattcctctcactaggcaatgagaaaactcttcaaagacaacaaaaagtgttataaaattttattagatcaatcaatggatatattgagtgttagagggtaaatattaaagcttagaggaaattaaaatttggtagttaaaaacatgactttaagaaaagattccagcttacacttttttagtcctgtgttctctcctgttatggaaatacaaaggtgcagtattcaagttatcatcggtttgtactagattttgtagtagggttatcttgtagtagaatggtgaaaacacttgaatataatcaagtgttgaatataataaactattgaatataatcacattttgtttgacttttggtgtggccttaatcatttcatgagccatcgaatgcagggaatcagtgtgaatttgaagcctcttgggaaacacggggttttctttctctcgtagacaaaagctgttaggagcatggtatgacagctctcacatctgatcatccctagcacagacctgtgattggaagtgaaactgacatttttagaattacaatatttatgatagttgtacaaaatattaaatgtctgaaagagcagataaaatattttttagggatttctgaatctagatttctctggctgagaaatgacacctgttatgatgaaagtgatcatctttgttagtaagtgcttgcccttaaaaacacaaaacacacttttcgttactaaaatacattgctacgtgtaataaaatatttaaaaagtagagaagggaaaggggaaaagtatcctattcagaaactttttcttatatgttgtttatgttatggatttttttttagataagctaaatgttactgattctgtaataaacaaagtcaccgaaaagtctcgacaaaaggaagcagatatgtaagtaatatatcaagtgtatacaataaagtaaataaaatgtgactgatatgaactaattgtagacagattagtagcatctctgtcataattcttttacaaaggatgttcttttttacacctaaatcaattcttaagtttaagttaggatatcctatgcctttgtaagttgaaaatatagatgagttttcttaagaaatctgtgctgaaactataattgtgtaaaattcatgaaagtgctctcagggtaacagtgcttgtagatttcagtttaaaatgttagagtataaaaaaatgtcccgtttttaaagcttattaaggattggtccctttcatgaagtaattttttaaaatggaaagtgaaagttaattgctcagtcgtgtccaactctttgcaatcccacggactggacatgcccagctcctctgtccatgggattctctgggcaagaatactgaagtgggttgccatttcctcctccaggggatcttccctacccagggattaaacccgggtctcctgcattgcaggcagattctttaccaactgagcccctggaggagccttaaaaatgtaagagcagatttaaaactaaatagtttaactgaaaacagtttccatttacatttctgttctcaaaaccaaatatttaagatttggctcacctcctattgctaataactctaaagcattaacaatatgttacagaaaacaatactaagatcataaaaatagcagtgttagaactgaacttaaaacccagttttcttctggtttattattacacgtaagggataccagctttttgagaaacagtgcatcttatttcactaaactgcctgtttggatatttattagtttaggttagtctgtgaattgagtcacatagtatgtgagccaaagtaatcagagtctgtttttatacagtagctgtgttgaaatgataaaagcttgtttctttgtagaaaaggactctgaagagaaagccttataaattactttaattctgtactaagaaaatcattaacggtctaagaaacagtacttacagacttgttctttttccagcgtagtttgttttaccgcactgctcttatttaatccttctgaaatatggacggaagtttttttttcttactgcagatacgctccctttgccctagggaactgaacggcttgtgaaaggcagtgaagtttcactcaagggtgaaactacaacgaggttatgaaatgtgttattaaagaactacctgcttaggaatatcatggaacgatgtacatttagaatctttagattttggctcctctgaattctgaatgtcacctttacttttttggttttgtcttaggtatcgcatcaaagataaggcggacagagcaactgtagaacaggtatggtgtaaagaatgtgttgcatgctgtttaaagt

SEQ ID NO: 60119 - DNA, 1351 bp, Bovine  19866881329834
  misc_feature (1)..(1): n is a, c, g, or t
ncacacacacacacgcacaccttctcccacaaggtatgttctttgctgacccagcccccaggaacaccacactcctcgaggagccttagaggagagtcctttcggcccccaggggcccgcagccccagacttgggggccagggtgagggatggcggggacaaggatagccacagccatgggcacccatgtggcacctgcctccacgtggggcgagccgtgccaagcctcctctctcatttcaaggtcacaatactagattatgaaagagtggaaaagcactgccccagaaaatgggccacggggactttcctccgggtgaggaaggcgagaaacacgcggcagtgaggtcccgctgagagagtacacggggactcggggtgtgggtccctgcaagtgacaagacacgatgtggaggcaacaggggagatgggacgacctgagagctatctctgaggcgtttttatgtaggagagattctatcacagacactcgtgtgtctcataagaaccaaatacttttctatcatgtttcctagcagctatgattttattttttcccttgcaaattcaggtgggacaaatgttctcataaaataaacatctccctgtctttaaaaaccactgataaatagttcaggcaaatgaatccttgcctctcctcaaaaaatacgggaggactgtaattctggcaatagaatcagctcctcaggtgccctgagggaacagaggactcaactgtccagggtttttacacctaaatgatgacatgggtctcccaggatctgagactcaaaggaaacactttgtctacgacgtggtagtaactatacttcaagtcttaccttaaaagataaccacaaaagtaaaattactctgtaaaaggaacacttaaaaaaaatccaagccacactaacttgaaaaatattttggggggagtcttaactttttccaagactatagcaagtggtttaaagcaaatccagatccatgggaattctcagagggggccctggacacttggactttatttccaacacaattgattcccagagaggtcagcgaaaacgtcacggcataaggggatcacaaccgcgatgtaaaatgtccagggaaaacagaaataagcgtcgaagattccagaagcttttctagcgtcttcgagattggtggccgcatctctgccttccgcccactccgaaggtgaaggcgtctcctcacctaaccttcctgcgggcctctgctgtggctccagccttggaaaccagtcttgccggttccagagcctccagccaccttctctgaacgtctgaactgcgggccgcttgcccccagccgacccgcgaggcgcggg

SEQ ID NO: 60120 - DNA, 1755 bp, Bovine  19866881359259
  misc_feature (1)..(1): n is a, c, g, or t
naaggggaaccacaggcagtcatgtcctctccaggggggctcctgagcattcactttgctcctgagataatgcgcttgatcactgaggcagtgtggacgtgcagaacttaaggcacaccggaagggtaacagggtacgtggccagagaaaatcttcccagataaaataaaggaaacgggttacctggagacttaacttcctatagccaatagtacttgtgtggaagaagcatgctagaagaggcctggagaagtaaagctggattgtccgggggctgtagtgttccctgcagtcatccttccgtattaccaggtttttttaaggtctgacctgttccctcctagacgctgagtctttagcagattccttccctgcctcatctttggtcagttttaggaggcgggacacgggtcaagagggagtctgagactccttgtggggaacaagggtagagaaagttcgctgtatgtggaccatgtgagcttcagaaaataaaacaccacagaatcgttttggctgttgggagtgagggcgatgcgctgtagggaacatcagttaagagtgaaaaacaaccacagaatgtggttttggaagaaaaagaagactcagacatctcccgtacggttccctgtagtctggtgagtgcagcggtctgagattacagcaaacgtggtttctgtttttccttctgaacctttctgcccttgcttcccttccagtgtcgacgagagatacgaagagaagagaaaaaggagccccccagcctcgctgcctcgtccgtgcgcccaacccccgcagcagatgacgcgctcatagtgcatcagctggggcggagaatggaggtaatcgccagtgcgggctgggttttccttccttccattttctgggggaaggtacattacatcttcatatgttttaagaaacagccttttttatgctgatttgaaatttggttgtaacgttgggtggtggtgtggcttctcagttgtcttacagtttggactcccccattaaaatcgggtattgcggcctggagttaggtgagagccaaggtttctcaccttccgtttctgggtctagaacacgcttgcagtagtgagtaggctgctaggaggccgctggccagatgggccctcccggccttattaactgttggagcctttcccactctgcctcgtgaaagattagcaaaggaagaggacctgccttgggtcacctcgtcggtggcccatactcagaaaggaagcaaggcagtcagttcagtgtgacagcgcttggttgagatggaagcttcagtcacgtgagcacgtgtgtcggctgaactgaaggggagggcttaacctggctgcagcggtggtagccgtggcccctgccacctgcctgcccggtgcctcaacttcccagcgatcacatcagcagtttctcactttcagttctgtggccgaggctttctagaagcttaaatccttgtcccaatgacgtcaagctcgcccattggcctggagggttcagacttgtcttccatcaacaccatgatgtcagcagtcatgagtgtggggaaggtcaccgagaatggcgggagcccccagagcgtcaagtcccccacgaagcctccgggaccaaatcggatcggccgaaggaaccaggtaagcgtccgtgcgcgtgcagtggcttccgtgagagcactgagggagggatgtccccttgagccccagctccctgagccagaaccctggacgtggtctgaacggcaca

SEQ ID NO: 60121 - DNA, 1193 bp, Bovine  19866881686092
  misc_feature (1)..(1): n is a, c, g, or t
nctacagcttggatgaatcttgagaatattatcctgagtgaaataagccagacgcaaaaggacaaatactggatgattctactcacagtacatccctggagtgtcaaatctacagagacggaaagaagaatgggggctcccaggggcgatggagaagacagactttaaagtgggggaaatgagaaagttttgaaaatggatggtgatgatggttgcacaacagtgagcaagcacttaatcccagtggagcgtacgcttaaaaacgctgaggcagtaagttgtacgtaacgtctgttttatctgtaataggccactgccacatgaatgctaaaggcaccaggccattcggcggctcttttattggaaggtgcagatcgctcctggggacagccccgtgaaatagcacacacctgtgcacacgagacagacccaggcagggcaggtgaccgagggcaggttcacactcgaattttaggcctcgccaggggacagcacaggaaacagagcactcgcaccataaaactgcagagcaatttccttatcaccatctccacgactcagaattttttttttttttacaaaagtcgtttaccaaggggcaaagttctcagcccacggaactcccggggctaggctcccccgctgctggcagagtccttccatgtcccgcagagctttctgggggctgggagggggcccctgggtgaggcggcagacgatgccaccgcaccataaatgaggggctgaaatgaagctggtcaagaggtctggtctgggaacttgcttcaactgcccaggttcagggactattttgagaatttcatttagccagagtcaaacaaggcaattggtaacttgcctaatttaagtcacctgtccccaagccggggtcccattcagttcctcctgcattgttggctggacaaagatcttagcacatttttctttttaaaacccggtccagtggctctctgaggctgtcttcagtcttctaaagactctctggccacctactggattttttcagcacaagggctgggcagaaaaagagcagctcgttgcccttgttcaaaggaaagcgagaagagacgcagacgagaagctggtgagacttcaccatcaagtacccagggggatttgcaagagaatagctcagacacggccctactgccctcctctcaaggaaaaagcca

SEQ ID NO: 60122 - DNA, 1056 bp, Bovine  19866880429789
  misc_feature (1)..(1): n is a, c, g, or t
natgaaaaaaaaagcagtttacaaatgtttcttatcttctttgaattactgcaatttaaaatgaaaaaatccaaagaaaagttaatatatttcatggactgtgttaaactttcccataagcatagagattttgatgttgagaattttatttccggaacctgggtctggatggaaaccaagtacccactggcagatgtatctgatgatctcagccaaggtcctattagaatgatctgagactcctttgtggatggttgcctgtgatacaaagcagtcttaagtcaggatagatttatgtgcattggcaaagccaagtaacaaacgaaacatgttctcacagtatgtctggcctgagcctgtgtgattaaattctgactttgatgaatcccagaccttcagggaagcgaaaataaagtccaaagacagttggttaataagaaattactgaattggcctgggtctaagatgttgtagcaaaaggaacaacatttaatgtctgcagagaaacagaaggaaaaaactagaaaataaaaattatattttttccaaaaatgatagtccatcttcccctcaattttgctttcatcacattttgtatattatagatatgtagaatattttatgatcaaacttggatcttttattaaattcagagaagttgctattaataattatataaggacaacaaatataatctaggactgctctgggaaaatcaacttatatatggcactgattccaaagcattacaagattttgtttatgtacctgtctcctcactaatatgtagattccttgaagagaaagacaattgtgtgtaattcactataatatcatcattaacccatgtaatgtctagttcatggccaaaatggaatattttgttgagagagagaagaaaatgtatgacttaatgtatgtattgatggataaatatcagggaaactcaatcttcctacaaatatgcttccccagtatattttcaaattatgttagatcgaactaattttattttatacacacaataaaggtatatatgtaccaaaaatgggtttt

SEQ ID NO: 60123 - DNA, 2628 bp, Bovine  19866880547701
  misc_feature (1)..(1): n is a, c, g, or t
ngtggagacaggatttgaactagacactccagctcaagaggacataaggttttgtttctgccctccaagggtctctgcttccccgagtcctgtagaagttctatagtcaaatcccactggccttcaaagtcagattccctggggattccctgtcccttggccagatccccaggttgggaagcctgacatgaggctcaaaacattcacaacagcgggagaacttctttggtatttttttttctccagtttgtgggtcgcccacctggagagtatgagatttgattttaacgtcattgcacctctcctaccatctcactgtggcttctccattgtccttgaatgtggggtgttttttcttggtgggttccaacaccctgctgttgatggtcattcagcagctagttttgattttggtgtactcaaagaagaagagcacacatccttctactccaccatcatgggcttctccccaggagcccatattcataaccatcattctctccagcttccttacacagtcatgagcaaagagtccgaagactgcagatatttagcctggaagagaacaagaacaggtatgaatgcaagttagatgagaaaataagtatagtccatcagtatagttttacagaataaatggttggcactctgggggaaaaaaaaagatgctctttggggagaagagggtatagcaatggaagaaaacaactttgtcacaggataaatctgcttagggttcaccatggtcctgctagacaggaaattgtgttaatggtttcagcattcagttttctttcagtgcccaagaaagcagctttatgttttcactctttttccatcctgctgctcatttttagcaagacatgtggctgtgaagccaaacccaaagtgacacatagataatgaatggtggcattacgtgcagggtgtgcagcccccagggtcctctggtgtatgtcactgctgtaggcaacacctttgatagtctcaggtaaaggttctgtttttggtcatggagcttctgtgtattttctctaataagcactcagtggggaagtgctaaaacaaggaggtctgtgttctcagaaggattacggtgagcctcagatgaaaccacactcagcagggctcaatccagaataaatgattcataattatatgtgaagacaaggtttgagttacatattagttttgctctgaaaatagttttacatctcataagaaggcagtgttttctggacaggaattgaagcttccgagaagatccattttgggtgttaaattcctaatgtgtgttcagagaatggatacagccaccttttacttaacaacaaagacaggtagactggagccatttcccaaggagaacattgaactggtctgaatgcatagcatactggttagtgcagtcttaagacataggtacagagaaggcaatggcaccccactccagtactcttgcctggaaaatcccagggacggaggagcctgggaggctgcggtccatggggtcactaagagtcggacacgactgagcgacttcactttcacttttcactttcatacattggagaaggaaatggcaacccgctccagtattcttgcctggagaatcccagggacaggggagcctggtgggctgccatctatggggtcacacagagtcagacatgactgaagcgacttagcagcagcagcaagaggtaggtaagctttgcttgcaggccccagagtgtcctaatgccacttacccccaactacatctgtaatagccttgcccaccccatagccaggcttcatcttctcataactgctctccactgttaaactctcaactcccaaaccctaaagaacttgatccctcaaagcaaactgataaattaattcaatctaacatgttaatggcacataacgtcctaaaacacaaccttttctgtgaaacacatttacatttaaataactttcattgttttaacctgaaataaagtgaataatatgagctaaatggtcaatccttttgagaccctttggccagtggacagtggggacaagctagagttgtttcatccagggattttcaaaacttactcatcatcaaaatcacctgggaggggcttgttaaaacctgggtttgtacccctccccagaattcctgattcagaaagactggagggctgggatatttgcatttctagccaacccctaatgtttctacctgggtaccacactttggaagccactagttctgatcttgtagtgcctttggttattatcaaatcacatggtatagtagatgatgactgtaatttgggtgaaactatggtaaagaagccaaagtatggatgctctcatggttcagttcagttcagtcgctcagtcatgtccgactctttgcaaccccatgaatcgcagcacgccaggcctccctgttcatcaccaactcccggagttcactcagactcacatccatcaagtcagtgatgccatccagccatctcatcctctggcgtccccttctcctcctgcccccaatccctccctcccagcatcagagtcttttccaatgagtcaactcttcgcatgaggtggccaaagtacggagtttcagctttaacatcattccttcca

SEQ ID NO: 60124 - DNA, 1276 bp, Bovine  19866880620442
  misc_feature (1)..(1): n is a, c, g, or t
naaatttggctgttattccaggtatctcttgacttcctacttttgcattccagtcccctataatgaagaggacatctttttggggtattacttctagatctagaagtgacctctttgataggtcactttgaaatcttcaagaaagcccccacatcacccctagtagagaaggatcaccttcccaatgccttttactggagcatccccaaggtcataggtatggctattgtgcccctgagtctaagacatggattagatcggtttcagaactatgttggtgtcactctacagattggtttgggtaagaaagatgccctgaccaaaagacgccttttggtcaatctataagggtgatccacgaaatgggctcttgctcaaaaatagaattttcacctattggctatttcagcaatgagctaaagtcataaataggataccatttgtttgactgcaccagtttttggtagaacctgtggatttgttctgaaatggcatattttggagagcataaatcctccacaatccactgtcatttttattatgtagacatagtctaagttctttactgtagtaatgttgaaccagatgttcaaagtataaaatctactaaaataatgtttggtactaagcttagaatgctggtagcttcagcctcactttattcagttttgcatttctgttatgtttctgagccacaaagatgtttaccttgttcttttttttttttttttctttttttttttttaccttgttctttgattgcacctattttaattttctccttctagcattttatttatcatcactagggattaaagtcatgggtgatatatgatgacctccagctattttaacttcaagttctataatcacttttaattgacttctaaatctaggctcatctttgagttaaccttcaaaattgtattccaatagctatcttaatacagtatctctttactgactgatctttacttaactgacttaacatatcattcatctctaaaatacacaaaatgagaacctctacttgatgaattccctcattcagcaggttattattagtaagcccataaatatgcttatatgtctactccttcaaaataagttgactatttatttatttatttttgctttggattctgttttattctaaaatacagcctggagtactataaaaagattcttgttttcttataatatctataatatgtctttctgttaattattgcttggtttatttaattttttaatattttatggaaggataattgat

SEQ ID NO: 60125 - DNA, 1665 bp, Bovine  19866880677653
  misc_feature (1)..(1): n is a, c, g, or t
nttattttaagatataaaatgcaactttactgtgtccataagtttgtacaatacataaaatatttcaatgcatctcattaaaaattgcatgactctgaattgattttctcaagtatgatagaatcattcatccttcatttgcaatcattttttgagcaactactgtttgtaaaagagcacattgtttgccctcagcttgaaattggagattaagataggtatataagaaaatttcctagtttgtggcacaagcaaagcatgctgggagagcataacagaagaaaaaatacaaattctttttatattctttcctcttcatgggacaaaattctctctgggatttaaattgtctacaattatatggctatatggttctacttccaagtcaaagtacaaattttgggggaaggtccttattctttattatttttgatggaaaatgatgaccagatgctatgtaaatagcaaactaaattaagaacttataaaacctcagataatttttatactgaaaatttacttaatttttggagaaattacatttaatgcaattacattaatagccaaaatttggataacttaggttgggctttcattgaaaccattcataagaaaatataacttcttcttaaatacaaattactcatatcccagaaagtccatagagaaacaatacctaaaacgaccggaaactgaatttataaggcagacgtttcacttgattgtcattgacaggtgcaaaaaagtaccacttttgttactgaagtccccaagaagcaaagaaaagccaccaaccccctccatcctcccacaccaaaaagtaggacttgataatacccacctttgatgattttctaatttataagccttgccaggatgtgtacagattgctaaaagttcttattgttgatattttccttctcctctcttttttaaccacctatttatctagcaaggtacagagagaaaaagaaaatgtcttttttactattctggcaccattttgatttcactatcaaagccctggtaataccacaaccatatatttataaatccaactccttatctagcagaccaacctcaccctgctcgctcatcatcacagataccattgtctccctcgtctttcatgcccactatcacaggcatgcatctgacactaccctttctccctgtcactaaaaaatggatgtcactaagccttgtcacttttctctacagcatctctaaagctccatcttagccttccaagtctgttaaacctttacccatgttttatcctgtgtgaagacataaaatgggcttatgagacaaccagagggatttatcttgaatataagggagaatttcttgaccatgaagcattggaaaaggcttttataagagtctgttataatgtttaaggatgacagattgaccttggatgggaaccactgaaaagtctctgaaacccgattttattcctcttcttatttggggccttgctttccctctcccgtatgccgtcctcactctggtgcttcctccagctcctattttcaccttcattatttctttctcagccaagtaagtggacttctcttttggttgatgtattagcatttctttacaaatacccatgaacatccctctgaagagtcacttaaatgaccattacagcagaag

SEQ ID NO: 60126 - DNA, 1313 bp, Bovine  19866880725973
  misc_feature (1)..(1): n is a, c, g, or t
nattaagttctgttactcaagaaaaagatggatattaggcaaataccaaatatgtttaccattgacatcttcactttcccgttcatcttcgtcctctaggtcctggtttgctatccagttggcaactccttgagtgttctgtatctgaatcattttctcctctctttctgtatgtctttttcattatttcacaaatccattgcctgttcttgtattagttacttaagcactctaatgtgtgtgctcagtcacttaattgtgtctgactctttgtgaccccatagactatagcccaccaggcttctctgtccatggaattttccaggtaagaatactggagtgagttgccatttcctactctaggagatcttcctgacccagggatcaaacctgcatcttttgtgtctcctgcattggcaggtggattctttaccactgcaccagttgggaggcctaatcacccgaaagttcctcatatatatcatttttattcagttctaaactactcttactagccactattttttctcaatgctggccagctctgccctttgactacaatcattgactttacatttttccacatttaatccagatgctttcagagtctttgatcctttgtgattgagaaaacattagcctctgatatgatatctgttatttgcttcaaaataatccagtgttgggaggggggaaaagtcagtgatgtgtaaatgaaacaagattagccatgtcttgaaattattgaaattgatgatggatttgtagggggttcattatatcatttggagaaggaaatagcaacccactccagtatccttgcctggaaagtcccagggacagaggagcctggtgggctgcagtccatggggtcacaaagagtcgggcacgactgagcgactaacactaacatgtccattgagtcggtgatgccatccaaccatctcatcctctgtcgtccccttctcctcctgccctcaatcttttccagactcgttttggactgatatttttgtttttaatggccccaaatcactaaggggtaggagcctcaaactgattttgtcaaaccagattctgaactatggctatagaaaaccagaatgcagataacacagaaagcagtgaacacagaggaggggagtaaagacaaagcaattatgctagaatcctttcacttaaaaactcaagagctaaatttcaaaccacactaagaaagtgaaggctagggaagatagaaataaaccaacaatcagaaaattaatttattcaaataaattatttttatgctatagccagtaaaactctttaaa

SEQ ID NO: 60127 - DNA, 2513 bp, Bovine  19866880748363
  misc_feature (1)..(1): n is a, c, g, or t
ngttgatttccttttaggattgactggtttgatcttagattttcttttctttgcagttttatatttgtcttcagggaacacatgccccctccccccaacacagcaattctgaagctcctctggtcttactgttatctcctcaccaccacaccagtgtggaccactgtaacccttgaaaggctatcactagaaagtggacagagaagaaatttgaagaaagattcattcattcattcattcaacaaatattaatttaaagcctaccatgtgcaaggctgtttagatgttggaatatagcaatgaatcaaacagaaaagctccctgatcttatggaggttaagttctagtgagtagagtaaacaaatgctgtcagatctcctataatgcttattttgaaaatgagaatatattccaacctggttgatatgttagaaaataatttaagcacaattcaaattttatgtttgcttatacataatttcttctgtgagaaacactagaaagcagaaagctataccaagctgaatcaagccacacaggaacacataaagtggacgtgtgtaagcacctcaaacgtctaccagctacctcaattctctgagtatgttatgagccacatctggtgttaacatctgtctaaaagcctctttgctccacttcacaataactcacgagctgcaaccccctccatccccacaactacaagcaaacttcaagtctttttcaagataaagtgatgtatttgttgcagtgtggttcagacagtaaagcgtctgcttacaatgcaggagacctgagttcagtccctgagttgggaagatctcatggagaaggaaatggcaacccactccagtattcttgcctggaaaatcccatggacaaggagcctggtaggctacagtccatggggtcacaaagagtcggacgtgactgagcaacttcacagtagttatgtatattttgaccagaaacatacatgaaactgtgatgccatttttattgtttgaattttttaaaaatatgccactggtaaagtttttgagtgttgggctcccaactccatttttcctatagctccatgattaatagtatgtaatttcacataacttgatgatttttaggaatacatatgtcactctcatagcagaattattcataaacaagcaaactatcaaataagataattccaggtaatggtaaatgctttgaaaaattctatcaaggaatgtggttgagagtgttagaatgaaatagggaggcactcctttagactgatgaccgtggaaacctctctgggaagggcatgtttgaattcacacttgaataacatgaagaagtcaatcatatgaaaaaaacaaaaacaaaaaacactaccaacaacaaacaaacctgggtaacagcattccttgtaaagaggtatgaggatgggggtcatggtttggggaatggggtttatgcagaggtccgaaagcaaataagcttgtcagaggaacaaagagaacaagagcaagaaataggcagttgaggatagtagccagagcccatatcaccgggacatggtaggacatagtcagtcactggaattttcattgggggatttttcactgctaatagaactcactccatttatagatgagttctgggatttatccttcttatgcaaagttacattaaccattaagggctagaacctaagtcgcacgtcctttagaatggaaatagatgtacatatggagccatccttaaaagagtcttttacacgaactttggggaagaaggtaatgattgggaaaatttcccagattgcccccagattctgcatccataaattgctttctctagcgtgatgatattgggaagaagtctggttttaacaggttgtatccagtatcctgtttcactccactgaaaggaaaatagaccagacaaaatgtcaactaagccatcctagatgacagcaagatttgtaaggcagccagcccagcttagagcaactgccagagcccagatctacccatgccaagtagtgctcttaagaaacctaatgatgcagtcagtggacatcggaactgctccctgttctcctgctaactgacatctaatgcaaggcaggagagtttcctgacagtgaattacaaagcccagcaatgagtcattggaagaagttgtaggatttcttcttttagatggatggacttttatttttttttaatcaaagccagtcataagacaaaagaataaatttaacctgacaatggactgaatgccacaggctaaatgtcttggcccaaagcagcctgtttggagttttgctctatgccaagcagaagaggcagctgcatctggggtgtggtggcaggagctgctgaggatcccttgtgggtcagaggaggcgtctccacccccacccccagagtgcactgcctgcagccttgagctacctccactgccttccgcctcagccctgcaagcccaccttccctctcccagtctccacttctctttcagatctt

SEQ ID NO: 60128 - DNA, 980 bp, Bovine  19866880767957
  misc_feature (1)..(1): n is a, c, g, or t
ngcatctgatgggcaaagttaaaaaaaaaatcaaataagctttttgttttcctttaagcagttcctggcaatgctttctttctttctttctttctttttattttaagcagatgagtttttaaacaatgattgcatttaggactttcaagaaagcttgtaaaccacagatttgaggagcatgggtcctgaggcctgaactgtgcgctggcttggcgcacacactgcaggatatcaggaaggtctgatatttccatgcgcacagacaagcaagcacagtaagggccacatcagccaagcaccctctgggtcccgagcctcagcatacattttgcagctctgtgaaactggtgtgttaagccaggatctgggtcctgggtacagggtgagcaataaaggctgaccagacttacatgggaaaaaaatatttgtcattagttttgatagctttttcattgaaaccctattttctgagtgcacgcgtaaaccaatttcaatatttgccagtcattcttgttgcttggccgtctttgtttcctttgtaccgggacacatttgcctggtctcgcagtctgtctcccaagagtgctcttgatgagatttttttctttatcaggaaattgattttcttgcatctctttctgagattactgaatccaatcttgaggcaaataactcaattcttgggaaaatgtctgatttggaaacctggtggttgattttttcccccctggccacagcatcaaagctgtatgagcatataccagtaacaggtgaaggagatgcctcctagacgagggtcctccctcgtctcaaccagtctgcctcctctaccactgctcttcctcaccctgggttccgagcaccctctttctacccttggtgtgtcctgctcctgtgtagccttttactctctttatctagttctaaatcttagctgaattttctgtcttatttcttacacatcctggcaattcctcctg

SEQ ID NO: 60129 - DNA, 1527 bp, Bovine  19866880776266
  misc_feature (1)..(1): n is a, c, g, or t
ntatttacaaatagacagattatctatactatggaactcagtaggcctgggaaatgctgacttactataggcacatctctcaaattgaaatcaatacattatacttcctgttcattgccaggaatggccttagtgacccctgggccaggttggcgctgagtgctgccctctctaatgctgggaagacagaattcaactgagccagactgctaggaattctccctgccttcaacctggaacacacacacacataaaaatactaacttttaaaaatggaagactactaaagaaataaaactaataatacagaaaaaatgggataatgtattttgtaataacgaacgttcttttttttttaatgactatggttgtttctggaaatctgtaatttttctttaattttcatattttcattgtaattgttttcaatgtgaaagtgctttctgtatttgtgggtagtgtgttatttaactctactcaaatccagggtccacgtgctccacatccctccttcacgccctgcctcctccagacacacacagtgacctcacacgtacatgtgtggtcttctgtgcatttacacacatacatgggcttccctggaggctcagatggtaaagaatccagctgcaacgcgggagacctgggttcagtccttgggttgggaagatcccctggagaagggaacagctacctgctccagtatcctggcctggagaattccatggtctgtgtagtccatggggtcgcaaagagacaggacaggtcttagaacccgagcacacagacgttcattcattcactcattcatttatttagcaaacattatttctgaaaccctacttcatgccaaccacagtacgaagagagtaaatccattctatacgcttacttagatggcaagcaagtaggggactcattcatccacaaataaccttcactagagcataacgagtcagctaatgtgcaagtgagccaagcttcctgtcatgggccagcatgctccacccacctctctgaaggaatgggatttggaccaggtttttaggaatgcagtgcccttctagcacttggcagaaggtggaagcctgccaccctgggcagagtgagcaaatcaggagagcacaggcacatgaggggagcgacaggtcgggtgaatggacagggtccttggagtcaaggttgcagaaggcaggttgtgaagagcaaaagccctggatcttccctgagaacttcctgacttctctcttgagaatagtttaaaattctaagtctgaagacttagagactagagagtcttctagaatgctggattggaaaacatgagaaacaatcaggctacatttttggtggcggggaacctggtggggctgctgcttcctccttctccccctcctcttcctcctctttcccctacaaaatagcaagaatgcatctttttgtaataattttgcaaacaatggtgcatagaaggcttagacgtggggaaattcgggtgccactctgtactagttttctattcaaaaa

SEQ ID NO: 60130 - DNA, 1283 bp, Bovine  19866880781990
  misc_feature (1)..(1): n is a, c, g, or t
natgatgatgctttatcatttgctccttgattttggactcagatgcttggttgttttcctgttttatgtttttctggccccctcaagtgtttacacctttttctgcttaagcattttttttttgtctttgtttcctgcttgactagtgaatttgtaccatgttagattagctatattgttgcaaagggagatgttaaagactctctcttttaggtaaggaggatctgaaggaaaggtactaataacatgtatgacaaaattaaatatttatgaggaagaaggaaagatgacataatgagaatctgagtgtcagctgatggtttaaaattttcataaacccaaagtctagcaattcacactaccacagggtgaaaatttggcaaataacattgactatattttttagaatctgtcaatcaattcaattaaataattttctattgttttcctatagctataaatagataatttaagacataattttatttcttaatatgtcttcctcagcacataggcacagcatagaattaagaagactaagaatgtttgagaactaagaagacagaaattaatcaaccaacagctagaacttagtactatagtgttttgattcttccttttttatcagtattttgattcttcctttttttttttagacaatgaaaacaaaagggcaggtgatttgaaattaacactttgctatctggactttttttttttttagtttcgctacatattgttagattctttaatcatgtattattcaattaaaaaccaaaccaagtaatcatcatccttaagtgatgaaatacatgaaatgaaactctaaacagaagagacaattgaaacagattagtttccaagcctcagttttcttgattgatactgtcttttcaaaacaattgggtatttcatgttgttaaaataacagggagaaaagaatatattctgcctgactgtgtctctttggtcatcttttcacactctattagaggctttatctgacttttgtattccaactttattgtatttttccggtgctagaagaaacttcaatgaggacatgataaatggccatattaaattgggtccctcgcccctttttaattaaattcatttaaatttaattttgtaattttacttcagtaaaccatctgactccagatgttggatgcactttttcttatttctgttcccacataattgtacctgtaaaagatttatagctgcaggagacattttggaaccttttagagcatttttggcatatgtttcatggatga

SEQ ID NO: 60131 - DNA, 1713 bp, Bovine  19866880812350
  misc_feature (1)..(1): n is a, c, g, or t
nctatgggattctccaggcaagaaatactggagcaggttgccatttcctcctccaggggatcttctccaggggatcttccctacccaggaattgaacctgtgtgtctttcgtctcatgcattggcaggaagattctttactgctgcactaccttgaaagtcccatatgttatttatattatgcactgtttatagttcatatacttattatatgtatttataagtgtgtatatatatacacatatatatagtagctgtagggttttattaatatgtatatatgtttatatatgtctagatgtagtaagtataggatatgatcttttattatctgctctttttgcttaggtatacattttaaatccttccttaccaatgaatatagttcagtatcactttaaaagctgttattccatggcaatgagattcattactttatttaaaaacttctattcatagcatttgatttttggcttgagtgtttgctattacagataatcttatgatgaacatatgtttgtgaagcttttgaaagaatatgtcagattttatacaaatttctgcaagtgccactctagaaaggtggtagtgattcactgtcctgccagtagcatatgcgcatgccaagtgtgccacaccttctccaaataatggtatcaccactctttgtaatctttttgctaggaaaataaaatatagcctcatttaaaatttttatttctctgttttctagtcactttgaatatttttccttgtgtttcttggccatttttaatatacttctctgaattgctttgcttagcataattatgtgaaaaaaaaaaaaagtgttctctaaattgatccctatcataatcctaccttgctcactgcagagattttagactcagccttgccacacttccctagcttactcaattcactgtttttctctggagtaggcaagactcaattattcattgttcttaactattatttactctttggaaataagaacaggggttggaggttttcagatctaagattggtcagtattatttcctttcccatattctaacgacctgtgacagaacacctaccctttaaaatgcattaactaccaaggcctctgctccaaagatgaaaaaaccttgaactctctctcccattataatcgcctttatgcggctccttggtcaccagtacatccatttctttcatttcttattgttctggctccattattagttgttgggtctaatgtttagcgtctctattcaccataccctttccctgcctgcacctcctctgtgcctagagttgccaagtctttaatgaaagcactgatttgcatcttgatatttcatttgcaattgtcattttatcttaagagcttcttttgtagtcaaaaaataaaaaatctaaaaattgcttataagagacacgaatttgctgcttcgagcagttgcccaggtaccagggggaaaaaaaaaatcaaatctcatgtaactagttattagagcctacatcggtaattggatttagatttataggaaattcagaagattttccagaaaaatggctgctgttaaattactttgaacattaggggtccaaaccaaagcgactgtccatgtttccttgtgaaaacctccctaagctgtaccgcttcagagaggatccatgtgagaaaccattacagcgatagattctcaaagcaattttcataatttct

SEQ ID NO: 60132 - DNA, 3012 bp, Bovine  19866880812642
  misc_feature (1)..(1): n is a, c, g, or t
ntgggtacacttacgcgtgtgctcatcctgttgtgtctgactctttgtgaccccatggactgtaatcctccaggctcctctgtctgtggaattttccaggcaagcatactggagtgggttgccatgtcctcctccaggggatcttcccaacccaaggatcaaacccacgtctcctgaattggcaagtgttttctttaccactaagccacttgggaagcccgtgggtacacttgggaaggcttttaaaaaatacttatgccagatctcaccccagactttctgttttatttgctgttaagttttggaaagcattcaaagattaaaatgcttgtaccattctttattctcctacttaatatttactccttcaaatatcatatacttaaaaaaaaatcagtttctggcatatggtggactctcaatgcacagttgataaatgagtgaaaatgatgtacagatgttaagtgcatatgcagttacacagtattaaaaatcactgtgtcatggataatgtcatatcatttaagtaaaactgtttagttgcaataaaattgtattgtatcaactatagactttgatggaattaattctgacttttctctcacttaataaggagggcttttccatgtctaatagtttgtacaggtgggtcatgaaaacaactgaagtgtctccttggtcctgtccagttcctaccaactgtatgtatttccttttggaggcctggtttagtctcagagggccaaatgaggcttagtaacattacgagaaggactaaaattagcttattggagattttccagggacacaacgtgctgatttgtgtgtccctagaagggaaaacacatctgttcccaggatgacgaaagaatatccattctagtgaagatgttgagggcagcctgtcacagtgaactaagcatgtgggtgctgggactctactgagatgtggttgggttccaaatcgatttcactgcaggcccctttaataatccaaagaagaagggaaaagggagcttggccaaattgtgtgatgctttagccgctcattggaaacatctttaaggaaacagtcaagttagagataaagagcatctgcctttcatctccttcttcctcttctcctctattgtgtcactgctgttgtcatcactgtaacaagttccaactgaagggcccctcctccctctctgaaggcaccaaccaacctatgctctcatgtgtaattcacaaaacatccaggaaaccatgaatccttccacacttgctccttgtccaccccactccctggccttctctcccagatttctctttatatagactacctttcctgtaggtggtcacggaatgggtgtgggatgtgtaccaggcacactggtggaaggtatttgaggtcatgatgcctgtatagacatgagaattgactgaaatcatttggaagtatgtccatttttaaacaataaaaagacacttctaaagaaggatacattagtgaaatcatttgaggggaagaaaaaaaaaaaaaaatctcccaatggtattttcaagattcttagagtggaaagaaaatctaagtgctatagccaagctgaaaatgttctgtgggcagcgtgattgtggatgactgtattctctcgaagccagcaggactaagtatatactgatccatattcatgcttgggacgagcactcactgtctcaggtgtgatgacaaaagcagcaggaagttgttcaacttcaggataagagtgagagcaaatgactgcttgtgtgagtagcactggatttacttattctccaggcaaatgtgtcccctttggcaaaatatgtcactcgctgaaaaatgtatcactatgcaccatcttctcagagagagaagtgtggtaaatgaatttcatgaaagaaaaggattttcagagaccagaaaggtcggcatttcggttccacccagacagaagctgtaaccaaaaataatcgagcagatctgtgattaattgtgcagcaacctactccttccatattccactcaatccctgagtaatctttttgtttgtttcttgtcgctgctgtttcaatgacaggtacaattttagcttagtgtgggttttgcaaagataagacaaagcaacacagtttggctgtatagtctaaatgctgtaattacaattttcctgtgagagcaatattttggatataaactgtactttacaatgtagtgggttttaactagcaagatatacacctttctaagtaggccctattaaaacaatttaatagaatgtcaacaagtaccaacatgtacataaagatagaattgtgtggtttgttttcatgcagtgagctagtactgctggggtctgtcaaggactattgaagctcaatttgagctaacaagattacatgattggaattgtattaattgaacgcctttacttttcaggctgacaaacgcaatgcctgatcagttgtaggggatatacttaagaaatatggagtattttttgcttgtgtaaatgtgtttgtgcatatgtagttccaaattagcacaggcatattgatgtttttgtgaaaaaatacatttttttaaaaaaaaggaaaaaatagggctacattcatccttaaatcagtttggtcaagtgctgatgagaatttcacacattttgaatctttaaagttctcctgagtggagttttcctagatcagaattcacactgagcacactcaattgtagacaaaggaaatcgtcactgacagccatcatggaggcaaattatgcagtggatttaaatagccagaatgtattctatagattgtaagacggtgatagtttattaccttgcacagctcagaagcagtggagcacttcctaatactggaatagagacttcatgttgcatcccaaagcaggatagaggatggtagctgaaatattccctttcacacactcacacgctcatattctggacaactgggggatataaaacccaatagataacaaaaaaagaatgtaaa

SEQ ID NO: 60133 - DNA, 1312 bp, Bovine  19866880821883
  misc_feature (1)..(1): n is a, c, g, or t
nctgcccaattacatttggcttcatttgttgaatagctacagacaaaacagaagtgtagcatgtgagtataatcggttctgtgtgaccctctgctgctgctgcttctgctgctaagtcgtttcagttgtgtccgactctgtgcgactccatagacggcagcccaccaggccccgctgtccctgggattctctaggcaagaacactggagtgggttgccatttcctcctccaatgcatgaaagtgaaaagtgaaagtgaagttgctcagtcgtgtcagactcttcacgaccccatggactgcagcctaccaggctcctccatccatgggattttccaggcaagagtactggagtggggtgccattgccttctgctcaccctcaagcacttattaagagagctttctcaagggcagagtggattctaaccagtcaaaaccacctctttccatgagaagagtcattctactagtgtcctctctgactagttatgaaaatagcttctcagggaaccagacacagtggtgatactgtagcatgaaaggaattctgtctggggaagatggtttgggtttatcattgatgggttaagatccagaccatgaacaactgcccttcaagtagccatggtgatgtcaaaaatttctgcgggtaaggattaggtgttgcctttattcaccagagaaaaaagaaagcttggatcattgggacaatcactcatatcaccatctgtgagcatgttgctgtatgggggaaaaataacaggctataaacacacgatttacctgcagaagctttagaactgcaatttgaagccttacagacgtagctcgatcttttatttaaacagccttttgttcccatccaagaaactataagcaatttataaacagagctgaaccccaagtttcataacagacatattcttgagaaatacgtgacttaaaaccatgtaactaaaagctttgacattatcttaaattaaccctgaaagatgatctattcatcatattttatgaagcagaatatttaaatacaaaatatcacaatgacattaataatcctatcaaatgtttactatgagttatgatttgataaagctacccttaataaggctgctaattaatttttttaattttacaaatgacacacatattttatcttgtggttggtcttatctggctttgcagataaactgtggaagatatgcagaacctggaggagggaagaagggcaagtcttgagtgactgagcctgtgtgtgtgtgtgtgtgtgtgtgtgtgtgtgtgtacacacatgtgggtgttcagccaa

SEQ ID NO: 60134 - DNA, 1661 bp, Bovine  19866880843545
  misc_feature (1)..(1): n is a, c, g, or t
nctcagttttcccataagtgaaacagcaagcttagtcaaagatagtctagaatccattcaggttttagtctattctatcaaaaatcacttgacctttaacatacgcatggagaaactatgcgcacatttcatttcccctcagaataactaccacgtattattaaaccatgggtttggtgagatccctttggaattacatatttttgcataatccatgaaatttaatatttggacagtgcttatgatgaagtgggggaatgagcaataaacagttaaaagcaagttgtgcaagatgttttgcctttgtctttatgtaaccaatggaagcgatgagaaaatgagaaaaaaagggccagagtaagctgaggtattttttaacaggcaaaatgatcaaactctctgatggcaagaacaaaattttataaatgctttttgcttctactttaaaacctctagcaataaaaataaaactttcttaagacttccttaaggcctcgctattaaaatcctcctaccaaggaaaacttctcaagagagaaatgaaaatttttttgatgtggatggaacctaaaaaagtgaatctactaaatgagaaacatttataaacttgattattctcttcctgtctgtaaattatctgttactttctctcttcctttagttgttcctctggtttagctgattcacacgtgtgaaatagaaatacatggcacacaggcttccagtccttcttgctgcacccatggcaggcataactaatcaatcatagtcctctttccccatgctttcttctgcagccatagcatctttgccagtgcagcatcccatgcagtcactatcagagttggcataatgcataacacttacttgtccaccaagaactagaggctaactaggtccctagtagtatgattttccaggcctaccaccctcacagtagtagctttgtccatcatatcattcaataaagtttaaaaatggctgtgagagcaaaggcagttataagggaagttactatgattatgaaaaagggaaaacatgaaaaatatataattagtaaattgcttttttgcaagttatctatataatttattgaacatctaccctgtgcccaggtcagacatgatgagaagggtaagcctatgccagccttttgaaggcccttatttcactcctcctttaattcagcactattcaggacttcccttgaggtccagtgattaagaattcacctgccaatgcaggggtcatgggtttgggccctggtcctggacaatcccatatgccatggggcagctaggcccatgtgccatagctgccaagtccaccctctggagcccgtgagctgcaactactgaagccagcgggcctcgagtctgcgctccaaagagaagccgcggcaacgagaagtccatgcactgcaactagggagcagcctccactcgctgcaactagagaaagccacctgcagcaacaaagacccagcacaggcaaaaataaataaataaacatgttaaaacccactattcaatggctacttagatttcatcttgaagctaatctctacataatcataatgatctcagagaaagcattgagctgtcctgaagagacatcttactagtttcctgcctaagaattgaacctacccgctagtccat

SEQ ID NO: 60135 - DNA, 2058 bp, Bovine  19866880857365
  misc_feature (1)..(1): n is a, c, g, or t
ncctaacaatgaagaaaacaggcctactaaaaaatcacatctgttatcttggcctcatatgcaccctgctgaaaccagcttctccacctggtcaaagagatgggagagtataattatattttaattaattcttggcattagaaaactatatctgagtttgtgcattttataggaagaatttagactagaaatgtaattgatgacatcagtgctaaatttatactactgttgactatgaatgtactacatggcttcatacgtctttcataatttgtccttatgtgtttatctcctttattattccttccattttccacacatcctacagttaagccacatacgtgacttgacattcccataacatatcgtaattttcaattaaatattcattgagcaactattatacagtcatggactgtttttacagtgatacttgccctgaaatctaatagtcaaaagaataataaataaatatacaaatggatatttaaatcaaagtgtgacatttttatacaagtaacaatttaatagggcttccctggtgactcagcggtaaagaatctgcctgccaatgcaggagatgcgggttcaatccctgggtcaggaagatccctggagaaggaaatggcaacccactctagtatttcttgcctgggaaagtccatggatagagcagcctggcaggctgtagtccatgggattgtaagagtcagacacaacttagtgactaaagaacaagaggattaacttacacaaattaactaataaaagttaaaaaccatagctgtcattattaaaaaaaaaaaatgagggtgatcactgcctatttccctgcagtgatgattttaggaaagctttatttgaaaatcaggtggcatggcctctttcggtctttcttttttctttctctttttcctctcctctccaggagtgatgttcctgtcccaagcacagtggtaacagaggaggtggagtacaaagaaaaaacatctagcattaatgtttcatctgttctgcgctttgttttccttcctctggcttctaaccttaatcagctgatttgctcacagctctaaatttccttctcacttcccactaatctccattttcagataagcaatctcttcctgctgaaattgaaaagcttccactaaatggaatcaatcacactatcagccaaagagaaatcaagatccatttgaaaaggtcagataaagtaggacatttacaatgttgatgatgctacatttaaacaagtgcactgcatccttataatgacctagttcaggaaattgctgtgaagtttaatgatatgttactaagttacactgcatttcagcagcctccatatattgcgatgtgagccttgtaaataatattcgagtagctaaagcagaaatttaaaggcaacattttatcaaccataatttaatttgcccaacatctgatgctaaagtgcagtgcttatgctcggacaatgggtactcataaaaatgttcatgtactttttcttttgggggccaaaatttcatttctttcactagatgaccatttttatcatcacagcaaataatctgagctttgtttatgcatcagtttattctctgttatcttcaggtgtctgatttaatgccagtcacgctttcttaggcttcccaggtggctcactggtaaagaacccacctgccaatggaggagacgcagcagacacgggttccatccctgggaggggaagatcccctggagaaggcaatggcaacccactccagtattcttgcctggagaatcccatggacggaggagcctggcgggctacagtccatggggtcacaagagttggacaggacttagtgagtaaaccgccaagtctgagaggcaagccaatatttgaaaaggtgaacatttttggtgttctgaatcctgaaatactccttcatgtttcaatcaacaatcggtttgatcagaagctctcagtgtgcactttaattagcaacaggatcaaatgttaacaaattctgtaaatgcccttctcagcctactgtctaagaggctttataa

SEQ ID NO: 60136 - DNA, 1469 bp, Bovine  19866880922581
  misc_feature (1)..(1): n is a, c, g, or t
natttatttttttatgcacatccttacaagtcccgcccccatattaccgttgtcgcccccccccccaacttctctttataaccactaagcaaaacagctggggagaagcaatcaaacattgttttatctttacaaaatacagaaattgcctactaaaaatcccatttctactttgaatgaaagccattcagtacagtataattttgtaggctaatgagccggttttacaggcaagtgtttcgtgtaatatgttgtgggagaaatgaaaatgtccttgaagtgacatcatttaaaattgactgtcacaaaggaaaggaaaaaagtcacacatttaaaaacgagaggattttaattcaaacttcatatccaagaacgggcttagttttattaaaatttccagttgaattatgactcactgagggttctaaatgtctggaatgaaccatgatgccctcatttaaagaaaaagatgaaagctttcccgccaaacttttaattttcatttgagcatggttaattaccgtgaaagagagaagggggcatttcctttcttcaatggttcctgcttctcccaagcacagttacctgtttacagttagaaaaaaaatacccggttctgagttatttatgaaacttccaggacagccttgaaaaggaactcaaaaaagacaccccaaggaactgctgcaggactcatccggagaactgtttccttactagttaacactttgttaccaaaaggaagaaagaggatgcacccggagtcttttaaaatataagctctcttcctgctgttcttcccattccaagtaaagggtagggggcggaaagaacagctttggcaacacagctttgtgatttttctgttgttgttaaggcttttgttggctggctggctggtgttttcgggttgtgctgggctctgacatcattgcaagttacttggcagtcagggcccttccccagccaacttctgacccagaaaactctgcatctttcactcgtacccagtcattctgtcctttctccatcaagagagcaagccccgctgcaggcagagggctctgtgcattgaatgaatatgcaaaggagtgaccagtggcttgacgaatcatatatcgccacccacctagaggcagaaagcttatgagttgtcctctgtctgcagtagcagccaagaaaaaaaaaaaaaaaaaagttgagttctccagatttgtgaattctttgttgaaattctgcgatggccagctttaaagagtaccaccccagagagtgccatttaccttagactgagttttaaattcaagaatgaaaacaccttttaggttgcagaagaatatgctgatagatcatttcgagccaagggttagacatgatttcagtctaagtagcagtgtacacctcaaagccaatccccatgtttggtccagtacggaaagagagagacaaaagcggacagtttagtgaca

SEQ ID NO: 60137 - DNA, 756 bp, Bovine  19866880993691
  misc_feature (1)..(1): n is a, c, g, or t
naaacccagatatctctaactaggaagagaagtcatgtacacacatgtgcacagacacacacacacgaagatttgtagatcttgttaaatgaagttcttaattcttatcatctgatgccgtcccttcaactgtcaaattttccaaatgtaaaatcttaacgtaacatttattatttttatatctaagaaaatatataatgtattttaatctccaaaactagtacaggaagaaaaaactgaagtcacgtgagtgaaagtccatattggtgtgggatttgaatgtctgtatgtgacagaaagttgattcatattggatttttgtatattttagagcctgtaatgagttattgatctgtgataaagtaaactgacatttttgtaacccactatgccatcagtatatccagtaagcacaagtttcagtaatatattattaggatcaagtcactggtagttttagcaagcacttgcaaacatttgttgcagaagagagcatatacatatttacaagtaaaagtgttaggtattcagtagagtgccaggcgcctctgtccatgggattctccaggcaagaatactggagtgggttgccattcccttctccagggtatcgtcctgacccagggattgaacctgggtctccagcagagagagaattgcaggcagattcgtaaccatctgaactaccaggaaagccccatatttacattttttcaagtgtgcctgtgtatctacgatgttttattctcttctcta

SEQ ID NO: 60138 - DNA, 1351 bp, Bovine  19866881005848
  misc_feature (1)..(1): n is a, c, g, or t
ngtgggctgccgcctaaggggttgcacagtagttggacacgactgaagtgacttagcagcagcaggggaaacaggaaaatggcattccaatttgctgacatgttctaagaaggaactttaaatatctgaagttaatactgatcatactgtgtcattgattcatcagagcactcaatgtttatatctgttctttttttactacttgctagtgaatgtttgtagtcgtctgtaagctgtcttcttatttctgatcttattaataactttcagcaatagctttaccttaatgatgtaaaggggtaaaggtccattttctttttcctttaatgtatgtaaaccaataaatgatcaaaaacttagtgagctttaattaatggggcatgaacacaaaatagacaaatcctgccctcagaaagcttctaccagtggaaatttttctggatcctaatccactcatgactggactggttatgatctttaaacttcacgttataaatcttggcagatcagaaatgttctagagtcaggcaatcactcaggatgttcccatgccctgcctctattttcaatcttaatttctcagtagatcttctaggtcagacctcctgcttctactatatattcttcccatgttacctactggattttgcatgctttctgatgttcatctcagcaattttgcatcttgtgtgtcctacacattttctgatatactattatctgtattgatggtgtttagtagcacctaaaccttttaaggagcttcccaagtgcttcaggggtaaagaatccacctgcagtgcaggagattcaggggatgtgagttcaatccctgggttgggaagatccctggaggagggcatggcaacccactccagtattcttgcctggacaatcccatggacagaagagcctgatgggctgcagtccatggtttcgcaaagagacacgtgactgagcacacacacatgcatgcaaaacttttaagtcttcatttgtagttcacataacacttgagttaaactgtattataaagtagacctgtccaagaaaatccttttttagtatgtggcttgtagaattttttttaaagtgaccttgggtttgttttttcatatgggatgtaaatgggtactatcagagcctctctgccatcactatagtgtaatatcattataacaccacactgaaatgtgttcagaattagatgtttttagctttatcctttcgtcagaagtgtttcatatgtactggtgatactgttccttcttgaatatatgaaaactccaaagtgtttatattggggagatattatggaggtgtcatattgtaaaagatagactgtatctgt

SEQ ID NO: 60139 - DNA, 823 bp, Bovine  19866881008191
  misc_feature (1)..(1): n is a, c, g, or t
nacttgagaactgcatctgaatcataaatgactcaactttttccatctaaggcacttctaaaatcaacattgttttgggaaggatggtaatagtcatacagtatttggagtgactatagttgttcagccactctataggactaaaatgcaagttgtaattaaatctaaagccttaggcttagtctctttgaaaagcaaagctgttttagatttgtggttttaggagtggctatttggttctctgtaaaataaaatatatacatatggaatagatataaatagaatggaatcacaattagtgacacacaccatcagtaccattgggattattacaaattataaaattgttatttctcttcttttcctacaatgtagagatattgcaaggattttaaagagtaatatttttgtcctttttatgggaagcaaatgctgtgagtcagtgaagaacacatgatttagatgaatgaacttttcttaacagttaaaatcattcattattcattcacacccgtactgttagttatttctcatgtcccactccaagattcaatcttcttgttattctcctcaatctcccttaatatggttcccaccacctgcagtttctgaggcagtctgataaagggaagaacataggttgtggcatcaaagggctggtatttgaattctgactttgtaacttatcagctatacaatgtcaaggaagttacaagagtggtactatcctctgctttcttattacagggttaccatgttaatagttgtaatgtatttcgaagtgctaggcatctcacataatcagtaggtgctcaacacatat

SEQ ID NO: 60140 - DNA, 2391 bp, Bovine  19866881159223
  misc_feature (1)..(1): n is a, c, g, or t
ncttatttgctattgtagagactgggagcaagaaccaaaagagcaggggattcttacaagtgggtcatagtgggagtaatttagctgcattttggtaactctaagaaaaaaaaattctatgagagcagaaaatattcactactgtcttctgtgctgtactgtactctgcctactaagggctgtgaatacttatgatccgtgtctctgtattgctccccctacacagatctgcctttggaaggatgccacagatacatagcacttgccttgtttgaaagcattctcttaggtgcagcctccccaagtctcctaaatgaaaataaaggagttggtgactaagcatgggattatcccttaaatgtcataaatttaccccagccaggttggtgctaaatataattcctagtacaattactcaacaggagtaaaataggggtttttcttagggcactggccttgccattacatacagagacatgtctgggcccaacttcctgaaggaggatgacagtcctatttcttgttttctttcagaatactctcataatggagtgaagatgcaaacgttgttagaacaggactttcaagtaggaactggtaaacaaaagcactttttgtaagttaagaaagaggtgtcatatacaattttgtttaactgctggcttgattttacactctaagaactgggacacatgatccaacaataggaagaactctggaacactgtatttattctggatactcttggcttgtattattgccaaatttaattccttaaggctgtttcttcatctgtaaaaatgtgagtcttaaaactgatttaatgctgactagttaagttcttctagtcactaaaggtaaacattttttaaaaagggactgaaaagtttgcccatatcctctctctaacatcttgctctttgtccacctgctgttctgtcttgttgagaagaggggagaaaggctgggcaggaaaagcaggaaaggaaacaccaaaacatgaacaggagaaaaggcaaaaaggatagaatggggagatggaaagcagcaccttgtagcacaagagcagtggagacgatctaaagccacgtatagagtggagaagaattttcctttgaccctccattcttcctactcaagagctgaaaatacaaagaataattcataaacaaatttaaattaaaaagtcaaatacaaaccacacctagtcaatggacatttgccatggatagcggagaaagaaatgaacttatgaagtataaagtggttctgagaggagaaaggatcttctacgtgatactcagcctgggaatttttccctacttccctcactgctcagtaaagctggggaggtgaatacaatccttccatggtaacagcatttctgtagcagccatggttgcagatgtcgactgaaactgcccagcatttgcatctatctgtccaatccatgcaaatgctgtgaacagcataaaaagttgactggtaaaacccaactctagagacgagttttaaacaaccacaaagaaaatgcttgtaaactttgcaattagttgttcagttctgaccctaggaagtggctaattgctacagattggtgaggttcaagtgaagaggacagaagcagtgaaaactggacacagaggaaaagggaaatgaaaagcaggaccaagaaggggatctcatttctcctaaggagagatatctcatttcttcttaaggaagcgacttcacagagatgctaaaagatatgcccagggtcacttcctgttgagaagggattattagacccctggtacaaattacagttacattagtatggtatttgtttttgaatattttatggctgtgcgtgtatgctcagttgctaagttgtgtctgttttttttgtgaccccatggactgtagcccaccaggctctctgtccatgggatttcccaggcaagaatactggagtgggttgccatgcccttctccaggtgatcttcctgacccagggatcaaacccatgtctcctggattgcaggtgggttttctttttttaccattgagctgctagggaagctccattttatggatgtaatacatgataaatggttcagttcatgtcatagtactgatttagatcttaactattttattgcctttggaaggaatgatgctaaagctgaaactccagtactttggccacctaatgcgaagagttgactcattggaaaagactctgatgctgggagggattgggggcaggaggaaaaggggacgacaaaggatgagatggctggatggcatcactgactccatggatgttgagtttgagtcaactccgggagttggtgatggacagggaggcctggcgtgctgcaattcatagggtcgaaaagagtcgca

SEQ ID NO: 60141 - DNA, 1051 bp, Bovine  19866881170640
  misc_feature (1)..(1): n is a, c, g, or t
naaaaaggtcactcatagctaggctttcttgttataagaattatttgaatgtttatgctcattctgaatctgccttcttgctttcttagtcaaaacagatctaataccatacttgatagctcacctgggaccttgtctaatgaaatttctagtcttcatcaaagaaacatagatgactacaatctaacccttagatgacaactaaagaaaaacaacaactacaaatccacaggataaaggaatcaatttcttccctcaagtgaaaaattatacttcatttttttatatacgtcattgtgtcttgatgtgtatgaaatactcacactgcaataaacaaactagagtatggatttttgcccaaacttaagggatttagtgaccaaattatcattctgttcttttacagtcttgttttgccaggacaagtatttgtgcattgaggatgggagttctctaaaaacgatggtgtttgacattactcattactgtttacaatttctcatgttgctttgactaccaaatgagactatttaaaaataataccaatcactgggagcaggaaaaaggtgtttgtccataactgaccaacaagaaactcacagtctacctagtttctataataatataacaaaacaagctcacaaaatgattgttattcatacttttacaactttaataaattttaaatggaaaatcagtaaaggcctagagagcaaccagtgtctgaagcagcaaatggcacatggcacatagagtattatgaaactgtaagttactcaatacatttgtttagaaagtaactaaactaaataggaaagtgcacttaacagatacagtgtgtagtgactatttaccagtagctctgattcctgctgggaattaaaaatatatgtctgccatggaactataaagagaagaatttggaatacatatgaaatgttaaaatactgcatacattctaagtaataaaaaaagtaattcattttgaaaattttaaaatgcattatgctttcagttacttctggagatcatgcatgatgaaatcaaacaa

SEQ ID NO: 60142 - DNA, 1240 bp, Bovine  19866881201470
  misc_feature (1)..(1): n is a, c, g, or t
nccaaagagaaacgataccatgtgttcttataaagaactgtacatgaatgttcatatatgtagaatttatttacatttacatttatttctcatggccccaaactagaaatgacccaaacaaatgtccgtcaaaaagtgaatagttaaacaaacgttgtacaacaatacaatggagaactacactgccattattaaaaaatgcactattgatatgtgctgcaacatggatgaatctcaaagtaataaagctgagttaaggaagccatacccccaaaaatcatattgtatgattacttttaacagacttttaggaagtgtgagcttatctattgtaacagaatacaaatctgtgtgtctaaatatatatcttaacatatggacattttattacattgattatacctcatacagttttaaaaatattatataatccttataaaatgttggttcacaatgtatataccagcatcaggaaactgttgctctctgtatctcaaaggaaggatgagacaaagacttagtttagtagtttcagttttgctaagccatattccaacagtgaactctattggcaggtgtgtccgtctctcctagtaagtaaagggcccccaggagactagcttttcgtgttgctcaggctttcctttcaaaggcagaaagcagttttggaaggcagtggagtagtgtcagcagaccaagggttgttgccctgtgtcaccttgccttcacttgttgccctgtgtcatcttgccttcatttgttcgtgtgtctgagaaatcttttaatatccctggactgcatagggaaaacaaggagcttaaatttgatccctaaaacttcttccgtgactgtcattttgcctccaggttgtagctgtgtttgaaaggattgaggtgactggaagttcaaccaccagatgataacacaaagtataagggagaagagttttatgattttaaataaaaatcaaataaaggcaattcaaacttagaaacagaataattatagtgatattctgtggtgacatagtaagagttgaataaaagatttgctaatctctttctctatttttatattttaaaaaaagagttttaaaagtacaatcttctcatctaggaatggtgccaggtttctgtcttaagtgattttttgggggtttttctttttctctctgcattaaaaaaaaagttaatactgtcccacccaactctagcagaatcccactcaactctagcagaac

SEQ ID NO: 60143 - DNA, 869 bp, Bovine  19866881229909
  misc_feature (1)..(1): n is a, c, g, or t
nccttagtttcctcatctgtaaaatggagataataaaaaaccttctgtcataggttgataagtgagtcaatcccaatgcaatatgcttcaaacagtgactgatattaattatcagacattcaattaatgcaggccactttcatacttatttcatagtaggtggctcctgaaaggatgaaaacatttactacattgtatgcagcttttctagtcagaatcatagtatctcactatttcaaaattttccctttcggtaggaacttcctttattcttacggcaataacatatactttagcaggagctggtaatccaacacaattctaatgtactaaccttttatgtgtaccataaaatacatcaagtgattactataatgatcagtaaggttaaaacatgaaccacatttcatcaaaatcggtatcttatggcacaaagagaaaagaataattacttttgaatttcaataggaggatttaagccatgataacatattgggattcaaattttcactctaagcccaacagaatagatgaaacatcgcgcaataatggaaagatatgaaggacaattttctaaaatgttttttcttttataaactattattgtctctttttccctggaaaattttgattcattgtaaaagtgtcagataattcaaagaagttgcttcaaaactatctgggctctaggtttgatgtaacttttagaaatgtttttattgaattagaccatacatatagaaaaatgcacaaatcacaggtatgtgattggattaactttcactagctgaacactcccctgtcatcagctccatctcagaaacagaacatgactagtaccccaaaatccctggggcccttttcatttc

SEQ ID NO: 60144 - DNA, 1127 bp, Bovine  19866881273846
  misc_feature (1)..(1): n is a, c, g, or t
ncatctcgggggagcccagtaggaacatcagttctcagttcccatcgcaaaagtattagcccttggcagctaaatgcaaaaccttctgctgctcctgctgtggtcctgcaacctcctaccctaagagatagtgcattgctggcaggatcagccagatttgccctttcctcagagttgaaaatgagactttgctgtccatctttgtcttctgtgcacctgcttatcagaatcacagacctctcctcccaccttctgaattcttccaaggagtctcccagcataccaactggctggggcctgtggccggccagctgcttctgtcccccaacactgacccccactggaatggccctgagttgtccccattgtcccacagtgcaggccaccccctgtctcccttgcaagggaagagctcagcgcaagcacggtgttcattccaccccatggcaagggcattgggaaacctgtgctgctctattatggttaacactctgatagaaaagttggggattcagagagccaataaacaagacccttttgccctcccgagatggaaaacaacacagaattgcaggcatcagacagataaacatcaaaatagcagctttattttttgatgaagctaattagagaatgtaagagggctttgatgtgccacccaacaggcaccctacactgccctctaaattgaacgtgtctccctaacagcacccaccacacacacaggcacacagagaatgctgtgagcatgtatgtgcgtctgctcagacaggcggctcagaacaaaagaggagggagttgcctgggcatgctcagatttgtcctccagttttcctagtcacttcacagagcctgcatgagtccgttagagtctccccataactcttctctttgtggaggggaatgaaattccctgttctgtatggcagtggtccacaaatttggttatatttacggaagacaattgttccatggaccaggggaggaggggatggtttggagatgactcaagcccatttgtagcacatattatttctgttattattacatcagctcatcttcaggcattagatcctgaaggttgggaatccctgccttatgggaaaaagaagagtgaggagtaaggg

SEQ ID NO: 60145 - DNA, 1832 bp, Bovine  19866881276388
  misc_feature (1)..(1): n is a, c, g, or t
ntgacttgagaaaggagagaaatatcctatatggttctatacagctgcatctgggttcagagccctctgttcagttgtgtagtcagatccgtccattccaggcttgaaagcttctattctgagggccatcgagagaacttggaagcttcccttgagtaggcctatagggtgtctttagggtcttatactcactctgacgtgacacgcagttgaagtccaggtgctctgtcctctctgatgcttggcctatagaatgcccgcagactttctagtcatgtaagcacacgcttcattaagattggatgggttctttttttttccccacagagaccgtgccctattgcagtttattaaaactacccatgcagtgtgccattattcttcctgcttgtatccatgaatggccaggcctcaataggaatatccaggtggagatcaataatcagtctcttagttagggtaggaaaaaagaaagagaagaaaaaagaagatctattggtgcactgcattcagctgtgttgaagaggtcttatcattaaagcagcagcaggtgttcataaaccaagcttgctgggagtgttgtacatgcaggattaaaataattgtccatcagtctctgtctcataaatgttttcctttgacttttggcaggaactccaacctgagcatatgccagttgacatgggaacactgaggccagcagtttaaggattttcacatttgcttgcactggtaagatttaaagatataataatgaaggacattaaatgttactgggtcctggctgtttgcactaggtatgacattaaccttgtttaggtgttaagtttttttgacctagataggtctctattcagttactttacaaaatcacagtaaaaacaggataaatatataatccatgaatttgagcatagtatcattggtattggtgaaaatatggaaactaagtaatatcagatttttttttaacttctgtacaattggaccaagtgggataaacaatttcccttttgaacaatgaaattgtctattctaaagagatctgattctcagagcacaaagggatacagtgtttaagatgaatgtggagaaagaaaagggctttccaggtggtgctagtggtaaagaacctgccagtctctgcaggagatgtcagagaccctggttcaatccctaggttgggaagatccgctggagaaggaaatggctacccactccagtatgcttgtctagagaatcccatggtgggctacagttcatggggtcacaaagagtcagacacaactgagcaacttagcacgcatgcatagagaaagaaagggaaagtaatcctgttttcaatacatcagtggacagtcatgcctttaatatggatgcagagactggatttttaaaagaaccaaatctgtagtcaattataggattgctggaaaatgagaactgcgtgatgccgatggtgtggtgttcactaggtgcttattggtatcaaaggcacaaccgtatgatgtttctttaaaagagaggcataatggtgaagatattggcagatggatagcaaattgtgttactggaagatagttttgaaaagaggagtctaagatctgagaccaagatataatattggtttaagtaataattaagcattctatcttttatggaagagaacagagtctctggacatattttcaatataaagtaaaaaatacaccatggatgtggttaactgaagttaagacaatataggcctaggtagattctttggatcctgacttgttgaattgaatgggttaaattcagtaataatactcattccattaccatcttcaagt

SEQ ID NO: 60146 - DNA, 1600 bp, Bovine  19866881300385
  misc_feature (1)..(1): n is a, c, g, or t
naccttgggcctgcgggcatccacccatggccccaaatcaggactcacttggtctgagtctcgcattacgaggctcagaggcttacgtgactgcatcacatcaccttgctcctgggccagtggtcactggggcattcattctgctggcaaatctaagattgcgttagaggcctattaaggcctctttcacttctgtgattccatgacttcttttattcaaatgcttaccccttgggcctgggctagcaccagaatactatcaggcagggctttctctggcttggtaaaaaggaacaatcctctttaattctctctgtgtccagactgtatcatccaagcctttctactttgcctaacaatccagaaccaaacgagtcatgtggttctcagatctgaggttagatgtcccctttggttttttgacctctcattacctgtgatcatatttatgtgcatgtatgttcgtgtatgtacaaaaatatgtctcagtatttctgcacacgtggaatgaaaattttcttccccatggaagaaaaaccattaattgtgtttctgtttatgcttctattccccaagctaggacttttgtttgagtaaaaatttgtgccttaattataaaatggtagtagatgaaaaatgtttgcatttcacaaatatatagtttcacaatctttatagcatcaactcaggctcatgaaatataatatttagttgactatttttttcttcttttccccagatattttcccaccaagaaccagggtgaagaaagttatacaagcagatggtttcaccctaacaatcatcattaatctttactttcctcatctttgtttactataaggctgagttaaagtatatctggactttctcagatttttttctacagtagtgcttcacatttctgaaaagtcacttccagcaaaagatggcaggaaaggtacatggttccctgtttctgagaaaaaggcaaagataatttgcaagtgatagaaagctggtatttatggtgtttcggatatttttgaatctagggcataagcgtttctaattcaccggaagaggcaagagagctattgtagaattacgtccctccctcccaggactgaaggtgccctggggaagcagtcttatgcctcacagtccagagaggatgggggcaggcagggaggggtgtgagagggactggacagtgattgaggaatgatggctaaaattagttcttgcttcccctcccttaccattagcagacagtctgcttctccagctggcttctcttaaagtcaaaaagttaaccttttctctgccttggcaaggacaaagcatgctctgctcttgcctgttggtacggttagagttttaaagtgtgaaaggaaagatacgtgtaaaaattgtcttattgatttttcttttcagaatgtgtctaagaaagaaaatccaagtgccaaaaaatgaatatagtattttcatgtttcatacatcaatagagactaattttttgagacttttatagacggtagcagtgttttaagcacttttcaggcattatgttattttttcctcaaagtagccctctgagatcagcattgttaaccctaat

SEQ ID NO: 60147 - DNA, 763 bp, Bovine  19866881305795
  misc_feature (1)..(1): n is a, c, g, or t
ncttcagctggtgggaagaggccaagtagtcggtgatgtagtggcctggtgctgtgagaaaggctccatatgtttcagctactctcagaagagtcactgaggtgtagatgcgttttgtgctcagccaaatatacatctacggctaggaagtttcagcctctgtgcacagatccaaaagctgacataaattttagaccataagcaatctaaaatggggcaaagcaacaaacttcatccgattttcctcccatcccagcccccctcttgcctatctgcacactgtgcctcaatttttagtggtgcattcatcaggacttttattcttaattgacagggtcataagttcatttctcgtggagaatcattctccagcccacttatttaaaatatatttgaggccaatataatagagcatagttggaataaagctcttaaaatctcagagcccagcttagaagaaaacatttgaaaatcaagcaagagatattttcagaggctgatgtccctggaatttatacaagtggtcaccatagccattggccttgagagtgccaattacagatattctgctgtctgattagagaattcctgagttcaaaggagtacattaagtcaaagtgtgggtctttgaattctgattaatgaatttgattaactatttttaattacagagtgatttaaaaacatcccagaatcatcactgatctttaatctgggtttaagaaagctgaatatctgatgctgagaactattttgtggctgg

SEQ ID NO: 60148 - DNA, 4359 bp, Bovine  19866881353330
  misc_feature (1)..(1): n is a, c, g, or t
ntactggagtggggtgctattgccttctctgaatacagtaattatttgttctcattcatgtacaatattctactgtaaaaaacagaggtaaattctacaagcataatgttaagcaaaagaagccaagcacaaaagagtacatactgtgtaattccatttataagttcaataaacaggtgaaaagcatctacactactagaagtcaatatagctaaaacacttggtgggggtaggtagtgatgaggtttctggagagatggtaatgctccaaacaataactgtcatgtcaaaattagccaatgtcttattttcagggacaacatatacatgcatgtgcacacaagcattctttgtgtttaaagagcaggatgctaggctcattgttatcatgttattatagtaataaggataaatgtaatccttcccggaaaaatgtatagcattgtagtggagaaaagataagttccagtatttaagctgaattaaactgtgatttaccttaactgctcattatttctataattggggcaaatatctatgtgctttaatttacttgtctatattgataaaattaggagaagaatatctacatcatcaaggtgttgtgaaatttaaagaaattacaaatgacatggactaaaagtgactgttaataatgatgttaatttcattcttcccactttctcaggcagcacacacacacacacacacacacatatatatgtattgcccatctttgtgatatgactgtaagtgtccttttcaatgctgttacagctcttggtcacagaaacttcaggcaacccttaatccaaatgtgacaacctgtctctgtaatggatgattagttagcattatttcttcttactggactaccatcaccatagtctctgaggttggatatcagcagatcctgttaatgtttcctttgcctattttgtttagagttagtcagctatatgtagcatatgttgctggtggtggtggtcagttgttaagtcgtgtctgactctgcgcatccatggactgtagcaagccaggcttccctgtccttcactaagtcccagaatttgctcaaactcatatccattgagttggtgatgccatccaactctctcatcctctgctgacctcttctcctccggttctcaatctttcccagcatcatggtcttttccaatgagttggctcttcacattaagtggccaaagtattggagcttcaacttcagcatcaatactttcactgaatattcagggttgatttcctttaggatttactggtttgatcttgctgtccaaggaactctcaagaatcttctctaataccacagttcgaaagcatcaattcttcagcactcagccttctttatggtccagctctcacatccatacatgattactggaaagaccataacttcgactatgtgaatctttgttggcaaagtaatatctctgctttttaatatgctgtctaggtttgtcatagctttccttccaaggagcaagtatcttaatttcatggctgcagtcactgtctgcggtgattttggagtccaagaaaataaaacctatcactgcttccactttttcgccttctatttgccttgaagttatgggaggggatgccatggtcttagttatttgaatgctaagttttaagccaactttttcactctcctctttcactctcatcaagagcgtatatagcctgctttattctcatccacactgtgcaaaccacagcccccttcttcatagctctaaattgcagccacagtgctgatggacagaatgcacccacaagcctgcttgaaaaacttgcccttctctgttagaggttacctgcagtttaggtaatgcatgattcctcatctccatagacaaacccacctactggcaactggaacatctttgaacttcttcactgatgtgaatggtccaaaggacacaggtgaaaaacctttgaagtgacggaacatcaggttgtacaaatctggggagacaggtggaagagacatggcaggcactgaaggtcacttctctacttcccttcccctcaccctttacatacatcttctaaaatcttcacagcagttccattcccttatttctcatcccattttattttcatattttactctacattcctaattctctcattcccttttaaatttttcttagctttatgtttctatttttctatcaatccagatttggtattatgcacttattgagctcataaacagaacttatgccctggaggaaaatcctgagaagttaaatacattgtattcaatttattttggaaattaatatgtcagcaagtgaaccaaattttcatttctttatatactggttaatgaacctacattttggcagccatgaaagcttctttcagaactttcccctcctcttcttttcaaggctttttagaaaggagcttcacagactagtttcaggagggggtgaggatggaagtttgatattgtaaccttcccttttctctcaagcttttctctcaagtctcaagcttctcttcttttgctgagcgtcttaaacaagcaaggggatgttgttcctcttttattttttaattgcttatgttgatgtgcaagtcaatgttttcaatgagatgcaaacggagtcgcccacacagcaataatgggggctttgtgggctgcccagcatgtgctatgtttctctgaagactttaggtccatatcccaagctctacaaaggggttagtacatttcagcttccctctgtcccataccaaggagatgctctgactgtgagaaaaacagcaggtagattagccactgatagaatatgtagtctctccggaccaccactatgcataacacttcttttccactgagagtcaattattacattttaaataatcagttgtacagagaatttaatgaaatgctgccatgatatggtaaactagagctgactgaaaagctatttttgctttcaaagatttttgctattcagttaacttttcctattaatacatcatgatagcaactgtgattagaaaagtaacatccactaatttacacctgaatgacacaggaaaggttgctaagtgctttggaagtataataggattatttttttctgtggggagtaatatattctgggtaaggacagaactctggttaaagtctatagaattaacaaatagaacttatctatcctgatttggcatgttctcgaggctaaatattcatttatgtaaggatttttgccctctatattactattagcacgtttaaagccttttattcaacatgggcagaacagattgcttatactttctcaggtccttcttacattttataagtgctgaagtccaggaaatctctatgaaaattaaggctacaagagaagagtgcatttgctgttgtctgggtaacaggcttgggcactaagtactggagacttctgcaggccaattttttctttttaacaaagaacaaaagagggttcccacttcagaagggttagctcaccctcgaggcagtaaaattggaaatgaaaggtgaaactaaggacacatatccccttagaattctgtagaagaccacagtaaatggtgcatccacaaactagtgaacaaacaatggtataaataagaataaactgagaaagattcccaaccttacaggaggagtgaggaaggctaggagtaaggaagccttcctagaaggctcaggaacctgaagaaatttcaaggactgtgagaaaagaggaattcaccctaatttacagataccataggtgaagtcaggtagcaagttttggggttggcctgctatccttaaaatgtctttaaaagttcaatctgagattccccatacaaagttcagcaaaccaaatttaaggtctacaatgtaaattaccattcctgctatacttatgtatgaccaccttattttgtgatcaagtcatttttctttgagattggtgttgttcagtcactaagtcatgttcaactctttgtgactccatggattgaagcatgccagacttccctgtccttcactaaattccagtttgctcaaactcatgttcattgagtcattgatgagttccaaccatctcatcctctgtgaccctttctcctcctgcactcagtctttcccagcatcaaggtcttttccagtgagtcagttctttgtatcaggtggccaaaggattggcgcttcagcttcagcattagtccttccagtgaatagtcaggactgatttcctttaggattcataggtttgatttccttgctgtccaagggactctcaagggtcttctccagcaccaattctccagcaccaacttcgaaagcatcaa

SEQ ID NO: 60149 - DNA, 895 bp, Bovine  19866881404959
  misc_feature (1)..(1): n is a, c, g, or t
ntctaggagaaaagctgaaaatttctacccttttcttttttaaagactgttccttgaacataaagtggtaataataatattacacacctacacagtcttttatattcaagaaacctcaaagcatttcaccaattattcttcagatccacagggctcacatttcttgggaaaggaagtcactagtgataaaaacctggtccccaatggtctgccttttcaaagccaagttaaatggagcagagtgggaggggagaggcattgctccagatccccacagtttcttctggccccgcagggccctcctttatcccttcccaaatgtttatgcagcttggggaccaggctagaataatgagtggtcatggtgaggggcaaggacagcaggaaacgagaatcgcttacagaaatatcacggccttaagcagatttttaaaacacatggaaactcttcaaaatgtagagctaaaagagagtgagaactgggtttgttggcagagggtctagctgtgaattctggggtctgttatttactggtttgtgtagccttaagggatgtctgtctctctgtttctctatttttgcctctctttgtctctctgtctctttgtctctctgcatttctgtctgtcttttctgtctgtctgtctctctgccatttccaaaatctctgattcctaattccttcccgcctcatgctgctgaaagtacttggggtagtgcctgaagctcagtaaagcttagagaaactacaagatccaggtcggccaggctcttccaaagagcccttggccaggagtttgtgggaaatgtggatccttctgtgaggaagaggcagttcccttggcatgtggcatctaaactcccattccttagccaggcatccggctggcaggac

SEQ ID NO: 60150 - DNA, 2908 bp, Bovine  19866881411149
  misc_feature (1)..(1): n is a, c, g, or t
nttgagacttatggcagatggcatgaaagaaaaccacagttgcagtataacccaaaagtgatctttctgtttcagaatattttagtaaagcttcccaccatatttgagagacttcatttatgcaaaattcaagcagctcatctaagaaacagctcaaaccttgtgaaaaatgcatccttctggaagaaactgaagatgatgaatgtaaaactgtctagatgtacaaatctagatgtgcagttttctgatacagctgtagaattaatctaataagataacattataaatcactgcaaatgtacacggtgtagtttctaaaacttaaattgacattcttgtctgagttgtgaaaattatgtaatatggcttaagctatgtcaagtaaatgcttctggtggagtagggaatagaatgatgtaaatcaaatctatctgactaatgatttaaataaaggtataagatttaatttgaatctcattgatcccaactctagtcaattttggattagctgtgagtagagatgaataaggcaaacaattcaaataatttaggaactgatgtagtaaatgatgttatgtcagtcaaagaacctgtagcctcttactctctgaaaagagactggatactcactagaagttataaactaacttaagtggtattcaagagatatatcaataggtaatgacaaaacagatttatcatttggatgaccaagtcatagacagtattgtggaaagaagatagcttggttagcttatgaagtaaaaatgaaaagaaaagggaaaaaaaaaaagaccaaagaagtcatagatacatcatctgaacaaaactttctggcagtaccctggctggctgaactcattggcatgggatccaacccaaattcaatctgaatctttacacagccgcttattagccatgctatctatagtaagtcacttaacatctctgagtctctagctttgtcatcaataagaataataacacttcatctgcattgttttaaaaaggactacagataaaatatgcaaagcatattagcaaaacagtaagtacttcataaatggtagctattcttataaaatgataatatgatgattaccccttgctacaaattgcccaattttgagagcccttaagattattttctcttgggaggctgccctttatgtttaactggattgcacttatgtataaatgagtgaaaatagaaaataaagtaatttgaatttctagaaccttgtattctactgctaatgccaacccccacttctggttgatacttagaaaagataggaagcttatgcagaaaacatcacctttattctaatcaagcctggtcaagaatggagaaaccaaacctcactggttatcttttacaaaattaaatgaaaatacttatatatggcaagcttgtaattatataatgtgccaagctgcttcagtcatttccaactctttgagaccagtggactgcagcctgccaggtagctctatccatgggattcaccagggaagaacactggagtgagctgccatttctttctcgagttacaaaacaaggtcatattatttgttagtcctgaaattacagtaactcaaaattgcatctcagtattctgtagcaatttcttcattagtcttacttccccaaatagtttctagattcctcagagtaggcgtatatatttcacttcacctgaagcacgaggtgaactacctattgcacaatgacatattctttcccaactgcccttattccaaggtcaataaccacagagctcagagaggaaaacacctcatggccaaaaccccagttcatctatccagccctcctttcttgtctcctctcacaagaaaagatctatactcagtatttccaaagttctcagaggatacccatctccacatcttacggcgaacctacttgatgaataaccatagaatgattctggcacatacagttgcaggatattgtatcctaaagctaagtactggatccagtttcgggacaccagttctggtccaggtcgagtttctgttgcccaggccaatctctttttgactatatttccactgctctgggatgaaaatcaggcttgcacatcttttcttactctctctgtgacacctgttgccaatctaataaaatgacttgttggacaagacaaaatacaagcattcctcccaagagtaagtgaaaatgttcagggatgatgaaatctaaattgttacataaaaaagaaaccattacttgaccacaaggcagaatatttgcagaatatctgactagattcctattcacatgtacgaaccagaatacttggctttctagtcttaaaatatctattcactgatttcttacttttatcactgatttttaggaggaaagtttatatttcttttgaatttcagggataatctgtaacatttcttaataatctacattaaaacttttgaccttcagtaacaccaagaaaaacttttaaaaaataaaaggattctattttaacgcatgtctttctcaggaatgattgttcaatacttgccttatatttgcataattaaagatcacagttttttaatttttttattaaaaagagaaactgcaaaggtaaattcatgtcacaacctctttaatacagaaaactgccgaaagctttgaaattactgtcttccataaaccttttaggaatttttttaaaagagtcttcatgaaaatatgatactcattacaagcattgaagagaggtaaataaaagaaaaatttccatgctaatctaaataggaggtttgcctccaaaaaaagaagtctgagagagatctgatttaggcatagatttgatttaaggcttccaaggaaagaatatgcatgtgtcacttcagtcatgtctgactcttcattact

SEQ ID NO: 60151 - DNA, 927 bp, Bovine  19866881477950
  misc_feature (1)..(1): n is a, c, g, or t
nataaaagatgtgtgtggttatgttcatatttgtgtaacaagataagtattttacactttaccaatatgaataaaacaagactgtgaagtgacatgaagtgaagtcgttcagtcgtgtctgattctttgcgaccttgtggactgtagcctgccaggctcctccgtccatgggattctccaagcaagaatactggagtaggttgccatttccttctccaataataattaagatatttaaaaataagactagctattataagttgggacaaattaaaagtgatgagtcttttttaaaagaatatatttatcttagtgttttaaaaggataacttttttccttttcaacatctgattgtgcttttaaattaaaaatagtacccatctgtgttttggccttgcaaaatgctaatagactttggtctgaaagcctagaatggatttgctacctcatttgatactggcaagagtaaaggaagaggtgataaaaatatacctgtgtagcagctctggtggatatgattttgaggaagaaacaggaatgtggcccgttgtgctatgcgtgtgtgtgtgcgctcagtcttgtgaagatgtataaaaggaacatttgtgcagtagactgatggctgtaacagagtcagacatctgtgtgcatatgtgtgtgtgcaaaccaacaatgcaccttgtaatattccaaatgcttccaaaaaaaagaatagaaccaatttatatgtccattcttagcttctccatgaatttacttacagcctccaaccacactaatacaataggggaatagtcagaaatgtcaccagaagtaaataagaactctaccaatactttttggagaaggaaatggctaaccccctccagtactcttgccttgaaaatcccatggacagaggagcttggtgcaggctatatccatag

SEQ ID NO: 60152 - DNA, 768 bp, Bovine  19866881480400
  misc_feature (1)..(1): n is a, c, g, or t
nctgactgataaatgagaccaaataattaagttctgttctttatacaatcaagatttagtgtagcaatcaatctgggtaagaatttggagtctggagacttcagaagatgaacaagcaagtagctaaaactggtcatgtgggaagctggttaaatgagtatacattttatacacagctgtggatacctttcatattttaatcttcattagaacctggttgattcatcgctcatgtggtcccatactaagctggacatggcaggcacagaaacaaacaatagaactgtataaaagataagtctgtgtattcaatgaacactatgatatttaaaatctaaaataatgacagactgaaaatatacaagctttttttcaaagtcaatccctcactaacaagaggcacaaaaactgtgatgaaaaagcaataaggatctaaatactaagagtgataaaaggagaaagagaacacactatactttccacatatatatttgtggaactatgagtgtgattgggatgcctactcaggccttccatttttattttcttctgcctaactcttgcttccctccttagaataaatcacacagttttcattaccctaagtaacactctactgcaagggtttcccctgtggaatcagactatggtcagagagaggtgttcatattatttctcctggggtctggaattccagatttcagcagactgatgcacttagcaagtccatcaggcaagtcaaagtaaatataactagcgcagttaagt

SEQ ID NO: 60153 - DNA, 1720 bp, Bovine  19866881686579
  misc_feature (1)..(1): n is a, c, g, or t
nacagcctctaggaatttctggtggccacagtgacctgagagcagtctttagccaacttccagcaaaaatccagttccctcagtcaaacagctgtaaggaaattaattctgccaataacctgaataaacttgaagtcagatttgtttcagttgagcccccaaataagaacataacccagcaactccttgattgcagccctgtaatacaggttttggactgaattactagaacttgcagatgaattgtatgtggatggagttataggagggtctgagaaagaagagaatgaagaatgacctagcttgatttggcactgggtacatggtgacatactaaactgaagatcatggggtaataaatgggatgctgagtgtgggaatcaagatttctgtattgactgtaccaagtttgagatgcctgtaatacctgaaagagaaattaaaacttgtaaaataaccacaagacaaattatacattttcttactttttcctgcagccttttatttaaaccaacactagattttattaacaatggagaaaaactctcttaaatttttttgaagaaggttttgtctttctgacagtaccagagataactgtctggagggacatgtggagtagtagagaatatactgtatttggtccttctgcttcaggtttctaaataacacatgaatttatgaaataaaattcagtactaaaaatcaaattcactagctcctccattgaccttttaaactctttagatccctatattcaaatccccaagtcagagagagtttaaaaatctgacacagagatgaagaaaaatgtcttttttctaggttttgttaaaacatagttaggtaaggttaaagtcttcctaattagccatcccacagctgtgtcttctcatttgcaaacaaatgacactcagctaagaggaggaattctcctcttgtgaattctcagaaattatttagaaattacttagaatctaatttttatacccagggatcctagtaagaagtcagtctcattactgcttatcagaaattacttttcttctcaagtccttttttaccctgaaagagcaattttgataagaagtgaagatctgagtcaaagagaggggaaaatcattgcaaggagtgatcaatgaagttcagttagccaggcttatttagagttgctgagaaatcttcttgccagtgtccaaatcttgcaaaataataagtaccctactcaaaatgtgctttgaaagcattggagaaaaatcatatacctgttatgattaaagctacatcatgatagcatatgcttgaggacagaatataagcaggagtaaagacaactgaaaacaggtgatttgttagtgttacatgattttgggctttgtttctctgagtcctgccttttgtgtagataatattgtgagacagggatggggaatattgaaatgtactaaaaaaatcccataatttttatttctccaaagaagacttacagatgaccaacaaacacatgaaaaaacgttcaacattgcttatttttagagaactacaaatcaaaactacaatgaggtaccacttcaaaccagtcagaatggccatcatcaaaaaaatctgcaaacaataaatgctggagagggtgtggagaaaagggaaccctcttgtactgttggtgagaatgtaaattgatgcagccactaggagaacagtggaagatttctttaaaaaa

SEQ ID NO: 60154 - DNA, 940 bp, Bovine  19866881738443
  misc_feature (1)..(1): n is a, c, g, or t
ntcttaaggaagataagaaaatattatttggaagtttagccttagcataaaaggttttagcatttatctatatggggctgaaaacgaaaacaaagaggatcagaacccttgtacagactttgtaaatactgcaaagaaacaaaacattcagggagaatggtccgcattgtagttaatctttctaaaggctttgcctctgagaaatatggctggaacctgtgatcatggcccagtcagtaagtatccaacactatgtgtatgatccttagtgagtctaatgatgaataaaatatgaatgctattcttaaagttcccttagtatggttttttagtcactaaatctgttgacaaggcaaagcctccttgccccagcttaaatttgcatcacatttattcatccaatagacataattgaactcctggtattaggacctgagaatattaaaataaatagaagggaaatgttgctctcaaagagcagagttaatggagaggacgatgcatttgtaatatcacagtagtggtcatgtctagctcttcgtggttaattaggagggagccagagagataaagaaaaatatatgtaacactgtttgactatcctgacaggactaaattatgttttcagtgacaaaggcagagtcactaatagatttgttccaggttgagaatgaacattgagcctccctggtactatcaggtcaccatttttgagtatgtttggcgatagccaataacataattcacaaatgtgttctcaccatgggaatgaaaatggaaggcttgtgaaacagggttcaggacattggagaggggtgcaagcacagactataaagggaaaaaggataaatggcaagaacatgaaacctaagaagaaaatatttggcgtgtggaaagaaaataacttgggcaaaggacatgtgacagggaaagtctgaga

SEQ ID NO: 60155 - DNA, 1619 bp, Bovine  19866881987605
  misc_feature (1)..(1): n is a, c, g, or t
naagatttctctcctacatacttattagacctcaataagtgttcctttgcaatctgttgctattcaattaccaagtaataactgtcttaatgaatctaattgaaatgcttatttcagactcctataacacacaaagaaggaggcttcatggagtgcttgccctggatggggcctgacttgtttattcagaaagaagtgacttccttgggaagaggttcacaggcaaaagctttagtagagtttcaaggacattcacttctccatcgttcactatcataaaacttaaagccctcctttaaaccttgctactcaagcccatgcctacatgaacattcacaaaattttcagcttgcattttcacttctgaagtgttggtttagcttttttcaatgaaatcagaataataataaaaatgtaaatgctgctgctgctactgctgctaagtcacttcagtcatgtctgactctgtacgaccccatagacggcagtccaccaggcaccgccgtccctgggattctccaggcaagaacactggagtgggttgccatttccttctccaatgcatgaaagtgaaaagtgaaagtgaagtcgctcagtcgtgtccgactcttagtgaccccatggaccacagcccaccaggctcctctgtccatgggattttccaggcaagagtactggagtggggtgccagtgccttctccgaaaaatgtaaataccaatagctaataccctatgtatagggtactcctagtgccagggctgcctaaacacttaacatataggaactcatttaatctccacaaactccctaagaggtacatacattgttattgtgcccatttaacaaatgaggaaatccaggatggtttattttttgcagaagggcaaatttgcacagcttgttgttcagtcgctaagttatgccctaccctttgcaaccccatggactgcagcatgccaggctttcctgcccttcactatctcctggagtttgctcagattcatgtccattgggtcagcgatgctatctaaccatctcatcctctgttgtccccttttcctcttgccttcagtctttcccagcataggctaataaatgccagtgatcgtgaaacaaccccaggtcaactggctccactgcacaaactcacaaaagcaaaacttgaaataaatgttagagcttagttgatgtaacctcttgttactcaggaaattgagggttcaggctcatgaggcaaagagtctatacctgacctccatcccttgcactccaacctaaactatgttgcgttgtttaaaaacaacaaagtagttgcaaaacaaaaataacaacaaaaccccttgggttaaatattctccctccatcttgctgtaatttttgtttggatcagcaactgggctttaaaacatttatctcagggtgatgatagaatttgtttgaaagaatgtaagagcacagcccaaaacatagcatggtgtttattttccttaaagaagaaacttatatttattgatccaaagaggaatgggaggttgattcagggaattgcacatcactgataattcacaattcctatgcaagtctgtgaggcttccccattgaaaccacccttgtagaa

SEQ ID NO: 60156 - DNA, 531 bp, Bovine  19866880646293
  misc_feature (1)..(1): n is a, c, g, or t
nccccctgaccccacctgtcacccagactgccgcgaggagcagtacccgtgcacccgcctctactccatacacaagccctgcaagcagtgtctcaacgaggtctgcttctacaggtgaggggtggggctccagccagccccgaggggcggggacagacccccaggccgggggtgggtgtggggtcctccccccggggctgagccctcccggcctgtcccctcagcctccgccgcgtctacgtcgtcaataaggagatctgcgtccggacggtctgcgcccacgaggagctcctgcggggtaggaagcccccaccccgcccctcccgctgcttatcaaacgtgggtcggacgtgggtcccgtctcatcctcagacggcccctcaccagggctggggcgcgcggcagttccctcacctggactgcgcgctgaccccagctcttccccgccctccccacagctgacctgtgccgtgacaagttctccaagtgcggcgtgcggccagcagggcctgtgccagtctgggcggccgc

SEQ ID NO: 60157 - DNA, 1439 bp, Bovine  19866880654080
  misc_feature (1)..(1): n is a, c, g, or t
nccccccatctctatcaggtagcttccagcattaaagatgaagaagcggaggcacagagacgctcccctgactcatccgaggccttatagctggtggctgagcccgtaagcagaccaggaagccagactgcagagcccagccattgactcctttcttccgtgtctgatgctggtccactgcgtttcctagcttgttagtggcaaacagatgggggctgctgctgagcggtctccaaccccttggacgcatctgtacagagataacagctcctgtgccctatggggggctttgaggggttaatatagaaagaagctttcagaaagttgagactcatgcctgccaacctaaaacgttcctatcggtgggaattaaaaaaggatagtggtcttatcttgtccgtcccagacactagtcaccatcaggaacgctgcctttggacatggagggtggtcatgtaactaagtatcaaccagtctgagggatacactcttggcatcaggtggattagagatgccaacctgaaaagtgacaacaactaatttacgaaaaacacttaagaaactgtcatggcgtctcactgaatccacctgatcagctccctttgtttccacggttaatttaagagcaaagctcctcccagtctgtctgtctcaattacgtgtctgaattaagcagacggtttctcgctccgggactcatggtgaagccgtcctgcattgcgtcgtcagctctgctcttcttcctgcccctaaactgcaggatgtacgctcttctctagcttcgtttccaaagcgcaaggtccccgagtgcagatggcactttggttttgaaccacttaactctcctcggggctggtgccatctgaagtgtcccacaccatgtcccgaagaaccacaggccactgtcgagggtcataaggggcggtgggcggcttgaggtgggggtgacgaccgcgaggcccacagaggccagggccgcctcccaccaggatgaccccacggcctcagagcgggctggacgaccggaagtggagctggctgtccgggacaaagcgcttaccagccccatcctcccaaaggccccctgggggcctggctcgctgccagggccccgtgggcactcacctttgaacatgatggcctccccgtggccctccttctgcttctctctgaagagcttgtagcaggctgaggtgctggccatgagcatccggaatttctgcgagagaccgtccggccggccggtcagcagagggcaggtggccgagctggtggggggctcccgccctgaagacccggggccctgcctgcacattgtctcagccacccacaccgagtggcgaaggctgcctggcaggatttctctatttcagaggagtattttcacccttcctgccacagaaattttcctgcctcagcaacgccgtcgagtcgaagct

SEQ ID NO: 60158 - DNA, 1814 bp, Bovine  19866880720430
  misc_feature (1)..(1): n is a, c, g, or t
nagttgtgacagtccaagtgtcccagacattgccagatgtcccttggcagaagggaggtccaaatcacctgtgatggagaaccactgctctaggctgaaagcatccgggtgaatcccagatccccaggtaccaaactagagagggcagaggagttaacaagaagctacaaacttggtccaccgatttggattcagttcagccttgatcgcacagtcacctccgaaccataggatttagtagaaactggtcaatacttgactcatcaacagagattagcacactcgaaaacaataccagttgtaaatgctcgaagaagatgtgtgttgcactacaccctggagagccgtagttgataagggggtgtattttacaagagctgtttttgttgttttttttagttctacctgtttattgctaccaattcatttgtctctaaccccctccgtcatgccagcgcatggactgtagcccgctaggctcttctgtccatggaattttccaggcaagaatactggagtgggttgccatttcctcctccaaggaagagctgtttttaaaatcagtcactcttttggcctgtgattagattaaatcagcctgcttcaggtccttctgagagtgcagaaacccgcctgcttcactgggttcacctgtcccttgagtcctgcctttggtactggaatgatgcagaacgtgtgatctccctaaaccagggcccttagggtacaggcagtggatgtgaatgggcgagacacggaatggtgaccagctccagcccgtcattctcacgtggaagtggaagcccaacattgctagagcttttgattttaagagaagccagaaatctggattattttacatgtaatttgattttgaagtgttggcagttaaattgaaagtgctaaactaggaactgagtctggcctgtaggccacctctgacctagacgtctcatcggttgtattcctgttgtgtccctttagccagaatgcatttgacttgaatccagagtcaggtttgccgctctgcctcgaagggcaagggccctagtcatgggatagaaataggctgtgagggcctcaaggctcatcctcacttccgctttcaggggagctctttgctcaggccccagtggatcagtttcccggcacagctgtggagagcgtgacggattccagcaggtacttcgttatccgcatcgaagatggaaacggtaagctcgggactcggggcttcctcttccgagaagggtttcctctgcctttggaaagtaggattgattgtgtgttgtcccccagggcgacgggcgtttattggaattggcttcggggaccgaggtgacgcctttgacttcaatgttgccttgcaggaccatttcaagtgagtggttccaggagacacactcatgcttcctccctctttcgtgggacagaatgatctcccaggttaggatacccaggtggttgtgtgtgatctgtctgctggcagtctcaggggaactcacttctcctttaagataggtcccctctgcgctcttcgagtcctcatctctgccttgaggtctccttttcctgaggcccatctctgacccccagtcagctgccccagccttggaggtgtcatgtctctgcccccgtcagtcccttgagtggccggggtcctttcccggctcccttggcctttgcagacccgttcctctatgctgtgataagcagtgctgggatttccaggccactcagcacatgccctgctggtcctttctgaagctagaacggcaggaaaacctctcccctgccatactgaggcctccatc

SEQ ID NO: 60159 - DNA, 1339 bp, Bovine  19866880751762
  misc_feature (1)..(1): n is a, c, g, or t
ntgagagcaacagctggagtccgaaggcgctcctcctgggagagctgagctcacaggctcaccgtgaccatcgtccccatcacgtctgcagggcaaggcttgccccatgggtcaggccggggcccaggtccgccctggagtccagctagcaccaggcctgtcctggtggtgagaggggatggggctcccaaggagaggccgggcagtccagagaggcccagccgctctgtggagccgaacaagaaggggagggaattcctgggctgctaggacacctggcttttccctgggccctctggggtccctgccctctccctggctctgagcccaggctggacctgggtgggccctttttccttgttcttttccaggtgtccacgctgaaggggcagctgcagcaggagcttcgaaggcactcagcctccttctcctcgccctccgggcccccagagaagtgagcacctctccgctggcatcctagcgacgggaccctgatgggagggccagatgggaggggcgccctcagcgcagtccagggggcctgggccggagctcgtgggggtgaggggcgaggggcggggtgccagggccaggacggggctccagcctgtcagagccaccccctcgggggccccctgagggctgggctggagggacccgtccctggctgagcctgggcgcaggcgtgctggccgtgagggttgggcctggggcaggcactgtggctgctcagaggtctgtccatcttagttcagtgtttgtcagtaggttcctcagagttcagagttgctgtatttttatacctttttacgatgttaactgttcagaattgttgtttttgtaacaaccccattttttaaagaacgctttgtacagatgtgtcctcttgctgttaacgtgcctcctgggagatggggagactggagggccctggggccagagggttggggtcccctagtgaggggtgcacagggacgtgggggagactttagaaaggcccctgcagaaaggtaaggaacaacctcacgggacggcgggctggggaggcctccagggtcctgggccatccacccatttaacagacggagccatcgaggcttggggctgggcccagctctgctcttgccaactgaagctttctgccctttcctctggctcctcctcaggacaggtgcaccccccgagcaccagcaggccttccaggcggcacggtgaaggaggacaggcctgggggcggacctggcatcccgccgggccccgctgggtgatcctgggcacagctgcttcagctgtcagcctcagtgtgctcattgtaaggtggaaactgcctcccaggccg

SEQ ID NO: 60160 - DNA, 746 bp, Bovine  19866880914399
  misc_feature (1)..(1): n is a, c, g, or t
nagtcggacacgactgaagtgtctaagcatagcatagcaaggaagtactaatttgggagcccagagagaaagggcctacaggttggtcccaagtaggaagccctggagcttgcctggaagataagccacacgttgacttctgctgttagcttggtttcttaatcaggaattctgcttatcaactaaatggtaacttcccagactgaccacacccactaactgaaagaactggaaattgtccttctcagctctttctgtggcgagaggacaagccaagctgggctgtgttggactcagctgatagttgtcccccttggcaaaatctctggcaatcctgcgccaccagcgcctctgggtgggctgtggagggcaacatggcctggagcagtcccagcctaccccctggagttggagtcagatgcagggcttctcagtcagatgccccagcattctgtaatgtcttctttttctaccatagaggttttcctttgtggggcaaataaaatgcaaagattcgtgagcaaaactggctgcctcttctcagatctgcatcactgtgtctgagctatggggccttagacaagccacatgacctttgataccttggactcctttttgggtgaaatggggagcacattatttcctgcttcccaggattgttggaatacgaaatgagcacatagatatccgaatgctttgtgaactgcaaggtgacccaaagcgccagtttgtttcaagcatgactg

SEQ ID NO: 60161 - DNA, 958 bp, Bovine  19866880962817
  misc_feature (1)..(1): n is a, c, g, or t
nttcctgcctgcgggtggggagcaccctgactgagtgggtggagaagcgttggtcaccagtccagacccccaggctcctttggttagaggctgccttcagaatagtggctcatctccttggacttttctggctagaacaggtgaggtgagttgagccaaagtatcaatatcgctgagtggatcttgaggccttatccccctatggaggagactccaacagtagacacgatgcctgctatggactgaagggttgtgtccgcccagaattcataggttgttatcctaaccacccaaggcgatggtaataggagatgaggcctttgggaggtgattaagttcagatgaggtccccatgatgggattagtgcccttaaaagaagaaataccaaaaacttcctctctctaccacgtgaggacacagcaagaaggcggcagtctgcaagccgggtctgtcaccttgatctgacacttccatgatccagaaccatgagaagtaagcatctgctgtttaagccacccggtctggtattttgttaaagcagcccgagcagactctactgttactgttgttggatcacatccactaagtggctaagaaggactcagtggccacattgcacctacatgtccggtgttgccatgagtggcctttcgttctttgaaggacaattaacatttatttagaccttgtatactaaagcaaaataatgtttattttttggaaacttcttcagcgaacatgctattttctgtgtggtgagggtagagatttcccccaccccattcccaaccccgtagaacagaaaaccaagcaatcacaaaacagaccatgtcaccgttgcttgggacactctggtccagacttgacgatgcctgtgacatctctccagaccttctttgatgacagcctctcaacttttcttcgtgactttctggccaattcacttatttggcacga

SEQ ID NO: 60162 - DNA, 3113 bp, Bovine  19866880967662
  misc_feature (1)..(1): n is a, c, g, or t
nctggggtccccaaggaggcaaaaggggtctgtggttctccaggaggagataggggtctggaattctcaaggaggaggaaaggataaactttttttttctctacattccttagtcttagccacataaaaccttttttttctttaagtctggaactgatgattacacaactcagtttaaactctgtactagggattatataacaacaatgcttgaggacagtttctccttcctgaaagccttggagctaatcctgttatcttagaatgtatattatgggagtgggtctggtaggatctttctgttgttaagttctaatcctgttatcctaaaatgtaaattgtgggagtgggtctgtaaaattgtcacaaacttgaaacattcttttgatttattttaatacctaatttaaaagcatacagctcccttgctgacactggttaggggggcactctccatccccttctgatgtctgtcagaagcttcctctgtccattttcttactttaataaaactctgctacacaaaagctcttgagtgatcaaacctggtccctggtcccgaagttgaatcttctttggaggtcacggatccgacactgtccaccgtaagctaccctcttgggggctcgtccgggatcttcaggacaaggtaagaacacacagagctctagcctccctgctttctcagtacacacatggtctgctttactttttagctcttcggtgtccttgtgtgagtgagtgacatgccctgtgtgaagcaggtgatgagccctgctatgcagttttgtggtgcctcataatgactgaaggcagcccccaaaaggggagccttgttgggggttcatgccaacccgccaaggccaagagacacccaaggtccctgctaggggagcagcagagatgggaaaagcgcgtggactgaactttctcggtcagcttttcctgatctctttgaccattctgtaattgtgtggggaattagagctactaacctaatctgtcggatcacagactttcacgggaattgtgatccaggctgttattatgcacttttacttagaccccgtgtatggaagcgcctggccttgctaggagcccaaagttgcaggagcgcgtatggagtgaggaggagctctggctccaggaacgtctctcaggctagatgtcaccctcctggctgcctgccccaggggtcagcgacctgaaagggaggctttgtcacagccgtgcctcctgtctatgtggagagaagcactgctggagcccgtgaggccttctgaggacataggttgggaactgcagggtctggtcaggctggaagtgcaacaggcttcctcctttggtagcgctagctcttagcgggccagaggaggctctctgatggcttttgtctcaactccttagatattcctttcgtggaatctgtcgaaatgaactggaaggaatggccctaatagtttgagaacaaaaatcacttttccttcgctggccagccctccaccacctctttgctctcacatacaccggcgtggcgacagtcaagagggacatcctggttgttgttcgtccctttacaactcacacacttcccctaggagtcctagcttgggaaacattctgggaaagctactctcctccacctcgggaggcatcagaagaagagggcaaatcaaaccaaggtcctggtgttatggaactaagtcagtctgggatgccatcaggtctaccccgggggcatctccacacaaccttggtgggcagacagaatgaaaaccacaatcacagaaaactaagcaatctcatcgcatggaccacagccttgtctaactcactgaaactatgagccatgccatgtagggacaccctctgatggagaaggataagcttaaggaagcttcctgatgggagagactgactgagggggaaactgcgtcttgttctgatgggtgaggccatgctcagtaaatctaatccaattttctgtgttccctccctgttatttacctggggccaaactatggtggagataatgaagacaatggcgacctccttcaaaacgccccatgcagacactgctgcactcagggcccccgaccctgcagcagccaccgccacccacgcctccaccagcgactcctggatgctcacgggcaagtctgggtcagtctcttgtggggtccctgctgctttctcctgggtcctggtttgcacaaggttctgtgtgtgccctccaagagtctgtgtccccagtcctgtgtaagttctggcagctctatgatggggttactggcgacctcctccaagagggcttgtgccacacccaggtctgctgcacccagagcccctgtccctgcagcagtccactgctgacctgtacctcctcaggagacactcacacacagttctgtctccgtctctgtggggtctctgggtcctggtgcgcacaaggtcagggctgaacaggaacccagttggctggggagtgagccacaggtgaaaatcacattgctcacatcatccaggcttgagacaaggctgcagagctgggctttctgcatgaatatgtcttttatctggttgtccagctggaggagagataccacatgccgtcatttggtatcaccacactgtattatcagtaacactgccatcagccccttggagctgaggccccttggacgaggatcctggataagtcctcctgggcaggcagagtttatccctggctgctcttttgcttggggaggagggattccacttccacaggcttctggctatgccagggtgtggatcagatcccatctggaatgaagaggctgatataatgacgaccccaatgccccttacctgggaacagaagacatattaaaatgcagaatcaggttgtatcccagagaatggtgacaggaaggaggctagaggtgagggagttaggttttccctttccacagtgctggtggggattctcttcctgatgtgagaagaggggacttggccaagggcactccctttgtcgagaggccagtcctggcaacatcgcagcagccatgatccaggcaagagaaccttctgtaggggcgagatgctgcacatgagggccaaggagggct

SEQ ID NO: 60163 - DNA, 1003 bp, Bovine  19866881015209
  misc_feature (1)..(1): n is a, c, g, or t
ncagcaggagcgtgacgagggcctgctcctggccgagactgagaagcagcaggtgcgtgggctccggcggccgcctgaggggccaggccctgctcgccacccagacttgcagccaggagtcctttccgggccttagtttcctcacctcacagtgggaactcaaggggcatttgtgaggcgtcaccaagatccccatgtccagcgggtgggcctggcacacggcgggagcgtaatgcataaccaccacaatcctgacaccatgagtgttgttcccgaaaagctaaccccctccgctcacccttcctccaccccgggcccggtgtggcgtccccgtgactgcctacgagctgtccccacggagcccacgtgcagcagctgaccctcctcagaaagaactaactcctgaccttctgtaacgaaatggagacagggcaggcttcgcccatctctccttacccgccacgtaacccggggcaggtcactttacctctttgagcctcagtagcctcatctgtaaaatgggagtaatgaaaggcccttcaggatgtgcgatgctcttaggttgtgtctgtgtccaggttgtaactgctgttgtaacaacagtgcaccagcgctttcctggggctgcgccttgaccctggctccacctgcggtggccggtcagggccccaagcccccgggggcaccgttcccagggcagggtggggaaaggcccaagcatcccccaggacctcccagggccctgagccctttgctcccgcctctccccaggccctgtccctaaaggagtccgagaagacggcgttgtccgagaagctgatggggacgcggcacagcctggccgccgtctccctggagatggagcgacagaagcgggacgcccagaaccgccaggagcaggacagggtagggcgggcggggtcggggtggtgggggggtgtggcctgggcgggcgggcataggccagggcgtggcggaggtgtggcccctgggtgggcgtggc

SEQ ID NO: 60164 - DNA, 892 bp, Bovine  19866881056944
  misc_feature (1)..(1): n is a, c, g, or t
nacatgggacctcccaaggcctcacagctttccgcaagacgtcacctttagtgactgactgcaatagtatgcttgggggactgtcagcactaatgaagatggccgcgacgagggtgtgccccactgtgggccaaatctagaaaccatcctgggggctggaggccaccaggcactgtcggcattccccttcttgaggtgctcagtaaatgcggagcgagagaaaaccccgagttcagagactgcgggcagtgaaagccatcataaaagcagctgatggcggctccacagagagttcagggctctctaagggtcctgatgacgataaacagcaggcatcaggccaaggccacgcttccctcacctcatcctgatgcagcctcaggaagcagggctcctcatctctgtcagatgaggagcccgcagcccacaaagaggaggggctgggagctgggtcaggcagagccaaggatcccaacttcagggagagcccaagactccacggggtacggtctgggtggagaccggtgttccccgccccttgccccaggcctgcctaccggtcagggcctccttggccagcagcaaggcccgcccgtctgcctctagctgttcccgccgggactcaagctgcgccagctgcctctgcacctcaaacaggctgctctccagggcttccttctccgatctgcagcacaggccgtatctgaggcatgggacccagcccctcaggccccagcggattccggggtgtggccaggcagggccaggtgccaccctacctgcccagccaggtccaatgcgtgggtggggctagtcaccgggcaaccctggccaatccccccgaggggggccaggcagagcccaaggccttaccgcaggcgtgcagcctcct

SEQ ID NO: 60165 - DNA, 1407 bp, Bovine  19866881103493
  misc_feature (1)..(1): n is a, c, g, or t
nacctgtgagagcagcaatacagtgcgagctgtggggaggggcgcgccaggcgggcagaagcagagggaagctgctgtctctcacttgtggtcattgggaaacctgtggctccagcgctggcagggtaagccacccacggtgatggccacagtgccccggtactcgaccccgttgtccacgatgcaggtgcgaacatagtctgggagcaaaagacccagaatcaacaaggctggagacctcaagcagccctctccccagagcacccttcgcagccactcacttttcttttggaagaggtcacagcgcccggaacgctgcagtcgtgtatgaggtgagtgctgggtccatggcagcaactggcaaccatggctgctcaagttgtagtggaaggccctgggaagaagaggcacagggtcaccagtgcccaggttcctctccctccagtcttatctaggtccagtggccactcacctgcagtccaggaggggcccacagaggcctgcacattcctcagcatttgccacatcttcttgccaaggcccgggccccactgagtgtagcaggtgttgcagctccgtaccccgaagcacctggaagtcattcaagggcgagcgctgccctgcagggtgggcatgcgaatcagcacatgcatatcagcatgtgcacactttattcattcaggagatcaaaatacaaggcctctggagtgggtcagtgacccttcaagggtcagacccctgcactggatgggaggagcaggctcagacgtgactgtaatcactagtgcacctgtttagtgggcaaggcactgggctcagctgtaaaacatatactctgagcgcagtgcctgctggtgctggccctatggagcttatgctagctcatttctcacgtgaggatgtgaaggcccagagctatcttattaacaaggcaaaggcccaacccaagcattctgactccaagtctaagttctaaccaacataagggtaaatgctgaaagtgttggtcgctcagtcctgtccaactctttgcgaccccatggactgtagcctgccaagctcctctgtccatgggattctcatggcaagaatactggagtgggttgccatttccttctccaggggatcttcccaacctaggtctcctgcatcgcagacagattctttactgtctgagccacctaaccagcataagggtatatgctaggtaggaggattaggtctggttcataagggataaatgcctgcatgtgtgtatgtgtctatggtcctaacactgcctcaaagctacagcagacatttcaccgcaggcctgaataggcaatgtgtttgtgttcctttggctgcccagctctgtgaaagaagccaaggtcactcactgctacaggctcagtaggaaagcaagtt

SEQ ID NO: 60166 - DNA, 1475 bp, Bovine  19866881330733
  misc_feature (1)..(1): n is a, c, g, or t
ntcaaaagcatcaattcttctgtgctcagctttttttatagtccagctctcacatcaaatacatgactactggaaaaaatatagctttgactagacagaccctttgttggcaaagtaatgtctctgttttttaatatgctttctaggtttgtcatagcttttcttccaaggagcaagcaccttttaatttcatggctgaggtcactacctgcagtgattttagagcccaggaaaataaagctcactgtttccgttgtttctccatctatttgcaatgaagtgatgggaccggatgccattatctttgttttctgaacgttgagttttaagccaactttttcactctcctctttcactttcatcaagaggctctttagttcttcgctttctgccataagggtggtgtcatacgcatatctgaggttattgatatttctcctggcaatcctgattccagcttgtgcttcatccagcccggaatttcgcatgaggtactctgtatataagttaaataagcagggtgacaatatacatacagctttgactatttctctcccgatttgcagtcagtccattgttccatgtccagttctgttacttcttgacctgcatacagatttctcaggaggcaggtcaggtggtctgggattcccatctctttaagaacttcccacagtttgttgggtggctcctggttccttccgccacaggtcgtgaggcgagacctccagtaaagggcgcgcggcgagcagcggctgacgcccgcgatctgccgctctagcctgacgtgagtcatagagtcgcgacttccgtcgggccgggaaggagccggaagttcggcgggctcggggcgtcgagatggaggaagcggagtacgagtcggttctctgtgtgaagccagatgtccacgtctaccgcatcccgccgcgggccaccaaccgtggttacaggtgaccacctgccgccaggctaggctagtcacgacctaacccctccccggccatccccacacgcccactgtgggagaggacggcccggccagttgacgggcgaggggcgggcacaggtaatgctgccggttctctcaggtcgaggccggagcagcgagggtacccagactttctcttgtctcagtccgacgaatggggtcccggcggcggggacggttgaaagcgatatatagcatttagaccctaaacatggtcgggagtggtggtgtcacagacctttttttcagcgctagctgaaggccttgaagggatccttggaaagacttgaggggaggagccctgtcactggaaaaaatccccccaagggaaaggaagggagcccagaaccggtccaaaggacccgtcctgggaagttttaagctgatgttgaaagcccaggggcccttccttgcccagttttcttgcgcacgaacctcggccttgatcacagcctctggctgttgagaggcatccatccgcacttgt

SEQ ID NO: 60167 - DNA, 1325 bp, Bovine  19866881451030
  misc_feature (1)..(1): n is a, c, g, or t
nttcagtaggaaccaacacggtgctgtaaagcagtccttcaattaaataatttttttaaagtttttaaaaataattcaagtaacagttactttaaaaagaaacacacagaaaaggctgtttttcctctcagcagacctggagcgaggagctaggacctgggggccctcgagcgccagcagtgcccctgggcgggcaccttccagcctcagggctgctcctggtttcacagcagggtttgggtctccagccttcagcgcctccgttctaggaagcaggggagggaaaggtggcgggcgcctccgcacggcactccagcagtgccatcctgggcgggcaccttccagcctcagggctgcccctggtttcacagcaggttttgggtctccagccttcagcgcctccgttctaggaagcaggggagggaaaggcggcgggcgcctccgcatggcttgtgcgtgttggcgccccccgctgccgcgggagcctggcagggagccgacgcggtgggtcagggcgcccctgttccctctccaggcatctgcggctcctgtgccatgaacatcaacggaggcaacactctggcgtgcacccgcaggatcgacaccaacctcagcaaagtttccaaaatctaccctctgccacacatgtatgtgataaaggaccttgttcctgtgagttctgttttttaagtgggttgggaggtgtgtgggttatgctgtagttcttcaaggcaggtttctttcctgtcatgagtttaattaaggaatgtgaatggcagaagataaaaggcctagaagatcctccagccactcctttggtgaggattgtttgggagtaacaggacacagaattttagacctgggagtttcagaaatgaagaatttagccctaacaccaaagaattcatgtggaaaatctccattgggaaagctttaatttgcaccccccgatatctgaccgcctttcctgtccctcactgggtgctttcaagggcatcgggagaaagtactgcagggtgggaaggtttctcacgtggctagaggagaggtttcctgagcacgcctacacgcgaccacttctcctttcacggatttgcacgtgtctgccagaggaagaggctgactgctgcctgtcacggggtgggagcgcaggcagtgtccaagaaacggggtacataagggcaccgagcgtggcggtggaatctgacccgtttcttcctcttcctgttaacaggatttgagcaacttctatggctcagtacaagtccatcgagccttacttaaagaagaaggatgagtcccagggaggcaaggagcagtatctg

SEQ ID NO: 60168 - DNA, 754 bp, Bovine  19866881687039
  misc_feature (1)..(1): n is a, c, g, or t
nactttgtaaacttagcctttagagaggagataatcagaatcctgtgacacagtcacactgttacacagttgacatgaattgctttgcattaaagtttttgaatttatttttgagttagatcagatttgacatctggtattaaaagctactgtcatatatgtggtccttcagttaatttaaaaagttggtatgtcagttatatgaaatgcatattctcaaaggacaaagggttttagggagtacaaagctaccttgaaatatgatgtctgctttttgatcagtttttccatttttagtaattcagatcacttcctcactcttacagtgctgtgcacattaacagtgagtgggcgggtagttgaccagctgcgtagtctccgcttttctccaccccaagattatgtattggtctttagtcctctattgtcttggtccattaggatcatttctgtgtcataaaataaagctaaccttcaattcacctcctcctggctcagcatatggtgcccgtatgtcagtttaattgagttggttaaattccttgaaaggtaaaagataccttgacagcctttaaaaatgatacagtcaaagatttcactcttttatgtctgatggggaggctgtatggcattatgtcagccattttaggttaagttttctgctgatattcagaggggtatcaaaaataagactcctataatgccttcagttttacattttggcctgtgtactattttattatcatctggtttt

SEQ ID NO: 60169 - DNA, 968 bp, Bovine  19866881104780
  misc_feature (1)..(1): n is a, c, g, or t
naaatgtcagagaagcaaggctcttgaatccaatgtgcaatggctcaactaggcaacccctcgtggtcacaaagcacagcagtactcaagagggaagacagcatgggcttcctgccccataatcagaagtggagacatgatttcctaccccagactgtgctggacccagagggagaacagtactacctgcagagccaggatccagacccaggctatcaggggatgccaggcgactgtgagccaaggggagaatccctccccttgtcgaatctctgccttctgtcattccctgacagtgatgagggacagcacgcccactgccactttgtcaaggaacatttctcagggtgggtttttcaagaggtgttgggtagagctttccatcagagccttcctcattgtgacgctggtggctgcaagaagggatgacaagatgaagactcagcaacaggaaagcaacttaaatttgacatgttcaactccactttgattcctactctacttctgtgaggtccttttcaaattccaagtggggtcattaaatgctcacttagacttattagaagttgaagtggaaaaaaaccagtaactccattactcttttttgtagctgccacatcaaagggctgggggattcatagttgccattttccaggagctagttatcacaaaagaaaaggattttatttaaggtgaaaaaataaaagccagaaaattgaccaatttatgtttcttggaagcagcaaatgccgggaactggatgcagataatattatctgaactaaaagtgtagcagatagcctgtttcccagtccatttctcatattctactgataaagaactgttagttagagagaacctcaaccttgcatttctgaaaagggagagtcagtagtcagatggagaaactcagatgagaagtatcagtaactttccatgaagcaatgagagaaaaacagttatactat

SEQ ID NO: 60170 - DNA, 1313 bp, Bovine  19866880543292
  misc_feature (1)..(1): n is a, c, g, or t
ntttgtccctcgcttatcctcatgtccctggcacctgacgcagcacacctggagcctctatgagtgaagcagagtggccaatgggagaggctggttcagggagatgcccccacctcattcatactccagagcagctcagcggctgtctcctgggctacataacgctgctcagctggcaccgaaacagagaaaattcatccctgctctctgcattctaaaatcctatgtcgggagatgaaactcaaaatgcaggccattcagtcctttacagggaagtttccatggtgacggcagtccttgctgagtcggggcagcctgcctccctggagcaggcctgagtcccacctgtgatagcaagggccccctgtctctctccactagggcaggtgttcacacgtttccaagtctcttgtctcctactccacacactgaacagcagttaagaccgtgaacttccctccagagtcgagagcttgggacagggtggcactaacattgagagacgggcctgcctccacacacactagactcccgggctcttgttgcagcgccgccttcaacaccatgtgacctgactggagccaggggtcgttcagccttttcttctgtgatgtgtcaacataattttcacatgtttcgcacctctagcccacccctctgggacacgagtgagctctgtggagaactggccctttggggtctaaatagtctcatctgaaccttaaaagtgtcagacgcaatgttagcaaattgtaattacactgtatttccatgtctgccagcttcctttctacctcccttcctccccacgctgctccctcctctttactgtccctgcttccccacgcccaaccttcctgcccatctccctttcctatcctactggctccaggtggcccagaccttctagttctgcccactgacctcccagcctctcaggagtgagatcctgggagtctcttcgtctttctcctgggtgtttggaccccagtccatcttcaaatgaagaagaggctaagggaggacagtaaacagaccaggctggtacctggccagggtgcccaccaaattataaagaaatctctcaaggtgcctgcccctcaaccccaactcaattacgcctctttctcttgcctttccccaccatctcctgtcacagcgtgccctgcctgcaggctctcttgctggtcattaattccgcaggggccagctcagcacccctctctcaaggatgtttgtcctgtgagtctggttgctttcagttcctaccttacatggtctaagaagattaaatgcaatgttgcttattgggt

SEQ ID NO: 60171 - DNA, 1717 bp, Bovine  19866880543437
  misc_feature (1)..(1): n is a, c, g, or t
ntctctttttctcctcttcctatgctgcctcatattcctgtgtttctccgaagtttctcaaggtgagtctgttggggtgtgcacagttctcatgcctgggcttcctggaccctccccttcactgcccttaccctaccccacgctgctcccctacccgtcccccgcctaccccccacttcctgcacacaaacaccccgtttccagttggccaacaagcttctatttttagttttttattttggaaaatgtttaaacatagacacaaatagaaggcctagtatagcgagtctctaaacgcctagaccagcttcagccatcctccactcatggccgctctgttttcttctattactgcctgcatctgcctccacccccaacaccttaacttgataagtaacctggtaaataaagggagaaaaaaaaacaaacgcaagtccactgatgctcctctgtgggctgacttaccagctaataggggtaactactcggcaaacccagatgacaatttcacccttaaatatcccagtagatgtcttaaaaaataaaggaaccgcagtaccttttcatgctcaaataaactagcatcagttccttaatatcaacagtgatcaagtttttctcatgtcctcatagtcaccaccaaggctttaaaggctcgaagccagcggtcaccttggcctgtgtcacaggttcacaggtgtccaactgatggagcacgccggcctggctcctcccttctgtatgctggcttccttttctcttccttcctcctctccatccacacgtaccagatgcccatcacttggggaagtcttcctggcaccttctcccaaggcgccgcgttaagaaatggcagcaggccagtctgccggggccacgtttgtgcagtggcttcaggggtgtggattcaggagcacattgataacctttcaacccccagcaggtctgtaacagaaattctcctctcatgtctccccgactaaaccccaaaatccactctcttcattcataccctgtttcccattaagaagacagcgcccttgggaaaagctgggccacggctatagcagtcattcacacgtctgtgtgaataagttctagcatattcaagtccggaggcactgcctggagaaatggtgagggaagtgggtgtctgaccatctctcttctgcttctccctcacaggctacaaggagcagggcatcccacagcagctgtgagcccgggcgagccgctgagaagcccggtgcccaggagggccacgtcaggcagcggccggcccggggtcttcacgtgttctcttctgccgcttcctgggtttggagtggaaagaagggcatttgagaatactatttattttgaaaacgcacctgcttttctcagcaggctctgagagctgccagctcctcctgctgctccagagagtcctgtagcacagacacccagagggtatctgggttgggtggggagtggggttggaggcggggatgctgatgcaagaagctggagtgccccaggctcgggccacctcgccttgtctgctgcccaccgtgagggtgtgcggggcggccaggccaggcagcagtgaccccgtccaggcgagcagggctcgtcaaggggcaggactgcagtggacacctcctctgggcccctgtgggagtggtgtcctggggccaacatccaggcatgagtaaggatagacagattcctgcctggt

SEQ ID NO: 60172 - DNA, 1480 bp, Bovine  19866880556312
  misc_feature (1)..(1): n is a, c, g, or t
nggggacagctgcactctgatagctgacaagtcttgctcatacttgggggttcactggtgtgtctttctggcaacccatttcctgtgcctccagcagtctgcacgtgaacagatgcatgaccgcctcactgagacaggcctctacccagaacagccctggtcgggagagggaggctgggtgactcagagctctgcctcagctctgttgggcagggccgccgcagtcgggttccgagcctctgcaagcccgccttcctatttgctgagcgccactcagccacaggcaaatcagcgtcatctgttagaaacatgaattgcagccatgtgtcttgcttggaaatattttctaaatatagctaaatatttgatactgcacatgatttgttctcatgtggtattcacgctcttcctgaaaagtttgcttgttagaaatgcctttggtgggagttcccccaaaatctgactttggcatcagtccagaatatccccttttgaccaacacccttacaggtgcttcctggggtctcagaaactacttaaacagtagtttttaatttgtgaatgttcttccctagagaagaaaacttttatcaagctgaggagtgaggagttcttgtctcttctagtaatactatgtacacagtaggatcctcaggttcttaagtttataaccagaagatttcagtctcagagcatctttgagagaatacagggaatctctgagctgctaacacaggagaagcttgtttccataagcagtgctgttctgcttgtgagcactggaggaagagaagaggacattctccattcttccacattttgcagaaaacttcctctccgattcctggccttttaaatgtcatcttctagaaaggagaaggggcttcccaggtggcgctcatggtaaagaacccacctgccaatgcagaagacagacgtcagagactcgggtgcgatccctggattgggaagatcccctggaggagggcatggcaatccacttcagtgtttttgcctggagaaatcccatggacagaggagcctgataggctacaggccacagggtcacacagagtcagacgtgactgaagcgacgtagcacgcggaaaggagaagggggcaacagaggatgagatggttagatggcatcattgactcaatggacatgaatctgagcaaactctgggagatagtgaaggacaggggagcctggcgtactttagtccatgggttgcaaagagtcaaacacgactcagcaagtgaacgacagcaaagcatggggagaagaagtctgtttccagtgggccacctgtcagagctgcctggagcctgttgcctggcaataggcagagtgacttctttcacatcttgggtccctgggggaagactggggtggtgagaggggagggtcaccagtaaatagaggaactgctggtagttgctgggcaaggctgcctctcatacccatcctagaagggcc

SEQ ID NO: 60173 - DNA, 2194 bp, Bovine  19866880584530
  misc_feature (1)..(1): n is a, c, g, or t
ntttcagagtgactacatcagtttacattcccaccaaaagtgtaggagggttgtcttttctccacatcctcttcagcataaaatttaccatcttaactgttttaaagtatgcatttctgtggcattaactacattcacattgctgtgtaaccaatgccagaaccaccccgtattcagaacttttttcttcttcccaaactcaaactctgtacccattaaatactaactccccatcctccctcctagcccctggcaaccaccattcgacttcctgtctctgtgaattggaccgcctcacgtcagtggagtcatttagtatttgtctttttgtgaccggcttatttcagttagcataatgtcttcaaggttcttccacatttcagaattctcttcctgtttagggctgaataatattcccttgtacgtgtagaatacatttcattcatgcattcatccattgatggacacttgggtggtttccaccttttggctattgtaagatactagttttgatgtgttgggatgaaggcctgctttccttgcctccttgtgaggttgacaagtactatcctatggacagtactctgtgtgagtgagtgagacacatctggatgtgtttggaagtctgtctgtctatgtttacgtaaatagttaggagataaacgtcctggctcagtggtaaagaatctgcctgcagtgcaggagacttgggctccatccctgggtcaggaagatcccctggaaaaggaaatggcaaccctctccagtattcttgcctgagaaatcccatggacagaggaacctggtggactacagtccatggagttgcaaagagtcagacgtgacttagcgactaaacaacaacacgtcctattttatatgtggaaaaactcttcctgcccacctgacttgtctaagaccctttatgaaagggtaaacagtagacacatgtgaggccagctcctgatgcaagaggagacatacacaacaagctcctccctcaggtcctgggtgcccagatcaagtttccctgctctgagcagtctctcccgacttgccccatcccacttcgcctcctttactttctttttttattttatgactttacaatattgtattggttttgccatatatcaaaatgcatccatgcctcctttactttctagtgcacacatactcagtcatgtccgactctgtgcgaccccatggaccgtagcccacaaggctcctctgtccgtggaattctccaggcaagggtactagagcatgttgccatttcttagtctaggcgatcttcctgatccagggatcgaacctgcgtctcttatgtctacatgcactggcaggttagttctttacccctagtgccacctgggaagcctcatgtattaggatggcctatatactgccgggtgctgcaggggtgggaagtcctagctgggagcctgacagcctggggccagcaccagttctgcaattcctgggttgtgtgacattggctaaatcactgaacctcgttcagtctcagtctttgcatttaagaagacttttctttttttttctttctggtgtgcgtattaaaggcaacgtatcagaagttgttagcacagaacctggcttatggtatacagtctccaaaaaatctttgttccctttctcctcccttttctaccaggtagtgtgcacttcgataggacaggccttattttacttacctgtttggcctcggggcctaaagtgcagcgcttaccgcagtggcggctagttcagggcttactaataatatgctggactgtatgcaaaacaaaggctctgctacaaccaggctttccaaaagtgttctgaacaaacacagcaccagtggaatgagggcagggcctcctaaggagaacactttgaagaaatattatttggatgggtagattctggccggattaaaaaccaaaaacctgatattggtcttgttacttttttggtcgttgcctccttgtctgtgtgtagagcacttctcgaagattattagttgggactttaaaaataggccagttgtcagatgtcttggcaagaaaacatatcccagtggctttaggtattttcataaagctaaacaactctccttggagagagctgttttgatgaaaagtcactaaatactctgaggaggtcagaaaacaaattcaacccctccccagct

SEQ ID NO: 60174 - DNA, 1309 bp, Bovine  19866880593448
  misc_feature (1)..(1): n is a, c, g, or t
nggctcggtcctgcgtcctccggccctcagtggctttcctctgggtctggtttggagctgagggggaactgcgccgcctgacttccccagccaagggtttgggaagttggggaagaggaaaccgtcccaggagctgccggtccatccgcgccctgctggccaagcaccctgtaaatagctcatctgcttgcattcccggggcaaatactttccattttcctcttgggtcactgtgaattctggggttctctggcagtttattgcctcgcttcctcttccaaagattgaaatgacggcggcttgaaaatattttctccatttgggtttttccttggtgacctcactcggagacagatgtgccctaataatagcatcgaaaattgagggggatagatgagccagctggttctgttccctagaagttatgttacagttcccaaatgtgggcggtccccagggacctggggtggaggcagagcctgtgacagggccagggtcaccatgagactccggagtgcccccctctctgggacagagtccctgcggctgtgtttaccctggagggaggctctcacgcctagtccgggctcccagctcagctgctgggctcccggcacatggcaggtggacagtgcaaaggaggtttgcacttggcatggattggcagaccgagcgctttctcaactcctgccttttccctgtgcccagaggcttagaacttggcgagacctaagcccagtctgtctggagcagccagtcttccaagggtctctctggttgctttggctcaggcccgctggctggaaggaccctcggtccttaagcctgtttctcagcttctgccatctgagaatacgttttccagacaacccacttgcatctctcaataacctttcacttcccccgacttagttggaagaggctggaaacacgtctaagggaatcagaagcattccataagccatgtgggcaagaagggggacttttgtagctcaagctttgaggcagagggtggggtgtcccttgtatagaaaacccttcaccatctatatgcaggtgctggtgctgggttgtgggttagctcctctgtaatctgagggagaagctgggagagactgtggcagaagccggctttcagttcagttcagtcgctcagtcatgtccgactctttggaaccccatggactccagcacaccaggtttccctgtccatcaccaactgcccgtgtcttcacacaggagatccccaacgtggtgttagggatccgttccctgtgtgacttaattatcccaagagctgctgtaaaat

SEQ ID NO: 60175 - DNA, 1575 bp, Bovine  19866880604906
  misc_feature (1)..(1): n is a, c, g, or t
naaggtcagtttttgaagtacggccttgttagaagatgttagaaccctcagagccttacaggaattctcctttggggattgtactcttctgtagaaatggtacttcttccaaaagcaggaagttcctggctaatataacagggagccttgcctgcagctcccaccgatcctgtgtggctggcttctgatcagagtgccaagagcatctgaagttcttggaagtgtgttcacacgaagattcgaaggtgccgtgagcaagtaccctgtgcagtcggaattccagagtcaaagggaaggcagcagatgatgacaaacttaggtccagagaaggacacaggcttttataagatagtgaatttgttctgaagtctacagcatttctttttatattcttgtcctctcttatttgactgctgtttaaagggctctggtgccgtcttgctctgtgctgagcaggtggtagtcagcagtcaggcagcgtagcctgtggctctggagtcagaggctgagtttcaatcccaggtggccaattactagtatcatcttaggcaaggtagttatcgtctgtcaaagtacttcctgcattgggtttatgtggggactgagtgatgtaaatccccacgatgctcacatggtaaatggtactaattgtttttgtttcacactgatgaggccatgctgggtactgtgtaaggactgagaaaggactgctctgagaaagttgtcagtaaagatgctggtagttaactcttgtgggcttaatatacgtcaggcgttctcgatgctttcaatatcctggcttgtttaatcctcataatgggcctgtgagatcaggctgttaatatatctattttggagatgaggaaactgagacacaggttaaataacttctcaagtgtcagggaaagttctagtatgtgaacataggcagtttggctctggagttgaggtcagaactgttctgctctccccgacctctcagtgcagactgtagactagggaatcaatgttgtcagagccagtgggtgcctggtggtgctgagaccctcagaggtcatcccccaggcatcccgcccttgcacttcggctttctctgtcacacagccgctgtgaccagaaggctgcttattcagccttcctattgagcaaacggcccactgaaaactccgctttgggctgagacctttcgctctctcttggcctgacaggtctttattatcagtgtgttagaaagtcaaggctgctctttatgggagatggtggtggggcggggggaatggaggccacagggccatggagagttcaaggaacccgaggaaaacttaaggcattgttccttgcccatcagctcctccctgggtcctccccagcagtatgtttgagtttccagatgaccttggtttgatactcgttttccagctctttcttaagctgccaggctcagccttcttcattttaagtaagtaagtgcagcagtttggagagggcaccggcctgcgccatgaccagagtaacagagctggtgcagccaggtgctcttcctggagcccagtggcaggtctgcaagtgctgagt

SEQ ID NO: 60176 - DNA, 4095 bp, Bovine  19866880612225
  misc_feature (1)..(1): n is a, c, g, or t
ncctggcgggggcaggggtgatgatggtgaggagagggagtgacactcaccccatcccagaaagcactgtcgtgagccttgttgttgttctttagtctctcagtcatgtctgactctttgcgaccccatggactagagccagccaggctcctctgtccctgggacttcccaggcaagaatactggagtactctccatgagtgcctctactgagcaattattggcaatggcaaggtctagagaaagacactcagaacagatggctgaaagaggcgcagacaagaaggcggcactggatggaggccaagtaatccatgccggttgggagcagctctgctcctgcctaagaaggggcatctgtgtgcccgaaagccatggtcactgggggtgctcagggaccccatcaacactgcctgagcgcctgccctgtgtctggcactgcaaaatgtggaaaactgtagttaaaaggtcaagtctctgctctcggaatggaggagacagaccccaagtcctgtagatggtttggaaacactgagcagcatgtgggagatgagtgtagctggggtgcactcgctttagccaggggttcagagacttttccaaggagttaacatgggagccaagagctaaaggatggttctctctgctgaggttccccagggagcaaagcctgaggaggaggcttgtttcctgcttctttatcagcatgaagccccaccggatcctccaacttacaaagatacccttgcccccgcccccagacacccttcaaggacgtggggtgggaaggacagcacacagatggcgcccagcaccatggtctccagagcctttattcaggaaggcaacagggcgtttaaggtctgtttgacaggcacgctgcgggggtctgtaacagctcagttttctccaatgaagcttctttgtcagaatgaagaccagctgctggtctgatctgataggacctttggggagctgcatccatcaggcaggtgggtgtgtggtgaaggtgcagggacctagtgacctgttcttgtctcccactggggaaaggtttgtaccacgggaagggggactgttaaattccccagacttcagggttacacaggcacatgggcacgtcccagggctctgggctgagaggaaagaaagggcaggaagcagttgggatgaatctggttggagcccacagagctagtgtggggcagggacaggaatgagatacaggcgtgagaatgagcacagttaccacgggataacctggggagagcagtccagccaggagggacagaaggtgcaaaggcactgtggctgttttgtgcttttgtcctgtaatttttcaaaatgataaggatgaaccagccccctggatacagaacgctgggttctgcaaatgaagccgccagcaatctagagctgggagaggcctgaagggaagggcaaggcgaatccttgatatgctgccagggctcctgctctcagtggtcttcctcggccaacccagccccacggccgtgcattagcccaccaaaccctcgctgggcggctgttatgtgccaggcttggtgctcagtgcctgggatgcatggcaaagacaagacaagctctctgccctccagatgtcctcccagggagggagaagacagaattggttttgaaaacaggcaaattctggatctgaatccctgcttcccacttattacccaggacaaggtgtttgttctaagcctcagtttccccactggtagaactatacagctttactcatggagccgataccgggatccaaggggactagagacgtgagcacccagagccaggctgcataagcaaaggctgctggcagctctgccagctccaggggggagcagactgtggcttcgtccctgagatactatgtgaagttttcatgggaagagtagaaaagagttttgaaaagtgtttaaaaccctttgccgattaaaatattacccaatctgacccacacacctgggagttatcatagccccactggatcctccaacttacaaagatacccttgcccccgcccccagacacccctcaaggacgtggggtgggaaggacagcacacagatggcgcccagcaccatggtctccagggcctttattcacgaaggtacagggcgtgtaaagtctgtttgacaggcacgctgcaggggtctgtaacagctcagttttctccaaaggtgtggcgaggagaggggtgcagagggaaggagaacacccgggggagtcttcttctccagaaaaaggcactggcagggggtgagcaccttgcttcttcccaagcaagggcctgggttatatacacatgggggttggccagacgcagagaaactcaaagctaaatacagctagcggtggaaagagtccatggggagtgaggaggggaggggggcagtggccaaggctacatccgggctctttccactgggtgggaaaagacgttcagaaagaaggcagagctttaaaggagaaatagcatccggcctctcagacttagtgttttgtgcaattgaaaaacccacaaaataaatataacttaaaaacctcttacatgatactaaaagcacatttgggacaagcagttgagaacccccctccactgctgagcagtgctgaaccccaggagccccacggggccacccactcacgtgtgtgcaggtgtgcacacctcggccctccctcctgacacctgcagggccagggcccagggggtccccacctggaccgggctggctggggaaggtttccagactgcctgaatcccattccaggatccatcagcccgcttggacaacggaggagtgggggacagcggggggaatggggtgcgagacaggaggtgtgcaggagaagtagcacaggaaatacaaacccctcaaacccctaagtaatagaataaccccacagagataccactttctaccattcaggtatacacttgtcacccaaagcaaagaattgccaaggggaggccctctggggcacctttaatgaacaaatcacttgtatattagcacactgtttgcaaacaactggcgtctgcttaaagtgcttggaaagtttgttctcttcaattggttaggctggtcccctgtagtttttgttcatagcattattttgctttagcaaactttttttcatagatagaatgagggtaacccgaccagcccctagtggggctttacatctgaattcatgatgtcccagacccccccagacagttgcagcagagacccctggggtcccttctgacccagctgaccacagctcccagaccccgagctgactttggcgcttctggcttctagggtcaggtggtgtcacgagctctctagtgctcagccgggcgggggtgtgacctttagcaagtcagcccacacgggagctcactgctgttttgaacaagagccaggaagttgaaaagtgatttccttttttaaaatctgtacttacacatcctcgtgtgtcccactctccgcccccaccaactgtcactcactcaggatggaaagggaaacgtaagtcacgtgggcaagttgacagttcccccagagaccctggggtgatggcgggcagcccaggaagccctccctgtggactggtcctccaggcacacacacctggggacacatccactccatgtgtccctggagcatctccctgcagagccatgggtccaacctcctgcagcagcacctgggccacagcacgaaacggccgcagagctggagttttgttctttaaaagtcatgcaagatttacatccttctcaataatacagatctacttgttttacaactaaaataaggcttacaagtggttccctatgaatcttcaaacaacctagtaaccccaggaagagatgcctggcatcttccacatattctggaagctgcccacagcgcatttgggaaattggtctaagccctccaggctgctatttcagggggaaaattatgccagtgagccaatgtcctgcttcctccttgctcagcgctggcctgaggctctgccccctaactgatggaactctgggtttcgtgagagcccttgggtgtgcatcaggggg

SEQ ID NO: 60177 - DNA, 1110 bp, Bovine  19866880624626
  misc_feature (1)..(1): n is a, c, g, or t
ntttcctccctcttccttctaccccactccctgcagcaccccttctacacagcaggccccatatgccccaatttcacatacacaatctcattttaccatcacagccaccttgtgagggaggtattaattgtacctatatgacagatgaggacatggtgactcagaaaagttgaataatgagctggactggattggtcctgaaagctttctccccacagtcactaagtttcacctgcttcttcttctcccccaccagcccaggtctctccttctcctcagattctcttctctgcctgtctcttcccagcctaacccatcttccctcccctggattttaggctgttattcttttctgtctcccagtgtaacaggctggcttcactcagctcctaataaatctgtgaagttgtaatcaatctgtatatcagctctcctgaggaaacctggtggggattaggtttgcgtttctctgtaattatagctgaagacctaggcaatgaatcaaactgactgacagaaagaatggggttacctcaaaacaccttgcgtctcctctcctgtggtctatccgggcaggccccaaccacagatgacctgcctcgctgctgcgcccctcccccccatccccaaggctgagggtgtgagagccagaccagacctctgaccttgggctggaggtcaagatcctgaaggtcacagaaaaagcaggtctgcaagatgtgcaagaatcttccagagcgctcatctaactacgcatcctctctcctcctgtgggtctgggtaatttctccctcctttagtttcctggggtttctctccctacacttgggtaaagtgggagagagggggtctttttgaggagtgtcagtcccctaactagtctggaaactctacacttgattttggctatttttggcagaatcagaaggagatggtaggcagcagtgcgcgtgacagtggagaccaaagatggggggaggggtgctaggctgccaggtggtggagatgccttggagactgacaatccatctgcctctcctttctttccaggggcccaagcggggttggcgcaagaggacttggtccaggcagggatgctggcctttcttc

SEQ ID NO: 60178 - DNA, 2218 bp, Bovine  19866880645123
  misc_feature (1)..(1): n is a, c, g, or t
natttcaaaaatgtcctgcccgagtgtccatcactgatgaatggaggcacaaaatgtggaatatttacagtggaatgtcattcagtcttaaaaaggaaggaaatgctgacacgtgctatgacatggataaaccttgacgacatcatgctaagttgaataagtgttagtcgctcagtggtgtccaactcttggtgacccctgtggactacaggcccgacaggctcctctgtccatgggattctccaggcaagaacactggagtgggtagccattcccttctccaagggaccttcctgagccagggatcaaagccgggtcttctgcattacaggcagatcctttagcgtctgagccgctaaggaagcccagctgcaaaaggacaaatatggtatgattccacacagaggcagagagtagaacagaggttaccagggaggggagggagcgggaatggggaggaactgttgaatggagactgagtttcgctttcagatgataaagttctagagatggagagcggtgaaggttgcagggcatcgtgaatatacttactgctgcagggttgtacatgtaaaaatagttaatatggtcaatcttatggatattttaccagaacaagaaaagtgcgctctggatgtctactaactcactagttgctggcagccttagtgagaatagagtctttaccaaggacattcacaccccacagagcaaccacttgagagctttgatcctgtgtaatcttgccatgatttaacttcattacagctttgggcatacgggaagaacccctttttcttctctgatttgaatgccatgctgattaaagaggcccaacccacagggaggcagcatgtgaatgccaaaatgagggcccctagataggggcactcacagcttggggaccccaggacatacggcctgccccctgccccctagtacaacgcagtccctctaactcttcccctgcagtcaccctactcagaggctccaggagacggaacgtcactccctttaatgaggtgcttctgagacccggggtaagaagagaccatcagtctacctgccaagggcggctgggagaggagttgtgttcttttccggtgatccccgtctgactaccgagccaaggagagaagcacagggtcagacgagttgcttccacagctcatggatttctgggagcaaaagtcattatgtggaaggagtcttatctgcggctttgcattctcagtagaaggttctcttttccggtctaaacaagcagaatgatggagttggcagcccaggagctggggggtgggactcggccccaggccagctcccaggcaggctctggggagagctcaccaccagactttgcctattagggcaagaaggctctgcagatgtgaaaggccggatctgtggtcacaatgtagttgcctctgatattttggaagttcaaactagccactgtaggtcccagtcacctaaaagggggctggaaaatgggtgagtaaggcatacagctctgtagaaacagctggttgcttttttccttccgaactagcactttgggaaactttgtatctgatggactcccaggaatccccattccatctccccagcaggagtggtacaggcagaggctggcccaaggccgctgccccaaacttccctgttgcctctgagccatccctactttgctacccaagggccagccaggcctggctgctgagtgcaggggcctggctctcttctgtcctgcctgtctctcatgctacccaccctgagtgctctgctggggtgggggctggagagtggcctgtgagaaactcaggccaggccaatctgtctctctgagaaccctcagctcccagctggggtgcttgctaacttcatgctccccttcctgcatctccccatcccgtgtgcaatggggtagggcagtgctcaccttcacctggggttcacctgagccaggcctggcacagtctccaccctgctcataacatgggatggggggtgacagtccatacctgttccgtgagcttgtcccctgtgagtgcccggcaggccttcccctggagggtgatgaggtctgcagacccagggtcccctgatacccagccgggtgcccccttccatttctctgactcattcactgtcagagcctgactcctacccgctctgggcttcaggggtcctctcgcagccccagtctcaggtgcagccc

SEQ ID NO: 60179 - DNA, 2027 bp, Bovine  19866880813690
  misc_feature (1)..(1): n is a, c, g, or t
ncatcccccacaagacttagagctgagtcagggaagctgtcctccacaggagaggcaggggcctggccacaatgtttctggcgggggccaaggtccaatcagggcttccctggtgggtcagtggtaaagaacccacgtgtaatgtaggtgatgcaggttcgattcatgggttgggaagattcccaggagaaggaaatgacaacccactctagtattcttgcctgcagaatcccgtagaacagaggagcctggctggctatagtccatgaggtcacaaagagttagacgtgattgactgattaaacagcaacaaggttcagccaaacactaactggcacaaaatgatggtaatgaactgaactgtcaactaccataatcagtgtgctgaaagacacctgggacctaggtgcagacatatgcattctgtgtccctatgaccccaagggagagagatgggcaggggaagcctgaggaggaccctggccccaccccacagaggcttacagcaaagacgccagagggctttgcagtcacagccccctctggccaccagggctctgctgaggtcactggcttccccaaggagctagggctgaggctccaggaacgggcagcgggagcggaaggactctttcacttccatcctggatgtcccaaagggtcctgaggaggtggtggggacaggaggaggagaagcagggcaacgcgcgagctggcagtctcccatcaggacagagcctgagggctgaaatcatccttctcgagccccttccggctcaggttttctcttgactcacaagggagtagtggaaggttctgagcttaaggcaggggagggggggatggggagggtcacaacagggagaagggtagagctttcctctgaagcagctgctccagagaaaatgtgctcccctgggacgaaggccaggcagtccagttggattccaggtatcacctgcagctgcctctgtggtcattaagatgtgccgctcatcagtggctgagactcacacctggatgccctccatcactcctctaagagtgtgagtctcaagaaggaaatgtaagagaagccttggtctggacttcacagcctaatgacaggacaagccacaccttacagaacacatcccactgctaactgtgtccaagtcagagccagagtgagataaatgggagatcacgttcagggtcaaactcagttctataagattccatttctcaaacctgatggggggtggcataagaagcaatggaaattgtactaaaaaatacatcttcctgggtcaaacaacactgagattctaattcagccagtctagtcatcaagttttcatcattatgcaatcatttcaactggaaactggacaaaagccctaggaagacagaatcaagatagtttcaaagtagggcttccctggtggctcagtgataaagaacccacctgccaatgcaggagatgtgggttcgatccctgggtcaggaagatcccctgaagaaggaaatggcaaccaactccagtattcttgcctgggaaatcccatggacagaggagtctggaaggctgcagtccatagggtcgcaaaagagtcagacaagacttagcaactaaacaacaaccctcaatttacttgatactatattttccttctatctgcattagtgagaaaataggaactgcactaataaacaatctcagaattgcagtgatttaacacataacatccttgcttctcctccttttgctgatcacctttttctgcatcttaattctcaaagaagatagctgtccctcggcactttatgtcaagtgaccaacagggactgaggcattttgactttaaagggaatgtaagtttccaagggggaaaacatggcaagtcatcccaaggcatgcttctattgttgatacaattatctagggctgcaagagtggatttccagttcataagggactattacagaccaccctttgtttttcagttggcaactggtgttttggtagtattttgtttttataattt

SEQ ID NO: 60180 - DNA, 1810 bp, Bovine  19866880884216
  misc_feature (1)..(1): n is a, c, g, or t
nattatgtggtcagcattgaatgaggagttaatctgcctaaaatcacagtaatagaagagtcagaatatgaatatgaattcagacattcttactctagaataggttttctcaactttgacactattgacattttggggcatcatatatatatttgtttggggggctgttctgtgcactgtagggggtttaacagcatccctgaccagttgcaccttccccaggtttaacaatcaaaaatatgttcaggcgttgccaaatgtcccctgaggggcagatcacctctggttgagtcaccgctctagaccttgtcctagtaaccatggccccatactgcctatccaggtaatagtgttcagcacagtttctgtgtgtttagaatgataagtccatttggagtcctgctggaagcagaggacagatgccactccatctgtgactgttgggaagagaaatctccgaggtggtgctgtttgagttaaattttggaggaattcacttaggcaggaaagggggaaggatatttggagtagaaggacccccttgcacaaaagcatgaaacatgagaaaacaaatctggcttaagggatggcagataattccctctggacccttcacttccctctctgttgcagttttcttgtcttagcagcaagcttggttcacagcagccttataatttttactttcaatcagaggtgttgtattagtcaggatgagctaggttttattgcataacaaatagccccgaaaccaacaaaggtgtgtttcttgctcatgctgcctacctgacctgggtcagctgtgggctctgctgtttgttgtgctcaccctgtaacccaggccggtggtgctaccactgtctggagctccgctgggtaccaagacagagcgaatgagaatgtggcgaatcctgtcctggcttgtaaagcttcagccaagaagtagcacctgccacttgtttttatattcaattggccaagaaaggctcatgccctcacctaactttaaggggacagaggactcaagacataccacgtgcccaggagaagaactggaaatgctggagatagcactcacatctcccacagatgtcaaaggcccaccctaggatgtgcgagcatggacacctcatcctctccccgagggcctcctgcttggctttcagtgatggcctattgccaaagccactgtgaaatagccgagcaaaaagagaaaattagataatcaagagtccaaaaaaattttaattctctgaataagtcagagaggtctttgtgggttaggactaagtcacaggctctcattttagagttaggacgtcgaggggtgagagtgggagaaaggattccggtaaatacggcctggatgtggtaggttgttttatggaagtgggtgtaggtgttcaggacacacacaggtagttgtcttcaacattcaggatgctggctgtctctatcgtaagtaagtagaagagctttcaagcctgaactaagtagaaagatggtctccttcgtgggctgttctgagatacaaggaagaaatgaatgagagcaggagccaccaagagcatttaggattattttagaaagtctccaccggtgccttataaataacccaggagaaattttccttgttggaaactcactcagaccgcgcctctgtcctgggccctggggcgaggagatagacacagagacgggctgccgtggatctaaaatgggaaaagaccggaaatctgcggggaggatgcagtccttgtcacccctaggcagagggggcacagaggtcttagaaaaatagaaataaata

SEQ ID NO: 60181 - DNA, 1008 bp, Bovine  19866880972188
  misc_feature (1)..(1): n is a, c, g, or t
nctaatgggccacggtgactgtgtggaaagcctgtgaccatccaccatcctcactgcctgggttgggctcaagggacacgtgtaaaaatcctctgttcgttttccaaaactcctctaaggccacgcagaaaacaattccttctttgtgatagattgtttgtgcacattcaccaaaggagattttgcaaatattatacttcattagaccgagggagaaacaaccatgtcctttcatttcttatgactcactgacgtgaagattaaggatgcttatttcatgtgctgtgaagtcccgtatacatcattaggcagaaacacaaaaataaatgcattcttcagtcagctaccctgcctcccaggggagcccaaacgcccctgcgggtcctcaaactggcagcaatcccatcaacactcaggaccacttcctgccaccacccccacccccaggaggcagaagacaaaccatcaagaacacttccaagcaactaagggtgagacgatgccattcagagcaccctgaaaaatgactgcggtcgccactgtcttcaccggttttaaatgatacacacacttttctctgtttgtttaattaatataaaaaaggaagcatatctgggaccttcaggatgaccgtggtgcaaaactaaatccagtacaggcgccactgaagagacgaagagggaaggagcgcctcggggaggggggctgccgggccacagccttccaggaggcccacgggaggccagggaggcggcatggagacactcggcagctcttcctttgtttttctttgtatttccaggcccgacaacacctttccctaaatacagcacccgctgagtcagcttgggtgggatcctgaggagccagagcctggggggggtggcagcgtgtgggtgggggcgccctgggtctcctgcacaccgccgtcccgccgtgggggcggctgctccgggtcaccatgctttttttggaatcaagagatggttggggcaggaagggacctca

SEQ ID NO: 60182 - DNA, 1508 bp, Bovine  19866881092242
  misc_feature (1)..(1): n is a, c, g, or t
nctgaatccttcctgttttcataggaattcaagatgcagggttttatttgcttgacgttttctccctcccttccttttttccttccctctttcccctgttcccacttccctttcgccctttctccttcctttctagtggggaaggagggaaaggagagagaatgggtaagcagacaaagcacaaaccctttctctgtagggaactggccatctaaccttacgatccctctgacccggtgctcagacatcccttagggtcttgtcgagagagcttccccatgtttaatccagagcaggggctggctggcctatccagcagaaggggcctccgtgactttccccgtgggagccaggaggggccccatgtgatggcgaggcagcctgtccagttcaggcccgtgcagccagaacaggaaaggagcaaaggcagggatgctgtgctgggaggcaccaggtgcacaggatttcttatttttgaacttcgcagctggacctcactctgcgccgaggggctcctggagcccacctgctcactgccgggagcaatggaggagctgggctgggaggatgagcagagcacgctgatggaggtgaggccctgctggaggggatagctggccacgagctgctcccgccagctgtgacagcgatgccttgctcctgagaggtgctgcctggccatcaagggctctcacattgggctgcctgcccagaagcaaatctagaaagttctgtttgaatgacaacatgagtgcactcaccaggagtccacaactcatgatgtctttgatgtaaaatttttctaagaaacttgggaacttctcgggctgtgtagaaagcacgtgtcacacacctgctggcttgggcctctcgggagccacatccttggtcgtgggcaaggtcgtggcagcacaggtgtgctgggggcgccatggtccaggccgtgaggcagggttgcaggagcacaggtgtgcagggggcactgtggcccacggactctgaggaacgggagcaagcagggaaggtgctggaggagtggagccgggcaaacccatccagctctttttaaagggaaaaagatggattttaacatctacattgactacgatgtcaagccacaagaaaatgctaccaaatattgctaagttagttgatttttttaaagtacttagtgggtaaaaatcagtcctctctaggtaccactaattaataaaaataagctttcaaagatttctgtgtaaagatgttaaagccagattacagcatcttccttttccaaaactgataccaaaaccaaagattttatcaggaatgaaaatcatgggcccagttcactcatgaatacagatatgagaacactaaacaaaatactggcaaataaaataccagcagggcattaaaaaatgccacatttagttgggtataatggcagatgttcagttcagttcagttcagtcgctcagtcgtgtctgactctttgcgaccccataaccacagcacaccaggcc

SEQ ID NO: 60183 - DNA, 1204 bp, Bovine  19866881093667
  misc_feature (1)..(1): n is a, c, g, or t
natgctacaaatctgattccaagaatccatgtgatggcagagacctgggtctctaaacaatgcaattgacttgagaggcttctggaaagtggatgtgattagcagaaaaggaggccagtctgctctccagatgaaaccagtgcagtgccggaccgtgggcatggtctctgctagttaatggtcctgtccgggtcgcactgacctgcagtctctctaaatgtggatttcataaaacctttaagaactagacactctggagctgcccaaggaatggtgaagagcctgagggctcttttattccttttaatcagatttgttaaaaataaaaaatcccatttaatgtataatactgttaaaatgctgaagtctgtaatggaaaatagtaggaaatcaaagcaatattcctgttaaacaaaagaagaacatattgaaccagaaatagttttatagtcatcttgaacactagcagttaaggaaaagcagatttaattagaagaagaggtagagggtcccagtggcacccaactttttaccaataatgctagatatttgttcagttcacaaacggaggggcttctcagtgaaacttcatctcccagaaaatgaaatatacaaagccatcgagggagaagcagaatgaataagagaggattttctagaaactaaaaatattttggaagagaaatgaccagtaagaggagttaaaagtggaagtgtgtcagtgtgagatgaattccactgagggctctctagtgagcaggctgggcactccgtgccaggagccgcctaatcgagcacctggacacagccgaggggtttgaatcatacagaattatgaatcataagaaattatgaattactagaaagccattgtgttgactgttattatttatgtagcaccggaaatacgaacagggccacccaggggacgtgccagactccctgtctggcagcatgctgatctccattccttgaaagtgaactgtgatacccggagggggctatgtctgctcatccagcgtgtgcacacgtgagtctcaccggtggtgcccccagtgtgcagaggacaggggcacattccggtttgcacaggttggaaaggtgcggagccccagctacaccactcatagtctccccctcacccagtagaccgtctgtgtagactggagatagcaactgctgctctcttgctgttaagggtgtt

SEQ ID NO: 60184 - DNA, 1278 bp, Bovine  19866881188870
  misc_feature (1)..(1): n is a, c, g, or t
ntgattcccctgggcctcttctcgtcccacaactgctccagccccaggtcctcgcccatgcaggtgctctgcctgcaaagctttctgtcctcctttccttgatccacatttgacctgtggctccagccgacagtgctagaatctgtgagccggccctatcttctccataaagcttagaccagtgacacaccattccaggaagcctcctcccagcaggataggttttgagagcttctttgagagggattcttttgggctgtactgtgtctcccatcagagggtatgcttctggagaaccgggagtgtgtcctctcattgctagatgcgccccaggctggacagagtggagtacgatacaaccagccatgtgacggatgagcaaagtttacagacccagccacacggcaagggctgaggctctgctatatcccacctcttaggaactacatgcacgcatgctaagtcgcttcagtcgtgtccggttctttgcagccctatggactgtagcccgccaagctcctctgtccatgggatactccaggcaagaatactggagtgggttgcagtgccctccgccacgggatcttcctgacccagggatcgaacctgcgtctcctgtggctcctgcactgaaggcagattctttaccactgagccactggggaagtcccataggacctgaaacagatctaaaccagctcctacctctttacactcacatgcttgagcttggatctttccagagacatctccagggggcatacttatggggatttcctgtccaatctgcctggggttcactacacaccgccagggctccagcacagcggagccggacccaggggccttttcacacacactcatcagggtctggaggatgttctttcactctggttcatgaagaaagcacttctaccaataattctttcagatccaccctcctcccctcttcctaactttacagaagctggcaatcaaggggcttacaatcttgccaaatcagccttttttttgttgttgttacccaggaatggaggtatccttcacccaaaatggaaatgctccgaacactccctaccaggcagccccagcaaatgctccatctctgattgagaaggtcacgggcttggctcctccttcctcctccctcctggacttcatcctcttaagaactaaaaataatggagcgctagaggaaagaggcaagacggggagggggaagcagctgaaagcataggaaatgctttggtgcgcaggggcctagcccacctctcccac

SEQ ID NO: 60185 - DNA, 2440 bp, Bovine  19866880420787
  misc_feature (1)..(1): n is a, c, g, or t
ntgaatatctatttataaagttagaagagtatctgggacacagtaagtgctatgtgtttgttaaataagtaaaagtagacttccacctagccacggaagggtcaccctggtgaagtacagtgcaagtgacaaagcgagccccagctccaaacagataaccgaagacaccgagggaaatggaaacaggtggcagagacctcacgcctcgggaagccccttgtgccagggacccactctcctcctctccccacaccctcaagagccagaggaccccatttcctggcctcttcagtcttcgggaccctaatccccctaccctaagccccaagccacttcccctcccttccctctacctattaactctttctatatagccagattgattatagacagagtccaggccctgctttccttcgttgctgtgtgaccttggacaagtcacctagtctctctgaatctcacttcctcctctctataggggataatcctcccttggaattctgtcctagagattaactaataactgacatcacacccgtggatgtgttcacaggtatctgaacatgtgagtgtctcacaggcctgaccacatgggatgggcgagctgtttggcaccaaggtggtgaagggagctgccatttaaaaccgacccacactttatacgagtttccccaacggcccgtaagcaccacttaggttgcaagccaagtgccctgtcctttagtccacgacctatgacataaaaatacaattcttgggggacaggcaggggcttcatgttggcctctcttcatgaagttacagcatctgaggtcctgaggcaggccttaggggagaggaggaagaagtaggagaggctaccagtgagggggaagacgagagccccgctttggagaactggggagaacagagaagacccctggagtgagggacagaggggcagaggggcaggcccccaaggctgtccagggcccccactgccaactcggcagctgcctggcccggccttccacccttccgaaaaggaagaggagccagcggcaggcagcaagttacgatagaccattacccgccgttaattaattaaaataatcagcaaattaaatacagcaaaattaaaatagcacaggaaattaattctctgccagccccacctcacaggtgagatgcttaaagagccccttgcagccaggattccgggtggctggggggtcaccaggactcgccttagatcacagttccaggcaacaccaagtacccatgaacccagccacccgggggtgttcactggctctgccaccctgagattggcctcctggctcctgaatctcaggggactctaagccctgggccacattcctgaacccaagctctgctcctctgtcagtgggcaagaagggtcctgatgccctctgggccagggactgggcactgtgccctcctgggcacatggcccacatctgccgccatacgggtcaaggcaggagggaagagggaccttggccttctcttccgggctccctctggggctggagttgggtcctggtgcatacctctcccttctgtgcggggctcctggcccctcatttggagtgcccagaacctcctccggggaacccctcattttgctcctttctttggcagagaatgctcaggaaggaagcactgctgaggcccagaatcccatgtctagcaaagctggctggaccaatcccaggacatgatactggaactccctcctaaacaagactaaacacttcatcacacagatggggaaaccgaggtcaaagagggcaaggcatctgttctccgtcacccatggcttcctggcagagcctggagctgagtctctaatggacatattccatgtcacctccaaaacatggcatttctagagtgcagctcagtcctgtgctgacctccctcttagcctggccaccacggtcttgcctccataatcccatcccacgacccccctttcctgtgtcccacacaacagccggattagactccttgcccttgggctgttgttcacatggctcctccttgctgaagctccttcttacacttctgcctgcttaagttcaaccccgcctctttagggtccgggtcagtgccagctcttctgggagcccccagagccctccttctcttttaaccttccaaggtgctccacccccaccccactccccactctctgctgtccacgtgagctgtggctgtggcatgtgagcttcttgaagccgcagaccacctcgcctctgggccccagcacttggcacggtactcagcactcagtaagtgtgcagtctcctcttcatctgatgctctgccatgtcctactgctaactatcgtttattgagcatctactacaagtccagcccctgtcctgtcccatcctcccatgaggacccagggcacagaggttgtggacttctc

SEQ ID NO: 60186 - DNA, 2208 bp, Bovine  19866880440326
  misc_feature (1)..(1): n is a, c, g, or t
nacagggggactggatttgatccctagtcagggaacgagagtccacaggccaaaactaaagatcccgaatgccacatggaatgtataagatcctgcctgctgcaacccagcacagccaaataaaaataaatattttttagaaaacaaaaataaaccaccctgtttatggtgattcgttatggcagccctagggaatgaatacataaggataaccgtcttgccagcagtggcttaaaacacagaagcaatgtctgttaaaactgctccactcccctgcaagaccagcaaaaagacttttttcatcagaaatacagaatgctagcactggaaagaaagacagctgataagagtatttactgggcatttactatgtgccagttgccttgataagggctatatgtgtgttcaccatcccactgaaggggcataaccaccacaggaggtgaccattattctccccatttacaggtgagaaaggttgaggctcagagggctgaagtgactcacccaaaatcctggaactaggagtggcaggacctgggtaagtcttgggttaattccagaacccagagtcctgacctctaccccatcttctctcagttggtcaagttcaatccctttgttttacaaatgaagaaaccaaggcatagctacagtggtgatcccaaaggctgtgcccactctaggggatgaacagcttaaataaagcaacggccacccagcggtccagctgaggctccctgtatttgtaaacaaggggtgcttgctcttcccactggcaaaacaagttggggtgggcagggagggcagcaagctatgacctgcccaccatctgagtggcgagtagccagaaactagttagttatctcagttttggcaaagcctgaggaagcaaagtggttaatgacaacgaggcccagcaagcgtgtcgaaagagaagattgaaggctggaacatagaaatacaaggctcctgagctgcacatgagtgaggggggtggggtggcctccagagagcactcagcaataaacagggcaggcaccttgtttggttcagttcaagaaccacaacacacccatgggaggcagggaagagaaactcgtctccactctggctctgcttctggcgtaaggatgactggaccagcggatgaggcagctggacactgccccagaggcagatttccttagatgtgacgtatcagcccatgggtctctggaaatagaacatgtccgtcctgcaaacacctactgatatgcttacctgagtatcagaccctagactggggctccaaaggatgctcactgcaccccctcatctggggaggcaggaatgagtgatcaggggtttgaaaactgtatgggtctctgatgcggcatgtgctggacactgtgggaacacggaggaggcatcagagaaggctccctggaggagagacttactaagcagaaagtgaaaagtgaaagtgaaagtcgctcagtcgtgtccgattcttttcaaccccaaggactattaagtccatggaattctccaggtcagaatacaggagcgggtagccgttcccttctccaggggatcttcccaacccagggatcaaacccaggtgtcctgcattgcaggcggattctttaccagctgagccacaagggaagccctacgaagctgaaaaggaaggggtgttactgtagagcaaacagaagtctgaggttcctgcacatcttctttccctcttgtcttgtcattgggagagttttcttatacatcccagcccctcagagggaatctcattaacaaagtcccaattagatatttaagaaacactcagtgaagcctcctcagagccagggattgagctaggaaacaggatagaagatgatgggatgcagtccctgccctccaagagccaccagtgtaaaagggaagacaagcaccggaacgtgcgattacactacagccagaaaatgcccaattcaagaccactgatgtttgtgtgtgtctcccctcttcctatatgacaggcactggatgaaggtacttgatttccatcactgcacttaatcctcatgacaaattactctggtgaacactgtcactgcatttagcagaccaggggactctgaggctcaaagaggcagagaaacttgcccaagatcatagagccagtaggttatacgaccaggactcaatcccaggtctgtttgaccccgt

SEQ ID NO: 60187 - DNA, 1429 bp, Bovine  19866880508620
  misc_feature (1)..(1): n is a, c, g, or t
naccccaaagtggggcccaggtaggatgtggaaggagggagggagattaagaatgtgaaaagggacattctctgctcccctgccacctctggcctcagcttggccctgccacgtactttcagagcccccctttatttcaccttcacagtagttatcaggactgcagtcaattacttgtgtgactggctgttcagtgtgtcttctcccggagtgtgggctctcaggggcaaggaccaagtctgtcttgtctaccgttgtatcccctggccccagggcctgggctatggatgctacgtaaacatttactgagcaactccctgagctggtcaggctgagttgggatttagatccaggcaggtctgactcccaaaggagccaggggactcagggccctggttgatccccaggagctggtttgggggagcaggaagctgaatgagccctgatcactgggaggatcacttcgtactccacaggaagacagcagagctgacctggggacagggaggtatgggcagggccacttgtccactcccctctggtgggcagcaacatgccacctacaaagcacctccacctatatgacccactgcatcttcagtgaaccgggagatgtggattattacctccatgttacagaggaagcaggttcagagcagttgtataacttgcctgaagtcacatagctgctaagtggcaagatttctaattctgccaagtccaaagcctccttccactcctagctcttgcaatgctcctctggacactcctgaaagtgcttcttctagagctgtggtctaaattaaggctgggaggaaccttaaaatcacctaacccttgggctttctaaaccctgggcctggggagctgtgcaaccttccagatatgcagaccctagtccagggagtctgactcataaatctgaagggacatctgggaatctggtggttttttttttttttggaggcactgtgcagcctgtgggatcttggctccccaactagggatcgaacctgtgccctgtgtggtggaagcacggagtcttaaccactggaccaccctagagaaggggaaggctacccactccagtattctggcctggagaactccatggactacatccatagggctgcaaagagagacacaactgagcaactttcacttcacttcactttactagggaaggccctgggaatctgcatttttaatcagcttccccccagtgggtacactgttccagtgtcacctcgtgcccctcccatttttcagacaaggaaactaagaccggaagagggaaacagactgtgcccaagaccacaagatagcatggggagggggtggcccccagtgtgttgttcatccaagcagaacacccccgtgtctcttcaggtcccaggccgcagctgctcctcaccgtcccatttactag

SEQ ID NO: 60188 - DNA, 1439 bp, Bovine  19866880525210
  misc_feature (1)..(1): n is a, c, g, or t
nagcggcactggagcaggggctgggcggtagggcgcacgcagcatggcggaagcggaagggagttcgccgctcctgctgccgccgccgctgcctcccccgctcgggatggcggaagtggaggcgccgacggcggccgagacggacaagaagcaacttagcggtgctggcagcggcgccatggacgtggagcggagccgcttcccctactgcgtggtgtggacgcccatcccggtgctcacgtgagtcttctctggcattcggccgggacagggagagatgggccggcgcgttgtcctccggcggccccgggccagcctccgggcccagcgcgcagcaaagccttcccgaggggccggggttcatcagtacccccgccacccgcgtgctgccagtggtgctgacggatgggaccggctcctcgctctcgttacacctggtctgatctgagagacagttgttgaccgtggagaggttcagaggctgggaagctcaggacctgtgggcgtacagaaaaggggccccttgacttagtgtgagagagacatctttcattcattcactggcttattcattcattaaacagacgattactggtcacttcctgtacgcaagacatcctgctgggtccggaggcccagaatggaagtttggttggaaccacacctgactcctgggatgtcgtcattggaagggcccccagaaatatcaccacaccatctctgttgcaaagcgcgtcaggcagtctgcccatcagaccaaagttatttctatagcatcagatcagcctttgtcagaaaagaaagcaagtgctccagaaagtgctggcaccttgtagcaaggagccgcggggttagggaggtagggagctggtttgccctggtgcttcagccctgacaattgatgataaccattaccccccgtgctggacacttggctaagctcttttacactcattttctctgaatttcacagccactttctgaggtaggaattatagtctcagatgatggatctctaccattaaatgtcttgatcaggttcacacgaaagtaagcaaagccatgcccaacaccgttttctgacttgctctcttttgaccacagcctgttccctctcacctgatggaatagacttatttgttccctgtatcaaaaacagccaggtggtatggagaacggatcatttttgtccttatatgtttctgattctaaaatgagctctttttcttaagtcttgcatcatgttaaaatacttctgttgtttctgtttcaaatgcttttgcatttgtttaagaatgtccaagtctgagtcctttaaaaataaaactatttaagaaagtattttcattgattaactcaatattccttttaacacacctgctcagtgactcctgtgtgcctagaatagttctaggtgataagaatatacagtggtgagt

SEQ ID NO: 60189 - DNA, 1073 bp, Bovine  19866880542498
  misc_feature (1)..(1): n is a, c, g, or t
nacagggtgcaaaatgcagagaacctttttttcacacacacacacacctcactttccaggtgtgacaaaggtacagcccccctccccacaacacatcgagtataagccggggacacaaccttccccgtgagtcctccccctccagattgccgggtgggtaaaggacatgtcaccccgggctgctcgggacaggtgacagcccaccggcccctcccccatcactgccagcctggtggtgccgtcctctgcctgcagaggcgtcacagctcacagggcatgaatgtcaccccagcactgccagcgccgggcacagccacacgttgccccagtgacaaacaccgctggccccaggaggtggaggcgcacagggctctgggcgtgaccttggtccctggacaccaggaggggcggcgccatggcctttctcctgggtagtccggggccaggaggatgagtaccgggaagaaggcaggccgcctgggcatggacaacctgaaaatgccaccttcccaagcagcgctcccccccatttctaatagaacgtagttgctttggggggaatagaatgcagaggccaacgaggttgtcctggccctaaggcctgaggagcaggtcctaacaggacttctcggaggctgtggagtcaggtggggtaggggtggctgtcaccacacgctggggggcccaggatggacagggtgggatgatcgcttcagacacccactgcggccagaggagcccctctttcttaccaaggccccctctccaattcaggccacagagcctgacaaggaggccaaagtccaggggcatgactcacccagggaacaggcccagcctgctggccagaaagtgaggaggacaggagccaagaggcctgggttcaagtctgagctcctcccagggcaagcggagtgaccttggagcagaggctcagtctctttggctctggggagggggaagaggcagcaacccgggaggtgcttgaggaggaaggacatggcggctcacaccctggcccactgcttgcttcctcaccaggaacctctgctttctggagctcagttgcctca

SEQ ID NO: 60190 - DNA, 1711 bp, Bovine  19866880658093
  misc_feature (1)..(1): n is a, c, g, or t
ntgcaggagacttgagacgccgggtttgatacgtaggtgatcccctggagaaggaaatggcaccccactctagtattcttgcctggagaattccatggacagaggagcctggcaggctacagtccattgggttgcgaagagttggacacgactgaagtgacttagcacatataaaagaaaatacaaacatattaattaggaggtaaacattttagccttgcaaacaaatagtggaatttggtttcagtctctcttattttttattatctttcttctcatgctgttgatgatttggtaaaatttgagtattatcttgtaagtctaagttaccaaatcatatcattttcttttttcttttttttatatcattttagaattggaaagaactttttaaagatcatcgtgtttaccctctcatattatagaaaaagaaatattatgtttcattaattctgagatgcatattttccccatattttaacatctctggaataatcatgcatcttaaatttcatgaaataccgtaaaaacccattagagttgtgacttttccataaatacttacggtagaattcaagtcttctacttatattaccctgacctagaaaacttcccttctttattctttaaatccaaatcctgcccagttccagtctttattccaggaattctgctcagttgaaagtgatcttttcatcctttcttttgtcataattgactacatcattcgtttgataacttctgtttactatgttgttacttacctgtgttttatctgtctcctcaaattacaagctcttggtcatgggaagaattttatatttgtatcatctagtgtctgtggcaccccactccagtactcttgcctggaaaatcccatggacggaggagctggtgggctgccatctatggggtcgcacagagtcggacacgactgaagcaacttagccgcagcagcagcagcagtgtctacttgataaatattcattgattgataagcgtgctataattagtagttagcaattaatgcaacccaaaacttaaagagttgtttactggttaaaagaaccatatatttaactggatgccagaactaagtgctagatagatgtagaattagtatttctgttactactactgctgcagggactactattaatactacagtcattgctactattattgtaattatgctgtgccaggtactatgttaaatattttatacatgcattatttcatttttctgcacaacaaccttaaactaaggatcattttactgattttaacaggttaggaaacagacagggcgagtactgcttgccaaggtcccagaactgaagtttggcagtagtggggtgaaatccatacctccttctctaatgtccatactcttgctgctctacatcactgcttattaggtcttttgagggctttggtaacctagtaaactgagaatagaaagaaaagaaatggacacgtacttttcctgctgttcagggacttttccttataaatcccatgttttgaatggtggatagaccttgtgagaggaagatgtacagctgccctttgctgctcttagtcagttgctggcagcttggccgttagtgacagatgagtgtgtgacactttttcagcaatgaattcttgttacagctggcagaacagaatagttgctagaaatttcaggcagttgcttcataattccact

SEQ ID NO: 60191 - DNA, 1625 bp, Bovine  19866880699863
  misc_feature (1)..(1): n is a, c, g, or t
ntacttagaacccaagataatgcgtggaagaagcagtagtcttcaaaccagaaagtctgaatttaagtctcagttctttctctctatccttgtcttactgactcttcaccaagtcaaactctcagcctcagtttcatcatctgtgaaacgggggcaactgtatctatctcaccaagttgtcataggactaaataagcccaaaacgtaaacagttatataatgagattcttccttatactgatgacttttaagagtatcgatatctcagtatcttaagacttatgcttgaaaatgaaagtgaaattcgctcagttgtgtccaactctttgcaaccccatggaccacacagtccatggaattctccaggccagaatactagagcaggtagccattcccttctccagtgcatcttccaatttaaaatataattccagttggtaatgtgatcagatcaaatcagatcagtcactcagtcgtgtctgatgccctgctctataagtactaaaaagtactacaacctctgaaaacaggagtgtgatacttacatatcttgttcagagttaaatttcactcattcagattaccaagacagatccactatcaaatcagggcattcataatagacatctacctcattctgcaaaagataccttagcagtagaatttttcaaacgaaaacaaatcttcttaatgacccaagaggaggttccattctcctaggtggtcagaatactgattcagtgctggttggctgcacgttttctaagacatggcaacctaatacgtgaaatgccaatctcactgccctgagggaaaataagaactctggatatgctatcagggagcaatccatggctgtgaaatttttagttttgtgcttcatgcattccataatcagactttccctactagaccaagcacttccggctagaatatataacccatgaggtcaaggtcataagcctgaagtacacaggagcccattcctgcacccctctactgttggacgtaagcctagtcatctttcaaggttcggttcattatgtaacctcttttatgaagcttttcttgactctccctattcctgctatgttcccactccccgtaggaaatattccttctttccctgtattctctgtgcaccgacagcatggaaggacagaaagaatagaagcacgaatcacttaacaaatatttactgagctcctattgggtgccgggtactacacaagatagacactggggttcaaggaaacaacacacgatttctgccttcaaaaaccttttagtttagtataggagatacagataatttttaatataatgtggcaggtaataatacagcaagtaataggatctcagaggagtactcagtccaacctggaggagatccctgagctgggtcttaaagatccactgcaaagatggcaagggctctctagcagtgggaacaacaaaggcacagtgcagaagtatggagagtacatggcccgtctcagaagctatgcgcagctggcagttcacctttccttccttcttcctcccccccttctttttttccctttttaaaagaatctctttaaaagattgtaaaatggggagaagatggattgcagaagatgagg

SEQ ID NO: 60192 - DNA, 1333 bp, Bovine  19866880720517
  misc_feature (1)..(1): n is a, c, g, or t
naaaattttctatcaataggtgactgctactgatagaaaataatgttaattttatgggtaggggatgaaattatgataaacttgctgcaaaaacagaattggtgagaatattatacattctaatttctgggcttccctggaggtccagtggttaagaattcaccttgcaatgagggggacacgggttcaatccctggtcctggaagatcccacatgcttcagggcaaataagcacatgcagcacaactattgagcctgtactctagagcccatgagccacagctagtgagcccacatgtcacgactaccaaaacctgcacaccatagagcccatgctctgcaatgagaagcctgtgcaccgaaactagagagtaggccccactcactgcaactagcaaaagcacatggcagcaacaaaaacccagcacacagccacaaacaaataaataattttttaaaaaactacttgcattaaaaaaaataacgtttatttctatggcacaatgacggcaaggattgcattcattgtgcataactgtttcttatgaacagcaaccttctgctttaccagattatcccagaatttgtccgtcagcctacatctccatggtagccactctttcttagcaccaggcttagctccacctatgctgagtgatctcaagcaagactgtcatctactcctgagcttctctgcacagagacgagcctacccagcattgtgacatcacaagaatttgccctagatgctggaaggagtcgatttaattcaattttccttctctcacagggattttaagaacaagttgatgaaggtcaaataatacacggatcgttcaagccaatccttcagacagaataaaaattcaagttggagaggaaagactggattctctggattctaccatgattaagtaccccacagtcacttcaaaggtgtgaatttgctattagagctcacctgagcatgattccacccagacgaatagctctcttccagtccttcaaggtggatttgccagccagatgaacaaaatgcttggggctgatcaactgatcattgaactaatgtaaaaggaaaagtccaaaataatccaatgttaatttaggcaggccatgagggaaagaaagacataactctatttgttacaaacaaaacaatacccagatgacatctctcatcatagcctgtattctctatcttcccatcctattgtgctagagggaggtgatccttctctggccctgtcctggtgttaatatattgattaggatataaaatccatttttgtgtcctgaatcaagcagatgggttttgatattgcaaaggcta

SEQ ID NO: 60193 - DNA, 1047 bp, Bovine  19866880734500
  misc_feature (1)..(1): n is a, c, g, or t
ngtactaaaaaagtttgtaagggagacaaacctaaccttggaagtgccttttttttttaatttggccactctgtgtggcccacaggatcccagtgccccgatcagggactgaacctgggcccgtggaactcaaagtgcagagtccccaccgctggaccaccagggattcccagaagctcttgtctttaaagctgggttctgggatcagactgcctgggtttgaatctcttaactcactatgtgactttggacaaacgatgtaatctctctctacctcagttttctcatctgtgaaataggattaattacatatttactgtatagcaccattgtggggattaaacgagttagtctgtgtaaagcacttagaacagtcctggtcatatcgtattatggaaatgtttgctcatttgtttgtttatttttccttcttcctttaaggagccgtgtgaagccagtggaatacagtcaaatgtacagttacagctacaaccagtattaccagcagtaccagaactactacgcccagtggggctatgaccagaacacaggcagctacagctacagttatccccagtacggctacacccagagcaccatgcaggtaaccatgatttggccagtctggccccgcatcctctagagacctgggtgagtctccgggatggggtggttaaggacaggagcttgtgcttcagaaagacagggaaagatgcagcagcttaattccccttgttaaaaagaagccatcctagtcctgggccaggctttcactgtgcttctcacccacctctctggtctcttggcagacgtatgaagaagtcggagatgatgcattggaaggtaagaaaggactcccttcactcagtgtaggatgtgaatgtcacctgagtcgggagtgcgggtcccaaatcaccccagggaccgacaggtggaggtgggcgcctgaggctccctggactcgtggtggtctaccccagggtgtaggtctgaaccgaagactccatggccttatatttgttgcacagtttgtcagattcctgtaaa

SEQ ID NO: 60194 - DNA, 984 bp, Bovine  19866880752809
  misc_feature (1)..(1): n is a, c, g, or t
natgcagagtgatgcaaacaccctcccttacaagaggtcaagtgatgagtgtgtgctgggactcaggtggtccctgctcaggaccgagcatggctaaggggaacagacacctgatgaaccaaaccagatggccccacccagtctacagtcctccagccatttaaaaaatgggtccccggaatgtctaagccccgtactgggttccccacccaagcactcacctcctccccaagactgttgccaacagctaacgccagactccctgaatcccaactccctgttcggttgttgggtccccagtcttgccctcaagtccttctggctcgcggccatccttctgccccctgcccaagctctaatgtcttcacgcctccccagtcccagcccccaggcttcttctgcccactgcacccacatcctcagactcacccaggaacaaaacctcgaggtccagtcggcacttcagttggcactacagggaggtgacggtgaatgtgtcctcagggtgaggttccgccataggccccaggaagccgctcttggggcccccacccaggccgggatgcgcctgcggcataaagcctggatacctgtaggcagtatcctgcaggggcagcagcgagtccctcggcacaggggacagggtcaagtcactaagaagtgggcagccatagccagcagcggctgcagcggggccacggggtgggccgggcggccgggccatctccagcggctccttgtcggccttgggtgtggccggtgggctagccaggtgtggggcactgaggcacgcggcctccgtcctgcccaggaagtcagccagcagccccgaacccaccttgccttcgtagggtgggctgcgggcagctgagcctggtgggtaccaatacgcagtacccttgcagctgggggagtcgtagtgaggctggcccagtggcaggtcccggcagctcaggtgggcctgagctgcagccgcatggccca

SEQ ID NO: 60195 - DNA, 1224 bp, Bovine  19866880760899
  misc_feature (1)..(1): n is a, c, g, or t
ngccctcgaggacaggggccgtgcctggcatcgggacaggcatcagagggtaggtgggggtgatgctcaagatgcgaggttgagctcagtgactgctcctgcacccggccctgggtcaaaagggctcgctgccctgctggtgaatgagtgtgtcactgtccttgtttaagccctctgttgacaatgacactccctgttaacgagcgccactccctctgttaactcttcttcctcaccactctccttccctgcatccccaacacttccttactccccacaatgcttttaatcagtccttggcactgggagcgggggctgcctgagatgagagagtatatgccatcctggatgaagaaggggggacagccttcccgccgtcacggtccaagccagcaccactgctcgcctgagctactgcagctggtctccctccttgaagacctgcctgctccgccaccgcccgcggtaccccagctcagaacccttcaatggtttcccatttgtcttggaacaaacttcaaactccttccaatggctgcatgatctggccctgcctcctcaccccgtcattagtgttactgtcttcccatcaggtcgtcaaagctgagctgcttttggcctccaggctttacccactgctgttccctctgccccgctccctatctagctgacgccccctcatctttcagacatcagcctcagcacctggccagccggctgcagacctttacggcctcctaccttttcttctcttgcatggtccttcctatggccacaattaccaaatgctttgtgttcttgtttcccgtctttccctctaaactggaagccccctgaggaccaggggctcactgtggtgttcactgctgtgtccccaatgcctggcaggcagtgggtgttggatggatgtctctggaacgactgagtgcctcggtctgaggactagtgctgtcaactcccagctctgagtggggagcgggccagaatgtggggctggatggtgtcccagttcctcctgcgttcaggcctcgctgggtggttccattatgtatctcactgagccatgacctgcccaaacacccagcccccacattggtttattttcccacccagagcccgcgaggaaaggttttcagattatttcacattttctggattatccacgagacatcttccctccagtgagaaggatcaagagttgacattttaaaccctaagcagctt

SEQ ID NO: 60196 - DNA, 2051 bp, Bovine  19866880897019
  misc_feature (1)..(1): n is a, c, g, or t
nttttcttacctgctctcccactagactaaattgaggttagtgatcagtcatctctaattctaatgcctaccaccatgcgagacacagaatgttcaataaaaatttatcaaatgaataaagctacagtaagtggctactatgctttagccctcaaaaaggtgaggtggggagagtgtctctggacctccagtcttacagcactgcttcctgagggaagagaacccaatctgaacggtccaagtttaacctctattttagattaagagtcctggtagcacaccagatcacaagacagaatctccatacactttccaagccctagaaaatatcaagggtctaatctggtacagagtgagacattaaaaattaaaacccagggcaaaaattaactaaaaaacaaaaggctaccctgaccaatatgatcaatctgccacctcctttttattcactcacttcaaagttcttacttcctaaagtagagagagatgaatgataagagtcatcagccaaagaagataaatttccaaaaaggctagggaaggtcagaagagggtaagtcatgaaaatcagcacatgtccacagcttgaaagaaatccaggctgttattagaatccccgggcacttagcctaaaacgttaataagcctctgaatctttcctttccctcccaagtcagcttctggcttcccttccctcgatacttcttccccatcatctactcacccagcagcctgccccccgtctttcttttccttcctaccttcacaaatactgacagagattatcagaatgtggcaaacaagtgacaactaactgcatgtggggcatcagtataaaggacatccaattactcatttgtttgttcctccttccttcactcattcaacagaccttatataccagacagtgtgcacacagtggggaaataattcaacactgccctgtcctcatgaagcttgaccgctcctgaaggagacaaattaaaaagggggacaataatataaagtgatgaatgtgaccacaaatgttaaaattcaagggttatggaggcatccagctcacactgtgggtgaaggggtcataagaaagagtgtctttaaaaaaaaaaaaaaaaagagtgtcttaaaagatgaaaagggttagttaagagaagtttcaggggaaggaagcaatgtgtgcagaggcgaacagtgttccaggaacagcaaacagcttggtgtggctgaagtgcaggaggtcacgagtgatgaggctaatcagacggacagaggcccaggtgcagagagccttgtgtgcgtactatagcacttgggagtgtgttgatggctacttcgaactacttaagattgaggccagggagtgacatgatcggatttgcatttagaaagctctctctggcagcagagagaatgtattacatgaaggggagaaagactgaggcagtaatccaagtggaagcacttctaattgatcgatagaatctacataatgggaaagttgcaacgtaagatgacagaaattgctctatattgagtttgagaccaagttgtcactgataagctttctcttttgaacaattaaattacctaatctctctcagtttttacattctgaaaaatgcatttgtgtgttctagggggaacactagactatcacctatcatcaaccttttcttaatgctttaaaatttatagtataagttttttaatatatgtatagtgagatagcaagtatcagtgtagagtgtacctaccgcctagtttaagaagaatattaccattagttttaaagtcccctgcatgtctctccccaaacccaccttcttctcttttcaccatgaggtaacactatcccaaacagtgataactttaccacatctgtatctctaaacatttttagtttcacgtttcttcacatgaatcttatcataatatatattcgtctgcaacttttcactctacaatttgttgagattcattcatgttgctatagttgcaatttaatcatttccatggctacacggtgctctactgtatggccacactgagat

SEQ ID NO: 60197 - DNA, 1644 bp, Bovine  19866880906084
  misc_feature (1)..(1): n is a, c, g, or t
ncccagaaaataccaacctgttctgaagtagataaaggaaggggcaaggaccccagttccttcagtaattcatttgtttccttggcaagctgatttgtagagtgttgtaactgttgcctaagagagaaaagacgtgttttaggatattctcacttcttgagagctgttagcatccagtctgttctcagagtgtctcatgatgcagggaatgaaagggcacctgaaggatgttcccagatgctcaggttcacaacagaattccagaagtaccacctagtcaaactcacttcaagttgtcttcacattaccgagtagaaagaacctacctcagtgaaaactgctgattaggtattttaattctttggggagaaaagaaaagcattctcagcagttctgatagaaatacaaaagcagctgcccccacacctcaatctaatagttttaacacgctgaactctctctgaaaattctcacgctcattcgcccaagagttccgcatggttactgtctgtcacaggccactgactagtgacagaatccacgccctgggggttggatgaaatgtgcattagaagcagagcttctaccctagggaacaacctccaaagatcaactcccacgtttgtgcttaaagctggtgctttttcagctttacccttggctccctacctatgctttatgcttgactttctggctcttttctccaaaacaaagaagccctatactgtgtttaaaaaaaaaaaaaaaaaagtaaggagcagaggggaaaggaaattaaagagggaaaaatgtgtgggattgaaaggtactggaaatacaaaaaagattcctttcagtcatggtttcttctactatatggccatttctgcaacggttttaagggaggacagagaaaccacactactgattactaatattttttcactgcaaaggggtctccaagatagaagggaaaaaaaaaagcaaaaccaaaaaaatttaaaaaaccatgagagtcaaaaccaagagggaatcaaaaaaccaaaaaacaaaaatgggaatttcctggtggttcagtggtcccctcttccaccgaagagggcactggttcaatccctgcttggtgaactaagatccaaccagccatatggtacagcaaaaaaaataacaataacaaaataaaaatcaaaagcccccaaaaagagtcaatccaaagcttgagcatcatggacagtactaacataccaacagctacctcacgtctccatcaaaaaagctcaaagtactaacagtaagtcattctctcacttcccaatgtctaggacaggaaacaaaaatagtgtaaagatggaaactagaacttctaacagcagagatagagtcaagaaggacataataaaaagaatctattccactcttctctcctcgggctattccgaatacacttctttaatattatatacagttggaaatccaacagattagacaagcaatgtagatcatcaggaggcctgtgccaacaaggaagctcctgtagggagaatgcagtttaagagtcgtagggatttccccctctacttccctaaattgttctgtaagctgtccaagggaggaagaaaagcagagtccaaggactcagagaggcaagggagatcacaacccatt

SEQ ID NO: 60198 - DNA, 1506 bp, Bovine  19866881040372
  misc_feature (1)..(1): n is a, c, g, or t
ncatcttgtgcggcaggtctaggactcggctataacatctctctcaaagaggcctcttgagacccaacctctgtccccccacaacccaccccacgtcctgctccgactgcagtcacactgccagactccgtgtgggccaccactgtcgggtcaggaggtcagagggtgtcttcattcatactatcaaggaaaccacctccctgtgggcaaagaccagagactgcccagagaacctggagaaaaccaggcccagagagggtgagagaattacctgggggccacagggagggccagtcatgcctgtaccccgagtgtctggcctctgggcacagggctctgtgcactcctgccgcatcgccttcttcacgcaggaaagctgctgcaagcactttgagataccccaccagccccagagcagggcccacgccccgcctcgtgcccaccccacatacttccttctaagtcgcaacacttccaccaccaacccaggtctgtctttctggctggacgcaggctccccactgacctcagctcttgtcccccaacaggaagacaacatggcctttgggaagcctgccaagtaagtgacgaacatgcgtgtgactggccctggagccaggttcctctgcctggagcagcaggccaggccttctggggcacagcaggagccaggagcctgaggaggggttgaggggggcgcagccagggtccaccagagggtctggccttgtaccacacatctcctgctctggtccctggccgggtcctttacccacaggccttctaggccttgcctcagccctgcaaggtcgtgttctcagctgcgtcggaaaggtgagggaaagaaggaaaaggtgagaaatggaaaggaggtggcagaactggaacttgcacgcaggtctgtctccctccaaacctagaccctttctcctgcccctcagggaacaaacacaccatttaaggtgtaagggaggcgttgtttagaactctgctggaaagttttggttggagagaatgaaagcaaattcaggccctcctggagtattgctagtttgcatggggtttggggacctcagtttttctgtctgggggcctgtctcttgtggcctggagacagcgcttcagtcatcggtctgctcaggagagcgtcaggtgccctgttgcccgaggcagcgtccaggagggtggagccctggaggagtgggtgtcccccacagcactggcagccaggagcggggctcccaagccctgctggcgtcctcaggggcctctggccttggtgtctgctgctagcccactcttcagcaggagtcggaagggcaccgggcacccgtttccaagcaggaagcaccgagcagcccaagtccccagaccacgtccccagacggtggcggtttctctctggtccagtctgtaggctctgtcaagccactccccacacagcagccagagggcgcttgagctcccagtgcccccgcctgagagaccctgtgggccgacccccag

SEQ ID NO: 60199 - DNA, 1147 bp, Bovine  19866881063364
  misc_feature (1)..(1): n is a, c, g, or t
ntgtttcctgctcacccagggcctgggtcttctttgtctccagcacccctcttccccacttttttgccccaacacaccttcacctgcctatgcaaactgcagggtttgactaggccagtgaccccaatatttctgccttcccctgtctttccatcctgaaccccaaatgccaggtttgaatttcctcccagcttctgtaaactttggaaaaagaaaactcctaatcctgagcctatttctggtggacctggcagggcgagctgggtcccactccctgaccttgacgagctcttggctgcccttgaccaaataatgcccacattgggctgcctggtcctgagcaggcaactttttcccatagcccagtttatgtctgtggccctccctgctgaggctcaaggtgacccccaagggacagctccgtactacctgcccccgctcctcacccaagcagcatggcccaggcactgggagagtcagaggaaccctcgatctgagagaagataaaccccccaacttctgggcatccctatctgaaagaagacgccggagggttcagacaggggcaagtaacagcccctaaaacctcagtctctgtggtggatgtgaaggttcatttctcccacgaagcctccctcctttgcagtcccaagactccccctcctgcagtgagggcccaggcatcaggctgcagtggggtgggactggcaggggtggtgagacctggcgagggtttcctggaggccaagaccaggtgcgaggcagaagaacccagggagttcccaaaggagagagagccaggggatggaagccacgtgtggctagatccaggtggagtagacacttgtctgtttggggaggaaagaaggctttcatgaagtcaccccagggctgggggccggggggcgggggcaggctggttggaaggggtgggtggcctcaaagcgaccagcgggggaggccttgagatgtttgttttcagccccaagagtctcctgcagggagaaaatgagtacgttcatcggctgctgaggaagcagaggagacctagggaggctgtccaggtggggcaggctgggtagagggtggggccccggtgacgggggtcggtgggggtgccatgggggaagggggtaacagaattatt

SEQ ID NO: 60200 - DNA, 1953 bp, Bovine  19866881161219
  misc_feature (1)..(1): n is a, c, g, or t
nttagtctgcacgcgtggaaaatgcagacaaagttgtacctacatccagtgagtgcttatgcgaagagcatgtatataaagagctcagcccagagcctggtagtgctccatagacgcatacagcatcaagacggtgacggtcaaggagacagaaagtgcacctgaagttctgatcctcactggtgagttcatttcggaactgtttaccaagcatctaacttgtggagcattttatggaagggtatcattcaatatggaccccctgtctcccaagtctaggatgggagagaggacataaataagaaagcgtgcgccagtggtaaatgttattttatcaaaggttattaagggagttccctggtggtccagtggttaggactcctggtcctattggattggattactggtcagggaactgagtgagatgccacaagctgtatggtgtggccaaaaaaaaaaaaaaaaatactaaactaaaccaaaccaaaccaagagactcaaaaacttgttgaatgaaagaacctagaagcaaaggagtccgtaccacatgattccacttttatgaagttctagatctggtgatggagagaagtgtgattcccactggggcactggctgggagaagcatgagggaactttctggaaatgttctgtcttgatctgggtagtggacccctggtcgtatgcaaaatatgcaaaaattccacaattcggacttgtggaaatcttatatacagtaaactgtatgtaaattatattttaaaaaattgcaccagagtagtttagagaagggagcgacttcttccagccatatgggcaaggaaggctgcatggactgtagagggaatagcagagaggaaatgacccctttgtctctcttggtggctcaataacaaagcatctaaacaaagcacttaaatggagtcagaaatcatcagtaagtggttttggagattatttgctctctgtttacattgaaaaaaaaaagtttgagattatgtaattgccaaagttaaagtcagggaggtaattatcaagtgtaacatgagtgctctatttttggcctcacggctagctcttctggcccttcattcccttcagctaatgtgattgcaagttgttttgctggttctcttctgtcggaggcggctggatgatgggaggcagtggatggggaaacacagagtggaatgataaatcatatctctgccggggcttcgctgttcacaaagcacctgtgtgcacagcgtctcacttgatgacagcaatctaggaggggggcgggggtatcagtcagggttattgattgcaagcaacagaaaccaattctgggtagcttaagcagagaacgagtgtattgggaggtcattaaatagctcacagagtcacaggaaaactggaaaactagggttagaaaataggcaggaatcaaaggaagcttacttaagtctgggtatttgaggctgtctttgcttcagcagcttaactgtcatggttacatttggaaatcatcgagacagatcttcacgtaagtggtagtgtggacatcgctgatggaaagtaatttgaccagcaaagaagggagtttccaggatggactcattggatgagcagaggcagggaggtaggaagaatgttgaaggtgtgcttggggaactgagtttgttgcaaggtagcagagagctaaagctgggaagggaagcggaggctgtaccatgaagagccttgtgtgtctgggtgatgagttggtacttgagccagtgggcagtaaggatccttggaggtttttatttacttatttattgggctgcatcaggatttatttggggcttccccagtagcttgacttccctggtggcccagacggtaaagcatctgcctacaatgcaggagacctgggttcaatccctgggtcaggaagatcccctgagaaggcaatggaaccccactcca

SEQ ID NO: 60201 - DNA, 962 bp, Bovine  19866881207559
  misc_feature (1)..(1): n is a, c, g, or t
nacatcctcgccctgcctccctgagattacaggcgggtcaccttgattgcggtttccaccgttcacaaaactcttcagtcatttacaaaaccatctctcgcctcattcactcccccacctggctcttctcctctgcgatgcatgattttactggcttaagactcagagggcaattttatttccaagttcatggtgggggaggaggacacctaattgactaatgctgggtgtttcacatgcatcatctaattcgagcctcaccatgaggcagtgcagaagtaggattattcccgttttaccaaaagtggaaacaaagactctgaaaggccacaacgcttgctcaaggtcactcagccggatgatagagtcaggatttgaacccagatttgtgtgacttcagagtctcaggcatccctctgtgtctcattcccttatttgatggaacagcatgggaaagtgtgatactaacccagagtcaagcccagggaggacatactgcagactgggggtgggggtagccccacatgtgccggactgttttcataaaagagccgactcatttattaattttacacacatctactgatgtctcctgtaggctggtcctgaccaggaggcagaacagtaaacaattacaacacttaggggcaaggtcagtctggaggccaagggagacttcttggaggaagtgaaagaaaagtctgcctgatgaagcagccagagggtgagatcatctcccactgagggaatagcttgtgcaaaggtccagaggtattgtagagcaaggtcaagtcaggcaagtacaaataattatatatgggagggttgaggcaaaggatgaggcatggaagaaggaggttggaaggccagagacaaaagatactggggggtcaggaaaacaagggttatgatccctgagttgagaaaagtcagagagaaaaagtctgggggcctaggacata

SEQ ID NO: 60202 - DNA, 1975 bp, Bovine  19866881420161
  misc_feature (1)..(1): n is a, c, g, or t
nctgagaaaaggccagaagacatggaggcagaaaaagtgcaagaggaggcagaagccagactacccaggactttatgggttgggtttggagttgggactttatcctgagggtgctaggccctgaaaggaaggttctgaatagggggagtggcaggagaagcaactgaagcaacagttgggggataacttgaccttaacctgggtttgcagagtgctacctcttttgatgtgtctgggattgcaaggggttgcccacacaaaaaagagaataaaagggaacactcgccttcttccctgctcagcaactagacaaggccaggcttggattctgcttccttgcagatcaagatgtagttttacaacctgaaaagtcacttcatgcaggtgccaggatgaggcggggcatggcaggtggggacttgggctgtgaggctctgtcctgctgggcccagccctggtcttggagcagctggagtctgccagctcccactcacgccccagctctggctatagccccacctcacccctgctcagcacctgtgcctcctcccctcctcctcccatctcgtcctccctcagaggactgcagaggcccggcaggaggaaagagcacagaggtcaggggtttcttctgcctacttccactcccacccgcataccaacatacctgcgccagagctgaagtgggactcaggcagccaggtcccagcatcactcaggcctcctgcctgcaaggcgctcaagaagggcaccgaggatcttccctggtggtgcagtgtgtaagaatccgcctgccagtgcaggggacgcaggttcgaatcctggtctgggcagattccatgcgctgcagagcaactaaacacaggctctatggtcctagaggcgcaactactgagacccccgtgtgcctagagcctgtgctctgcaacaagagagtagtgggtgcgaggagaagcctgcgtaccccaaagaagagtagcacccactctctgcaaatagagaaagcccacacaaaagcaacaaagacccagcgcaaccaaaaaaaaaaagagaaaggcgctgaaagtggtgcctccattcaatattacctacactttctgagctgcactccaggcaggggctagagttaagaaggtgttgttcctgctctcccggaactctaggggtaatgggggaaagggtgcaaccatattacaagtgctttacagaggtgcaaagtgcaagtgagcctggaaagtcaggctgattttacttggggaacagagtgtgaatatcaagcaagatctcctccaagaggtgacatttgagctgggtcataaagaatagtaagactgactgtaggaaatgctctttatagcagaggaaagggtaagaattaagggaactactgggagtgttgggtgctgtgctcagcaccctatttattcatttaatccttatgatgaatctatgaagaagtattataattatgcccattttcccagatgtggtaactgaggcttagagaagggaactgatttatttacaaacttccacatctggtaaatggcaaaattcagacttgaacctaggtcttccatgctcttaacttctacgtagagtggtttgggcaaaggacatgtggagaagggtagccggtgagactggggggtggggagactgctgggggaggcagaggtttgggtggtagaagccttggtgagaagtgcagcctttatccagagagcagtggggagccatgcaaggttcattagtgagggagggagtaaagagggatgggacacacaattagctttctgtttttatttattaccacttttaagtgacttccctggtggctcagatggtaaagcgtctgcctacaatgccggagacccaggttcgattcctgggttgggaagatcctctggagaaggaaatggcaattcattccagtactctcgcctggaaaatcccgtggatggaggagcgtggt

SEQ ID NO: 60203 - DNA, 947 bp, Bovine  19866881660748
  misc_feature (1)..(1): n is a, c, g, or t
ncacccctagcagctccgccaacctgcgctgagattgccccaggctcagctctgcttccctggcttattgattgaggtgattcttctgtcagagccctgaaggagaccaatctatggtcaacaaacagctccagggacaatccctaagcgcttcctatctgccgttctgactccaaggtccaatggatctagtcagtccccttctcaaggagttcacagtctcctgaggtagacagacatgtaaacagctaatgctaatgcaagtatacatgaatattcaataggcagaaacagcctccgtgctctgggagcaaagagggaggatttgctggaaaccttgaaagtggtgtaggagagcaggggaagggcaccctgctgaaggaacagttcgagcaaagacacgaggtatgaagtgcagggctcattctctgaagggcaaacagcgcagtgaggttaactccaagcaagtcccaagggagacagagagcgatgagggtggaaaaagaaggttaagggttgggccagaccatgagggccttgaatgccagaatgaggagtgagatggcctggggaaggaaggaaggatgtgaactctggggacttctacctggggccaattgagggggtgtcctgacccacaccaagagaggacgtgccctgagttcacccttcaaacaagcagtgtcttaccctcaaagctttcccggcttgacgcttccagctctgccatccttccctcccccagccagtcctataagtgagtccagatggtcattcctattttaggtcggggtgtgtgttggggggaggggtaacctatgagctctatcaatcctctcctgagctgtctgttagaggagcttcttccaggacactgctgtgatcctctgagcctggaagggagtgttaggccttggtggagataccccatctgtctgtgcgtgata

SEQ ID NO: 60204 - DNA, 798 bp, Bovine  19866881687193
  misc_feature (1)..(1): n is a, c, g, or t
nctgaacacggaagaattgatgcttttgaactgtggtgttgagaagacttttgagatccaactagtcaatctaaaggaactcagtcctgaatattcattggaaagactgatgctgaagctgaaactccaatactttggccacctgatgcagagaactgactcattggaaaagaccctgatgctgggagggagggaaggcaggaggagaaggggatgacagaggatgagatggttggatggcatcatcaactcgatggacatgagtttgagcaagctctgggagttggtgatggacagggaagccaggcgtgctgcagtccatcgggtcgcaaaagagtcagacacgactgagcgactgaactaaactgaccccggggtccctttatttttcctccttttttctcactcatttttaaaattgaaagtaagtataaagtataaaatcccatctcaactatctaccttagaataattcctttacctgtcaaaggagacgagctgttcctctctctgcctctcctccgcctagaaagtagatggcatcattgctgctgttattcacaaacatgtcacagacacagacacacacactcacatacacacaatggcctcctttagctacagtatgaagaagcaatatcctttggctctgataggatctataagatgacacagggctctggcaatctgtcttgactgagaaataggtgtgaagtagtcaaaagccaatctgcactccactttgggttcagaatcaaaactatactaagtaggtaggagagaacaggtaagagaaag

SEQ ID NO: 60205 - DNA, 596 bp, Bovine  19866881915991
  misc_feature (1)..(1): n is a, c, g, or t
nctctggtgtgtgtaccccctggtatagatcccactgtgtgaccgtgtgccccccacccccagtgtagtgcgtcatcccctcacatgtatcctggcgtctgtctgtccttccatccatccacatacatcccaggacgaatttcccctgcacctgggcacccatgggtacacccacacacacaccctggtatgtacatgcccctccacacgcacagctcagtctgtgtgtacttgccctgcttacagatccctgcagtaagcgtgcttcccctggctcccttcccgcagagtgaagacctcacaggccgagttgtggaggacatggagggcgcctcccaggccaaccagcggcgcatgaacgcagacccgttggaggtgatgctgctcaacatgggctaccggatcacaggcctgagcagtgggggcgccggggcctctgacgacgaggacagttcggggagggccaggtgcagtgccggcccagctaggccctcccagcccccggcccagcccccgccatcggctgcatcctccgccctgggcaggaggtcagggggttctgttttggtttgtcttccctgtccctccattttttt

SEQ ID NO: 60206 - DNA, 2588 bp, Bovine  19866880410075
  misc_feature (1)..(1): n is a, c, g, or t
ntccctgggttgagaagatcccctggagaagggaaaggctacccactccactattctggcctggagaattccatgggactgtatagtccatgaggtcacaaaaagtcagacatgattgagcgactttcactttcactttataggcgtatgaacacttttgcacataataaaaccatagcattattgaattccattggatagttttaaattgtcaaagtgcttaaaacattataatcatatttttctgtcttctcaatgacctagaaacacaaggcaatatctccacttaacctataataagattattttttaaaatgagatttgttaatgccttgaaatgttgggcaatattaattttgttattcatatggttcaatatgtgcctagtgtatatgtgcatgctagagagatcaaaaatgcaaaattttggtcaataatattgtgcaaagccacatcatcacaccacagtttaacatactttcatttgatttagaaaaagcaatttatgaaatagccacaaaatctagtaagcctgaatcaaatagagaaaagatatacttggggaatttccacaacagatcctttagtgctttcacctcttattgatatattgataatagttaataatcatcattttaacctgccatcttaactttgtatatggtttaccaagtaattaacatcatgaattctgaagtacatggtttcaaaaaactggtcttaccactagcttcacattgttttgaaaattattgaacttctctgtgtcaccatttcttcattgataggatgggaataataccacttactttacaagcttgctggcaagtttatatggcattataccagcaaggtgcttagacagaattgtacatgcattatacactcgtatatatttaaataccattgtttatgcaatgagctgatatggaaagggacttctcagactctagtaacaatatcaaccaaaactagcaaataaaggcaacaattcaggctccacataagcaggttcactgcatgtgcgtgagtgctcagccatgagtgcccagtgttcttcgtgaccccatggactgtagtccaccaggctcctctgtccatagacgtctctaggcaagaatacttgaatgggttaccattccctcccccaatggattttctcaacccagggatcaagcccacatttctggcattggctggcaaattcgctaccactaagccatccgaggggcttcccttgtggctcagctggtaaagaatccgcctgcaatatgggagacctgggttcaatccctgggtagggaagatcccctgaagaagggaaaggctacccactccagtattctggcctggagaatcccatggactctatagtccatggggttgcaaagagtcctacatgactgaatgactttcactttcactttcaagtcacctgagatgccctggttcactgtagtaggcccaggagtaatatagaatacagtagtttgcattgatgataataatacatcaggtgtgttatttgtacgaaagacaatgcatttttttgaagtatgaattcatagaacacctaggatacacatattccaatatatatttttccactgtgttctgtacttcatcttcagttttcagaaaagaagtgaagggattgactttaggttggaggttacacaggtccgctcttacagcaagagacagagagcaggggagtgggcagctatgtgaaaccctgaggtctggtgacaggaaattagaggtttatctgctcacttagtttggtggcaacattcctaggaaagggtaatgtgtttgctatttctttaatgctattctcttttccaacgacacttaactaaactctgcacactgtgaacactccacaaataatctggggttttctgaagtttccattactctaggtcataaaaggaaatatcagtagttacaaattaatgaatattttctatagtttataaatatctaccattctgatggagttgccagaaaggacagaatagaatttattcctcttactcattacctacataggagcactcaactgaattttgggatgaaaacagtactataaaatttacttttaggtagaaatcattaacaaatattatttttgcttttagactgtgaagatctgtacagcaccaagtcaaacattaaaataacatttgattgttatttgaatttaatatctattaatttgaaccaattcttgattttcattttgcttctatttttacgtacagtgttctgaaatgtccacataatccttgaagtattttgtttagcttgagaaggtacaaaagcttttaaaatgaagcacaaatagcttggcagatttcacaagaatatttactgttaaaagatctattttcagaaagcattagctttgtcatttccctcagattagaataaaatataatcatgtaaggtagaatgtgtcatctcttaaaaaataatttatttttattccttacttgactcccattctcctttttatagcatcttttttatttcaacttcaacaaagagccttagcgtccttcagtaagccagaatgcactcat

SEQ ID NO: 60207 - DNA, 3684 bp, Bovine  19866880625868
  misc_feature (1)..(1): n is a, c, g, or t
nttccaaagacaggcaggcagcagaccagctgagccaaggcagggaaagaaaaatggtttttttttcaccccaaacaaaaagaaattgggaaccagcaaacccactggttaagaataaaaggctcggttgggaactgaatgggaagcatagtagcactggtctgaaggtataaacaatattaaaaaaaaaaatacaaaaaactaagttagacaaaaaaaaaaagaaaagaaaaagagagattctaagaccttaaacatgactacagttccaaagggtaaaggaattttcccactaaagatgacctttagaatgtttccataccagtccaatttaaaggaaaacatctaacatctaacagaagcagtttgatgttatttcttaaatcaactgctgaaaaattctccagacacctgtcatcagggtctaaggctcttttctgtagaggaaatgaacttgagtcatttgacaaacaaagtattgcagattctggtcgtgtggttagatttagtgtgcttccattccatatttgagaatagaataatgaaaagtttagtatgttctaccaaatgcaaacattcacagacacatacatatggacatatacacatatttcagacatatggttagacaaatatattgtcaccctgcttatttaacttatatgcagagtacatcatgcaaaatgctgggctggatgaagcacaagctagaatcaagattgccaggagaaatattaacaacctcagctatgcagataacatcacccttatggcagaaagcaaagaggaactaaagaacctcttgatgaaggtgaaagaggagagtgaaaaagctggcttgatactcaatgtgcaaaaaactaagatcatggcatttggtcccatcacttcatggcaaatagaaggggaaacaatggaaacagtggcagactttattgtcttgggctccaaagtcactgtggacagtgactgcagccgtgaaattaaaagacacttggtctttggaagctatgacaaacctagatagcatattaaaaaacagagacgttactttgcctacaaaggtctgtatagtcagagctatggtttctccagtagtcatgtatggatgtgagaactggacaattaaaaaaaaaaaaaaagctgagtgctgaagagttgatgtctttgaactatggtgctggagaagactcttgagaattccttggacaccaagaagatcaaaccagtcaatcttagaagaaatcaaccctgaatattcactggaaggtctgatgctgaagctgaagctccagtactttggccacctgatgtgaagaactgactcattagaaaagaccctgacgctgggaaagattgaaggcaggaggagaaggggaagacagaggatgagacggttggatggcatcatggactcaatggacatgagtttgagcagactctgggagattgtgaaggaccatgaagcctggcgtgctgcagtccatagggtcccaaagaccaaacacaactgagtgactgaacaacaaagttaggcaagtgataagtttaaaaactgtacccttaattgttttaaccgtttttgtttgtttgtttacatttctgcagcttaagaaattactgggtaaagtactagtaattatttcttatcgttggtcaatccaggtagagtttatagttttggggtatatttaatttacttatggtataaaataagaattaggttttgaacttttatattttacctgacatataatattttgacctttaatatctagtttcatactcaattcagtctcttacttagggaagtcagatgcatagaaaaataatacccaagaagtttccaagtgatatttatgagtaaattcatatatttttctaaatggtagttgttatctttttcttaaatatatttcactaaaatttttcactgaaatagattcactaaatgttctacacttactgtaaatcaaaaccactcttttatcatctgattaaacttgggtgaactaggcaacacctttggcctcaatttgtatctttatttaaaataaatgttatctgccccagggaaaggggggcagaataaaatcagatcacagaggatagctcaccatatctgacagatatgaacacatagagtggagtttagcaaatttctatcaatgaaatataattattttctctaaaatggtgggtcaggaaacaaatagaaaagtcctactggtcaaattggatccaaactctgtcccaatctccagatactatattggggaaaagacattagtaagaaaaacctcacagccttcactaatatgctcccctcctccacacatacaaacacatatgcagaatgagagaaagggaatcaatgagaagagaagcagactggagagataaatgaaaaatcacttaaaaatagaatatcctgccagtcactaaggatgtccttatcttgatatcttagtgtttcggaagtaggtgcaggataaagtgctagggtctgccatttccagggtttgaggctggagagagtccacattcagagctgttatccttagaaacatgattaacccaagcctcagccaggtccaactctttgcaaccccatggactatgcagtccatggaattctccaggccagaaaactggaataggtagcctttcccttctccaggctatctttccaacccaggggttgaactgaggtctcccgcattgcaggcagattctttaccaactgagccacaagggaagcccagaaacatgatacccatctgcattttgttagcgctcttttagagcattctgcattgagagcatccccacgagttctgtaggaaatcttggttcactagtttctacaccacccctccctgcaccgataaacaagaagcttgactagatttcaagttacagattagaaaaaaaaaatagatttctttttttttctgataaagtgcgaaaagtcaaggagaaaccaactgcattttactaggctgaataaaagaaagtgatctgtctataaaagtataaaaagagaagaaatagaagaggaggaaaagagaaacatactatttaaaactactgaagaatataatctagaagaaagcataattcaagaaacagaggtataacagaatcatgaatttaatatgtcagtttatagataaaacaatagcatgaggctgtataaatcaggtgtgtgtgtattatatatatatattctatattatatacatgtatatacagtatatatatataataatatacatgtgtgtacacacatatattgtatatatacacacacacatacatatagcatatatgtacatacatacaagcacacaacaaaatcagtggtaaatctggtcatttctttttcttttcagcaaaggattaagtatttaacattaaaattcagcatataaaataagtacataaccagaagttcttaaggttttttatatttatcctcttatataccctctcttgaggatatatgagaatgagagaatgagagaaagggagcttctcaggtggctcagtggtaaagaatccgctcaccagtgtaggagactcaggagacccaggttcaatccctgggtggaaagattcccgaaagaggaaatggcaaaccactccagtattcttgcctataaaattccaggacaaaggctt

SEQ ID NO: 60208 - DNA, 1029 bp, Bovine  19866880915208
  misc_feature (1)..(1): n is a, c, g, or t
natgctgctttgaatgaggatgaaaagggttaagtgaaaactaccgcactgggagtttcccaagttcctgtctcctttgaggcagaggtctcacaatggatgtaaatgtcatttgtccgagtgtgagtgaaagtcactcagtcacgtcagactctttacaaccccgtggactgtagccggcccaggtttctctgtccatggatttcttcaggcaagaatacaggagtgggttgccattgtccaggtatattagattcaaaatattgaaaacactcctccaaaggattgcccttaaatttccaagttaataaagttatggaaaatatgagaatactttggcagagcaaacagagaaaatccaaagtaagcttaagaacaataatttgaaagtccagaaaattaacctgctttgttagttgcctttcatacttttcatgggaatctatatttggaaatattccgggtcacaggaagaagcttaagggaattgaatatatcaggttatatggtgccctacacaaattgcatgtattcattcaaagaacggttattaaacaccttctataagtcagacactactctgtcctggatgatagtaatagaacatttaaaaaatgttcctttgttctcaaagtatatattcacacatccatgtgtgtgctttcatgggataaaagagatagcctctcagataatgggggaaaataaatcatttaacaaacagcactagaaaactgagtagcaatttgaaataaaataaacttaaattgaaacatctcatcttacacacacacacacacacaaatccagatggctcaaagatccattaaagatgcagatgtcatgaagttaaaaaataatacataaaaataaataagcactttgcattggaaaatgcatcataatcaaagttaaaagacaaagaaaacatcttgttttcttaacgtgtaaaaatcaccttgacatcaataggaataagaccaacatctcagagaaaattataacaatggaaagattctttgtagttta

SEQ ID NO: 60209 - DNA, 1089 bp, Bovine  19866880934186
  misc_feature (1)..(1): n is a, c, g, or t
ncttctgaaagcttacatcagggaaagggaagtcagttttctataccacactcatcttgttcacctccttgtaatttatattccaagaacctgcaaggatttattttttctcatcctcaagggcatagagttagcaagtctccaagatgcagaaatgggtcaaagcaggacaaggaaagtaaatctcagttcaaggtcttggaagacccacactctgcttcttcagaaaaggaggaagcttcacaaaacgtcaggctgaaaaatataggtaaatatcaagattctgatatgaaatattgatgcaaatttaatacttgaattatatatagcttccagaggcctcagtgacatttttactagaaggggctactgtttgtaaggtaatgataaagaaatcctttgagacatatagcattcaccaggatatttaggagaaaacagagaagaggcaattggcagtaactgcatcagaaaatgatggtgtttgagaaaaaatataaaagtggcatttacttttactttaattgcatttatttttcaataagcagggctgtcacattgttgaaaatgtgaaaaatattcagtaaagtctccccgacacgcacattccccaagcattcatgccctgtctatggaagccatcaatattagcaatttcttacatattcctctggagatattctatgcttttatctaagaaaatatgtttctttatattattcctcctactttacaaaaacaaaagctatcatttcataacactgttctctttatttcacttagcaagactcactatgtaatgagacataatagtgtttcctccctttttaaaagcagcagcatagtccaggccacggacgcacaattattttattcacccagtaaatggaatgcttctgattttactctctttctcctcaaaagaggaggagtaagaattagttgattcattcattggcctgagaaagcctgttctctactctgcacatttgggatcatcattctccaaggtctaagtctgggcaggaggagcatcacctaagtatgtcatatcagtaatggtgttgctgccattcacgatcttcttat

SEQ ID NO: 60210 - DNA, 1410 bp, Bovine  19866881022977
  misc_feature (1)..(1): n is a, c, g, or t
nacaggctctggattaattaattattagttaatcaatagcagacatgcctcctaggcttgtattccaggtgccaatatccagggctgcttatgctgagcataatggcttcaataagccattaggtgaaaaccacaacaaggcatttaaaaatgctttgcaattagatcagaggatagctatcatcattaggacatcctttcctcccagtatccatggtatcagtttaagttgctatatcagataggcgagaattttttctgccttttagcattactgtggtcttatgaaatggaaatggctgacctcccaaatgctcattctatgcattcccattagcaaaatgaaattaatttaaaactaagtttatgttcccgtacacataccgagagtgggatggagaagccttttagaaagaaagaatgagtaagaagggggcaaagcccagtagggtatgttatcccatgtgtcccgaacaaaatcagctaccatgtgattcagtttccacatggacaggaaggacggaagtatcaccgaagtatgccgaggaaggcagcgactccgtttatggaaagagtggtgctttcaattattccacaagtattttctatgactatagggtgccaatgctattcttgacaccctaggtagagaagatggagacaggaagagaaagacgagtttgtgttctcatgcgttcaccttaacctctgcgtggatgatatgtggacggttagagcccctttctgacccatcttctctccttctctgcactcctgctctgcccgctttagcagaaagactaatggttagttccctttatagactcagttcacttcagttcagtcgctcagttgtgtctgattctttgcgaccccatgaactgcagcacgccaggcctccctgtccatcaccaactcccagagttcacccaactcatgtcctttgagtcggtgatgccatctaaccatcttatcctctgtcgtccccttctcctcctgccttcaatatttcccaccatcagggtcttttcaaatgagtcagctcttcacatcaggtggccaaaatattggagtttcagcttcaatatcagtccttccaatgaacacccaggactgatctcctttaggatggactgggtgaatctctttgaagcccaagggactctcaagagtcttctccaataccacagttcaaaagcatcaattcttctgcactcagctttctttatagtccaactctcacatctacacatgaccactggaaaaaccatagccttgactagatggacctttgttggcaaagtaatgtccctgcttttgaatatgctgtctaaggttgttcataactttccttccaaggagtaagtgttttttaatttcatggctgcagtcaccatctgcagtgatttt

SEQ ID NO: 60211 - DNA, 1781 bp, Bovine  19866881029112
  misc_feature (1)..(1): n is a, c, g, or t
ntttagttattgaaatgaaagctgtattgatgtgaatttaaaagagactgggaaggaagacatgtgaggcagaaaaaacagacaagtgctttaggaaattttcctataaagaaaatagggtggtagatagaaaaacaatgacggcaagaaagcgcttttccccctattttaaatgagatggaaattttcatgttcatctgtgactctccatatttccatatttcagtggagagagaaaaaaatgttgatgcaacctgagaacatccacttctctccaacccctacagaaaagtggttggtgggggaagtggagaaatctagtgtataagtggaaagggctgccctcagtaagaacttgaataatctgaaaggaaattaattaacactattcatgtctaacctctttgctaccaaaaaatctttacttatcaactcaacatttagagatcaatattcgcattatgttttttcgttttgagcaaagttaattctaacgtgttcccttgttctgaaacattttggggaaaagcacctccaattaagccaacagctttctcacttttaaacacaaatgttttaaccctggtaacactttataattagtaaaacactgactggatttcttttaattactataatcctaatactatccccatggtgctgggatggccagatgttcagcttataatttacaataattgtgtaactggacctctaaaaaagctttatttttccacagaaagtagctcttttcgtggtgagtataaaatttcaactggaaatgacatattccttctttgaatgctgtttaatttttccaatgttccagtctttttttttttttcaaactgtaacttttctttttttactgtaaaatgaaaaagtatcttttcataataaagaaaaaaagtaaaattaaaagcgagtgatataacagccttgtgattgtacttaattctaccatatggttttgttcgtggatgtgtgtcttttaatcaggaataaaacaaagggtagaatgtaacaatccctttcagttagcatgttaatttctcattttaacaagaccttctttttgagatacaatagttgacatgaatcccataagtttcattaccttttttcttgccctttttaaaaaaacagcttgcacatctccagcattgcataaaatacccatttgtaattatgcttaacctttctgaagcctctgggtatagtctgctcatttaatctttaacctgacaagccttgggggggttgtgaaattagtattagagacacagataccataggccaggggtacaaaagggggtaattaagaggaggaaagaaaagaaatagaacaaaactagagggacaagattatattatggtaggtgtcagggaacagcagggacagtagaatgcaaatcattatagacagagttcaggaaataattgaagctatacgtttttagaacaaaaccaattgaatcataccctgtcctactcattgaaaataacttgtggcaaattgatctaaaataaagatttacaaatataatcacccaaaatatggattggctctgcctttacagaacattccccatgcgcattaccccatgtttttactaaagcataacaaaggatatattttaagtaaaactcagatccttgcctgaaaagctactttttagtgatgaaggaagcatcctattttttttatctatacagacattcattatttttgtattgggtattgagaatacaacataagataggatttctttatatcacat

SEQ ID NO: 60212 - DNA, 1088 bp, Bovine  19866880142478
  misc_feature (1)..(1): n is a, c, g, or t
ntgcttttgaatatgctacctagggttggtcataactttccttccaaggagtaagcgtcttttaatttcatggctgcagtcaccatgtgtagtgattttggagcccagaaaaataaagtctaacactgtttccactggttccccatctatttcccatgaagtgatgggacctgatgccatgatcatcgttttctgattgttgagctttaagccaactttttcactctccactttcactttcatcaagaggctttttagttcctcttcactttctgccataagggtggtgtcatctgcatatctgaggtgattgatatttctcccggcaatcttgattccagcttgtgtcttccagtccagcgtttctcatgatgtactctgcatataagttaaataaacagggtgacaatgtacagccttgacaaactccttttcctatttggaaccagtctgttgttccatgtccagttctaactgttgtttcctgacctgcatacaaatttctcaataggcagatcaggtggtctggtattcccatctctttcagaattttccagagtcaataaagactttttaaaaacggtctgcatcagaaaaaaaaagatctttaaaaaaaattagctgataataaaggaaaaaagatcatttaaaaaaaactgctttgatgaaagggattggctcaatcgatgaaatttccctgcctaggggaggctgggacgggaatctctgaacagaggttcatgcccatctctcaatggtgtgtcttgacggctttgtcctccgctccccagtaccccccattttccagaaggtggctgatgccactgcagactttgagaccccgttctggggtgaagaggcccggggtggggtgacggaataccgggagatcgtggagaacaaccctgcctacctgtactgcgacaccaatgcggtgccagccgcggagctgacctggtacagaggggacctgccccctctccatcgaggacgggggtgtctgttctgcaaggtaggccagggctgcgtggaagagcgggccctttacaggcaggcaccagggtcacacccacaccagggctggtcgc

SEQ ID NO: 60213 - DNA, 1340 bp, Bovine  19866880356123
  misc_feature (1)..(1): n is a, c, g, or t
ncaacctcggaaggctctcagaagaacaaggtctttccagcaccactattgatcacttactataagggcacttactttcctgggctcaaagccgagaggtgggccccattttagggccgtggaaacaggctcggagactcagtgggggtctccctgcctccagagtcgaccctctcaacctctgcattcctgtgatatgtgcatcttaggggctgagatctctggctccagacgtagtgcagctgtggcctcaggggcagagggatgacagcgttgggcactcaggtctaggacttagcctgaattgaatggatattctggccctcccactgagcagctgagtgaccttggaaaaatgactctccctctctgatctctgagctctgcattctcctctacaagatgaggaagacgaacaggagctggtttgaagtgccaggagccccagaaggccccatgtgtcaccctgtggccgtcggctccctgccggtctgtattgtcacgtctttctttatttcggtggccccgcggggacagtcccgccacgaatcgcaggtctgaacccggagcagatcaccgccaccctcaacagcagcgtctccctgccctgcgacgtccgtgctcaccccagccccgaggtcacttggtacaaggacggctggaccctctccctgggagaagagatcttcctcctgcctggtgcgtaaactgaggctgagggcctggctcggagactctatggggaagctgagtggcctccccaaatctgggatagaactgggggtctgggagggctttaggattgtgggcgtagggtctggggattggggcctgttcactggtgccaagcgctggctcccccccgacccgccaccaccacccctcgcaggcacccacaccctgcagctgactcgggttcagctcttggactctgggatgtacatatgtgaggccctcaacgccgccggccgagaccataagctggtgcagcttagcgtgctgggtacgtgccatctgtccccccacctgcactgtccccgactccttccatcaccctcacaccccttctccagcacagtcaggagaggggcagccggccccgggggagcctgggacacaccgtgccgtctgctgcagtggtgtctggggcaccgtggggttacgttcctggttactagactcggacgcccttgggtttgaaattcagctgtgtgcttccttgctctgtgaccttgggcaagtcactcttcctctctgagccttgagtctcccatcactataaggtgatggttggtttaaggattagatggtggtatgtgagcatttaatccagtgccagg

SEQ ID NO: 60214 - DNA, 1439 bp, Bovine  19866880366115
  misc_feature (1)..(1): n is a, c, g, or t
ngttgggggggggggtcgcccctgacctgtaagattcgcccattttccaggacctgcagccgtgggcttggggagaaaggcagcccattttggagccatgagatggtgggcgcagggttgcccaggactgggcaatgcaggctgacggtgctgttggcattgacggtcacctcctctacaagctcctccgtttcacccaggatcacaggtggagctgggggcgaagagggtgagaagcgggcagcctccttgggaaaggccccaggaggagcagggcgtggagacgagaggtcttggtgccaggtgctagctggggctccttgaaccctgcccaccaagcccttctgagccctgggacagctaagaagtctagggcacagagagggctatgattcactcaaggtcactcagctagcaagcaactcatgtgtgctgtcactcagccgtgcccaactctttgcaacctcatggaccgcagcccgccaggctcccctgtccctgggattctccaggcaagaatactggggtgggtagccattcccttctccaggggatcttcccaacttgaggacggaacccacgcctcctgccttgcaggcggactctttactgtctgagccaccagggaaggcccaggaagcagctcacttggaatctgaacctagtccagtctggtttcagagtccgagctcgaaagccctgcatcatccatttggagaaaggcaagactacgcctgctctctacttgggcccccttctggaggtggggggccctcatggggccttagacctgagcctcccccactgcccacccccaggccaggccactcactcagtaccagcagctcgtagtgcagccagtcctcgcccacctcgttggaggccttgcacgagtaccttcccgcatcctccgcccgtaccagggggatctgcaggacccggcctcctgcagggacatgggggagatagaggtctgagcaagaaccaagaaacctgccctctcccctggaggagatctgggacacatcactgccccactccccccacataacctgtgacatgcagagaagcacctgctgtgccccggtcacggcacaagagggccagttaaagcacagtaatggcttgctctgcaccaggccctgggctgagcattcccccagcctctgactctgtgtgttgtcacaactcccatcttacagatggaaaaactgaggcttcctaagagtacttggcagggctgagcccagctccttgatgaaggcagagagaagaggcggagagctgggcacatgtctgggcagaggctctcaggaggctggagtggttggaggtgggggctcttgaggggcatcacctgggaccctctgcgatcgagagccagccagggccagactctggcatcaagggggctggaacttgtgtctagcaggagtggg

SEQ ID NO: 60215 - DNA, 1665 bp, Bovine  19866880455043
  misc_feature (1)..(1): n is a, c, g, or t
ncagactccccttccctgcacagtcccgcccgcgatcaagactgggctccccgacctgtccatcaccgagggtgcccacgccctcttgccctgcacggccaccggcagccccgagcctaaggtcacttgggaaaaggatggccagcctgtgtccggagccaaggggaagttcaccatccagccttccggggagctgttggtgaaaaactcggaggtgagggtctggcccctgggagcagagggagatgatagtcacagcaggagcagcagacacctgctgcgcaccgactgtgtcatgctctgtgctgagccccgcgcagcttctcaatcctagaatctgggcaagcaggtattatcacccccgctacagatgaggaagtgcttccccggtggctcagtgcttaagaatctgtctgccagtgcgggagacccaagttcgatccctgggccaggaagatcccctggagaaggaaatggcaacccactccagtactcttgcctgggaaatcccatggacagaggagcctggtgggctacagtcctcggggtctgagtcagaagcaacttagtgactaaacaagaacagatgaggaaacagcttcagcatgtacccaggtgtccaagacacgctgttgccaagaggcaggatggagttgaatcagggcctctgtggctagttcctggggagggaaggagccctggagggagggagagggatgcgtggcaatgacttcatgtccccaaactgcccctactgttctcaacctgagccacgggcgtgaacgggacccgggccccctttccctgtcagcatgcatcatgtgctataatgaagaaaagttgctctccagtcagatgggcggctggctgctgggcgggcaaacctaagggagtctcagggccagggatcctgccacacagggaaccagatgtgcagtggtgagccctgttgagatccccgtcgggacgtctcctctcagaggactggcctcaggggtgatggatgagcgagctcaggtcccgtcctgcgcacataagaagtgctcagcaaatagtgactgttacaagtgtgtggtcaggcctggatgataaaggctgaaaattcaataaacaatcgaatgaagaatttttttaaaaagggaattttatttgagcccaactgaggattataacccaggggacctgttagacatcaaagacacagtcgcatacatttttaggacaaaaaaaaacatacatcaaaatgagatacaggtattgtagataaaattcaccaaagccacatactccaggtaagcacatacaaagtgagcagcgagtcactgtgacccgcttagagagctgtaaaagaatgcttttcttttaagaagttatgttgctagcatcagaggaaagaaaaaagattggtctttacggccaagcatgcacatccgtctttgaggaggtctggttaatgagtaaagcactttagggaggggaaggggaggcccaaaaagacacggagagagaatctggtgtttcatctttcttgtcctggccttaaaatataaacttatttcatcaaagcacatagccaggacttccctggtggtccagtgggttaagaccctgtgctcccagagcagggggcgcgggttccatccctgcgtggggaactaaaatccg

SEQ ID NO: 60216 - DNA, 984 bp, Bovine  19866880513944
  misc_feature (1)..(1): n is a, c, g, or t
ngttgggggagagcggtccctgaggctctaccctgctgggcctcactccttggaggagccataggccttcctcagattctgaaaactcaacccgcgaaggcctggttctgtgctggtcagcgcaggaaggaccctctgagaccttccctcctatggttggaagcccggggctcagagaggggaagggcctttttcagagtcacacaggatatcgttgggatttgcatgtccttagctgcctgtctcttcttaccagtctctgagaggtttgggggcctctttctgggcaagattcagggggccaagcccccatccggaagcctggatgaggccgggggaccctggtgggggcagtgcagttgtgtgtctccagctgtcctgtgtttgcagggagtcagggaacagcagctgggagattccacgggcctccaaggccgaagaaggcacgtatgagtgcacggcagtcagccgggcggggaccggacgagcaaagactcagatcgtcgtcacagggtctgtccccttgggcccgtcctgactctcccctgtaggattccctcccaggctctccccatctgtgggtgagtgtgccagcccgctgctaggggcccgtccgtcatccggagcccgacgcccacactgcatctgcgtgctggcctccggtttggactgtctgccccacgaatggcctgcggttgcaggaaggttgagaacccctgctcaggctctgcctcccagtccccagccttaatcccacccttgacttcttgatcagcccccaggcccttacaagggccaccatccaccttgtccccaacccttaatgcctccaggtcctgccaccatggcaacattgaactcaggaaggttggaaaagccacagatcctcttacaatgaaattagctttattttaaaaataatgaacctaagctgccttgatgggctttcccagtggctcagtggtaaaaaaatccacctgccaa

SEQ ID NO: 60217 - DNA, 2479 bp, Bovine  19866880538071
  misc_feature (1)..(1): n is a, c, g, or t
ntatgtcaggctagttaaggagtgagcaggggaccaggttcagttcagtgcagggggaacagcatctcccgtgcgatctcaactgggtttttacaaagtcattaacaagagattcacccaagtgttagcaacagtcctcggagtggtgggagcgtggaggagagggttcttttctttgaactcgtctggcagttctaaactttctctgggtgtccggtgtttcgtgagagtccagggtggggcccgagaggggctggatgttctcactgaccctcccctcggctcccaccccgcccagctgaacaaggcgttccaggccgaggagtcgcccagcgtcatctactgtatcagcatgcagtggttccgagagtgggaggccttcgtcaagggcaaggacaacggtgagtcagggggacccggcccatgcccgccgcaccccgtgctggcagggacttggggcttgcccacctcctgggagtgtcccaggaggtgtgggctggggtgcccggatctgagcccgcccagcaggtttttggtgccaccctttccagctctcaccctctgcacagagcacgggtgttctccccgccccggtcgggccttctggttgcagcaggacaggagctatctcgtgctgcccgttccgttcctgcccctctgccctgtggtgaccagggtgactgcccttcctcctgccaggccctttcctctggggactccgtggccctagatagatgttagttgttcgatgccttcagactcttaggacttggatgctgttattctccactcacagaggtggagacagcagggccgttcattgagaccctgggctcgctcacctgcacgcggctctctccctaccccttgagtcccacactcggctcccagaccagggtttagagcccagcggggccagcagagcccggagcctctgaatgttcatttcaccctttcgagcacaagcactggacaggacgtggggaaaggaggcgggtctcactgccatccacacaccccctccccgcctgtagcggcttcgattgatcaggaacccggctccagagtcacagccccatctcaggccagactctcagatgagggcagggtccagctgacactggatgtccacctccccacgaccgcctctgccccaagctagggtctgaaactggggctggtgtcctcaggatgcccctctgccgggtccagggacaccatgagtgcctccagcctttagactcatgtagatgagcctttggagccctgagtgcctaccccgtaagaccttgaccctgactcctggggcccagcaccacctctccagggtcacaggtatgatctcacacctggagagcagctctcatctgctgagggctggaggctgccagtggctggggactgggtttctgcccaccgctgcagaggcccagaggtcctgagcccgagctgtctgttccagagcccccggggcccattgacaacagcaggatcgcacaggtcaaaggaagcggccacatccagctgaagccgggtgaggctcagccctgccctgccccctcccagccggccaggctcccctcctggctcctgggagccccctcttgccacctcctggcttccaggtcctcccaggagcccccttgccccctgagtcaggctgcgacatccatccaagtccaggcctgggccttgagcagagcgatcgaggtgcttagcctctgcgtgggtgccccagcccctctgttccctacccacgccctctccccactctgccacctcacctgcctgtcctttttgcatgacccccaccccaggaaatgaggggctgcagccacagatgtgccctctgggggtcctcaggggatgggcttgcccctggagaaccccaagattcccatttacagcttggcacagaagcccatgattgtcctccctgcccccccgccacctccttggggcctggcgctcccagagcccccctctcagagcccccatactgccaaggtggtggctccagcaagggcaagcccagcctgagcggcagcccctcggaccctgcaggagctgactatgggcagatctccgaggagacctgggtgtacctgaacaacctctatggcggcggccccgagattgccatccgccagagcgtggctcagctcccggacccggagagcttgcacggtgaacagaagattgaagccgagacccgggccttgtgactcggtgggccagtctgtaagtcccctcctccctggcagagaccctcccgtgtccctcaagcattggggagtgccctgcgcacacaaccccccacccctgcaccccctccctgaggctgctcagaagaaggaccttctcgagggatgacccagctgtccccacaggtccccacctttgccctccgccccgtggagggtgtctgtccccagaagagaggctggccgctctggaaacccagatgtgtaaagaggca

SEQ ID NO: 60218 - DNA, 2613 bp, Bovine  19866880549046
  misc_feature (1)..(1): n is a, c, g, or t
nctgcgtctcctgtgtctcctgcatcgctggtggattctttaccactgagccctgatgaggccccaactcttgaatacaaaatatgataaacacacacgaagcatttctgctgcatgcccaagtgagttactagctaaattagccactcttctcataaaccatcattcatacttgactgaaggactgacaggcaaaacaagatcaatcagacttgggtttttggccacgatttgcataaaaatgaagtgaccctgtcacttcaaggaaaactgagtatttgttgccagtgataaaactcaagctttccagcaaaaaaactagaattatggaaaacttgtatctgacactgtgaacttgacagcttcctaatacttctgatgtgagttttattgcacttcacagatactgtgtttccttcgtactgtgagcttacgtgagcagggaccatgacggccatgttcatctgatggcccgctcactgatactgttgagtggatggaaggatgggagggtggacaggtagatggatgaggggtgcacaggtgaatggatggatgaggaagaggtagacagatggggaggtgggatggggaggtgattgggtgcaagagaggctaggagaaactagaagatggttcacacagcaaagtgaaagtcactcagtcgtgtccaactctttgtgaccccagggactatacagtccatggaattctccaggccagaacactggagtgggtagcctttcccttctccaggggatctttccaacccaggaattgaacccaggtctcctgcattgcaggcagattctttaccagctgagctataagagaagttctcacaccaacagcggaaggaattgacctcacactcttggaagcaagaggaccaactggaaggggcgtaggaggcaaggagctctgggacagggacccccacagctgaccccaacgtgtcagatcccatttccagccccaaaccctgcccacacttggtacctttttggccccaagcttcagcgccttcttcctggcttcctcaaagtcttccttctggccgatgttggcctgacgagcagaagcagagaggacccatcagcccaggggcagaaagaagagctgagaagaatgtcaccgccacctcgccccaccacccgagggtgagtcctgggcaggtgtctttcacacacaaccgtcttcagatgatttctttggatggctgaggtcacgtaggaaggagaaaggacaagaaccagggtctggggatgctgtactccttggagctgcctgaggctctggaaagcagtttcaaggagctggacaggctgaatctgggcctgtgcacctgggctgtggggttgcaacattcgctgtcactgcactgaaggtctaaagctgcctttgaacccatcaatcttttcccgaaattcccccaaagccagtacaaaggttggcttgtcagcagctgcccgattccctgcttactgccccagccaagtgcagcaacttgattgccccgggcaccagagctggcgggaagcagaggcccaggctaggagcgcccagctgtccgcctgctggagcccgacctctggttccgacagccccgtctagacacagtcatgttttctgctggctacactgtggcctcctgcccagaccttgaccctggattctgctcagcagattccagagtgttcccagagtccagctgcaggtgctttttctgaggccactcagcttttaaatctgcctggtgatagtctgggatccggaccacccattggtgctgccatggctcaaagcacacactccaggctctttgcattcactcaaagtcaccacttgctctcagcagggggctgtgggccagacacttcccctccctgggcctcaccctcaccctccacttgagtggcgtggggtcggcactgttaccagtggtagactgactttaactgcaaaccattcttgacaagaataaacttctcctgtccagtgccccctcctcatttcctctgggaacagaaccttctctcctgggacctctttctacagggatgcttatgagtgctaagtcacttcaggagaccacatggactgtagcccgccagggctcctctgtccgtggcgttctccaggcaagaacactggagtgggttgccatttccttctccaggggatcttccccaacccagggattgaaccttcatctcttacatctcctgcactggcaggcaagttctttaccactgtgccacctgggaagcccacacacaaggatggacgagagcaggtgcttcctgctcactatagggacaagcctccaagggagcaccatactgacaaatgagtggtgagcaggcactcgggccagtgaatgagtgttcccttggcctttccatcagagcctctggggaaagctttcctttctctcagaagactaggggatgaggagagccttgcctgccctgtggagaggccaagaatgacaccaagccgagatggaggcaaatctggataagcacctggattcagccttgcctgaagccatcttaccctggccttcttggttatatgaaaaactgaattatgttggttttcttttttttt

SEQ ID NO: 60219 - DNA, 2508 bp, Bovine  19866880605619
  misc_feature (1)..(1): n is a, c, g, or t
ntcgcccactccattgctcaccacacactcaaacagggctgagtcctgggggctgggctcttcaaggagcaaggcattggagggcaggagtctggaaggacagacagacagtcacctgctaagtgactggcttggctgacctgaaaccagccgccatggcttccccgcctggggaacttggaggcagggcatgtgtctccagactgttcccccttcccgtctttggcccccagtgccgactcaaaaagtttctcctagaattttccaccttctaaggtctagctgttgagtttgtgggcgttttaatgtctgcgcctgggtttctccataactcgagaacgttttctaaagtcaccacctaggataacttctgcaatacaaccacatccaaagccctgattagaactgcttgtgtccactgaacgcctgtttcatcacaaagctccacatgacccggcacctaatacaagaaacacctggtgaattcactgctgaaccggctccctcaatcctcccagggatctgttcaggatcacacttgagaaacagggagaccaaggctgctacaggcactatacgggttcagtctcagccagcatgaacttaagcttctaggtgggttttgaaatagtgactgaagtggtttcaaaggccatatattccccatttggctgtatgtccccaatgcccccacctcctaccgagcatctcctgtaaagacctccttgccccctgaggtccggacacaaaagttctggtgctggctttggtgagtgagacccaagcacgtccctacctcggttctgacccaagcaagtccctacctcagttctgacccagctccccgtctgtgagatgggcaagccctcttccaccctgaggatctcacaaagtccctggaaggaccggctcagcacctgtaggcgccctgctgcaggcggaagtccagcttctgtccgtccttccaccaggccacgaggggcttgggggagccactggcctcacagggcagtgaggctggggtgtaagcagtcagggtcaggttggaggggccgggggcgatggctggaggctctggggagaaagcagtgatcaggagacagggtgcggaatgtgggcaggggcagggggtctggtggggctgtgcccagagatgaagtcgaggagcagggtttactcttatccccttcaacccatccccgaggaagcagggaccgggaggcaggagaaactccccgcgtgggtcttccaatgggctcccaaagctggggtgatgggacctttgctcacccttgaggttggcttctccctaactacctctccttgaatggggcctccagggcaaaatttcccagcagcctgcctgaggccagggctcagctgcctccaccaaggtgatcaatcggattgaagagcagattagagcttctggctcagtgattctgagtgtgatacagcttgtacatcttttatcactcaatataatagtacagtagtaactgttccctggtggctcagatagtaaagcgtctgtctacaacgctggagacccaggttcaaaccctgggttgggaagatctcctggagaaggaaatggcaacccatttcagtattcttgcctggaaaatcccatggacggaggagcatggtaggctacagtccatggggtcgcagagtcggacatgactgagcgacttcacttcctagtaagtgtatatgtttgcataaaaataaatatgcatctttgagtatacacactcaaaacttttaaccaatgggcttcatagtcaaaaaaacatttggaggccattgctcttggctcctgacagctaggatgacccagaagctaagcaggacctggccccgacagggagtgggtgctgaaacaaaaaacacaccttccctcgtctacctaccaaagacctggaggtcacgaccctgccgatcggaacctgcagggttggatgccaggcagagatagtggccagcgtcctcggcgaggactggctggatcctcagggaaccttcaggcagaacttgaaacctggaacacagggaggggacccctggttgtgtctccagcaagaccctcccctcggcccctcaattttccagcaagaaggtgctaactcaggagtcctgtaggtttaggccaaggttggggtgggttggggggtcaccgccgtgggcagcaactcacatggcaacctagaatcagaaagggtgagtggggctgcttccagccttccatgctcccaccttgacccagcctctccccaagagccagcaggcaatggtacccccactccttctgagaacagcctctagatcagatctggcaactgccctttcctgggggccatgtctgtactctgtgatcccacccatggccacagccgattggacaggggacaaacacgccccgcaggctgggccaatggaattctctgccctgggaatttggaactgggattcacagacagctctccaggctctgcaacttgtgtg

SEQ ID NO: 60220 - DNA, 1683 bp, Bovine  19866880624984
  misc_feature (1)..(1): n is a, c, g, or t
natgcatgaaggtattttcagggcgaccaacccccggcccctgcccgccccagtcctgtgacaccctcaagcttctctcatcggtcccacctccaggcctttgcacccgctgctccttctgcccagaaccctcgccctcacctctgtcacctgggtaacctctacaacacttttcaagtcccatctaggaagtcccctctttgggaaccccctttgtgtgtggaaagcgcagtttacatggagtcttgtctttccatcaactgtacaacagaggctcagacagggcgctgcagacagggccacgccagggagaaggggttacaggacattggaaaaatagggcagaccgcacagaaggctctggccgtgtgcccctgggcgaatgaactcacatctctgagccttggtttgctcatctgcgaacgttaaagtgttagtcgcttacttgcgtcggactctttgcaaccccatagactgtagcctgcaaggctcctctgtccttgaaattttccaagcaagaatatgggagtgggtagccattcccttctccggggatcttcctgacccaggggtcaaacccggatctcctgcactgcacggggcagtctgagccaccgacgggagagcaacctctctctgagagaaggggtgaagttagagtgctcggtgtgacgcctggcacccagcaagggctcatgagaagcccttttccccctcattttcccagatggatgctaagcccccagtggtcaaacgcttctcctagcatcaccctcaaagcccagccccagtgtcccgacgtgggaggcagagaatagaccctgttgattcccacatcgtcaccacaccactcggctgggttgggaacgtgtcctaaaacatatttctcacaacgtgtttaccttcaccattacgactggctccggccagttttaaaaacaagcttcctttctccagcttgctcccacctccaggctcattagggaaaccggtattttaagaccacacggcccaaacttggagaggctctgggtcagcagcctgtctcaactgctggtagactggctggctccaaagcaagtgacttatcctctctgagcctcggggtcctcatccgaaggatgggtacagatgcctagcaggcagagccatcgggaggattctggatagaaaattcccagcttagaagacagctgggtgtccactggactccctcccgctgacctgccctgagcaccgggagcagcggagctagaacgggctgctgggggctcagtgtggaaggcagggcctagcccctgccccccaatccagtcttcatccctggctgtggtgggggtccgcccaggccccctgctccccctcccacgcccagagccatgttcccgggcactcctcctcccttgcccatagctctgtctgctgggaaagaacatgagagccggtccctggagtccaggataaatgttgagtctgattttgatttccctaaagcaaaatacctctctcctgatggaagctcagctcaaacacggtgggaacagacagcaggggctgcagcccccacagaggcgcttggaggaccccctgcgggtggcctccccgggccgttctgcgggggtccctttccatctgcagggacaaaggctgcaagaatgtcggtcatgcctcccccgcccccac

SEQ ID NO: 60221 - DNA, 1464 bp, Bovine  19866880629524
  misc_feature (1)..(1): n is a, c, g, or t
ntctgagctctcagcctgcgagggcagctgggcaacctgatggccgatcaggctctgtgtggcgtttaccgcgatgtcgggcggtgctggcccggccagggacccagcaggtctgcacatctctaaggtcaggaaaagaaaacatcaagtcatggctcagccaggcctagtcagctcttgactaggatggcatcacgtcctgccagcccgtgacatgcctcctttaaaatggttctcattctgaaatatttactgttgctttctaatttcaaaagtcatacatgttcattattcaacagcagaaaatttcggaaaaaaaaatacaaaatttcaggaaagcacagcaaagaatcatcaacactagcagcatcctgcagagataatgaccatgaagatttccagacgtttcctggacaatgcagacacaaaattacacgcaggtaaacacttgaacgtggcttaaagttggagctgtattgcatcatgctgtttaataatctgcttttaatttaatatatttcgatgcactcactttattcccaatgttaacgttttcctggatctaccccaagcatctggtctttaaattccttttacactgagctaaagcccctggtcagtgtcagccaccacttctgaaaccttgttcaatgtgcacagatgtggctgagacctaggagtggtcaccgtgtgtctccagaccgcagcacacacgctctgaagcgctgccagctgcagtcaatgccaggttcaagttcttgctgcgcctttcacaagatgtgttatcttgggctagacgcttgaatctccctgaacctcagtttccccagtttgcgagccagagttggctgtgacctgtacctggaagggcccccgtaagcatgacacaggggaaagtgtggcctgtggtggcgagaggttgagggcaccggaagtgctccatcaaggggcccgacagaaagcctgtccccatgcccctgccagaggtcggggactcggtcactcaccgtttcctgtgccagacctcagagaccagcttctgataacttttgcacagggctggcttcttgtctgtgcggaccaggcctccacactccaagaagaactgggtgagcggggggctgggggagggggcagggagccaggtcagcaaagaagagaagggtacacggcatcatttacaagagctggctggaggagaaaacctgtcctgtgtggggatataccagggccccccagagccataaatacctgtaggtgacttgacagaccccacctgttatggggctgaattgtatccccctgcaaattcatacactgaagtcctaacccccccaccgtagaatgtgaatgcactggagataaggtctttctttaaagactgttgtgtaaaaattagaggaagcatcacccctcctttcatcggcccctgcttagaaaccttcctgaacctgaaggcctctc

SEQ ID NO: 60222 - DNA, 722 bp, Bovine  19866880649736
  misc_feature (1)..(1): n is a, c, g, or t
ngtctgggcttatcctgggggttaagcagaggcaggacctggtaggtgtatgtttcagagccccgccctctggccggtgagatgttagggatgggatggaagagaacggggtctgagtccctctctctctttctccccgcctcactctcgtccctccctttgctcgagggcgtcaggatttcccaggtgcagctggcggattcgggcaccttcacctgtgtggccgcgagccccgcaggtgtggccaacaggcacttcatcttgcaggtgctcggtacggagcagggggcgggttaccaggccctttggcctcagggttgagaatcaaggccctgtccctgcccctcccctctgagtggaaccgagggctggccctcagggatgtcaaggcagggcacacactcagcctctggctcattcagtcactctttcattgatctcacaagtggttctcggacacgagggtgccagggcctcaccaggccccgggatacggcagtaagcagaggtggccgctgccactaggaggcccatgaggaaaacagctctgtagaaagacaattaaaattccaggcgactggtgatgccaggggaaggggcggatcccagggagcactgagggggcacctcacctggcctcagggtttcagggaaggctccctggagaaggtgaggtctaagttatggactgagatgagaaggaatagaccaggagaagggca

SEQ ID NO: 60223 - DNA, 1103 bp, Bovine  19866880651674
  misc_feature (1)..(1): n is a, c, g, or t
naggaatccctggggaagacctcaagagctgggactcctctctagacgggagaactcctctgtcttctcatctagaagaaatgtgggttctccacggttcttctagctctgcggcatccgggggccacttggagcagagtcaatttcactccttcccttgtagatttcataatggcttctactgttttcctggccctgtgacagacacgtgacctgcatcggtcctgacccccacggggcgggaactctcatcattcccatttcacaggtgtatcacccgagcccagagagatgacagggcttcctccgggtcactccctcctggtctggcctccccctccccactccattcatacctgaaggggctgaggacgccgtgagccaggctgcccgtctgtcttctaggtggtctttgtgctgacaggggactgtggtgaccgcacccaccctggctacctggcctacgaggagatcgctgccaccagctccgggcaggtgttccacctggacaagcagcaggtgaccgaggtgagtctgccctgacatgctgcatccctgggtggctctgcccatcggctggcttctaggaccagtgctgagtgctcgcctcacagcaggaggcctggtgctcagggctttttgacaccttcttgtagaaccctctcaatcacccccaaagtaggtgctgcaggttccttagttttgccagtaaaaaagcctggggcctgaaggaatagcctgggttttaaactcgggatccccagcaagtccaggctggcaggatggatctagcaaagctcggcagagtagggatgttaaggggagcttctccccagagtcgaggagcccaggggtagctggaggatcaccagggccgtcagattcaggcagtgttgctgggacagcaagccatgcttggggacttggcagggaggggcttgcttgacgctgcggcccgacatgcagggctgccgatggcccagctgaccaggtgtttgtgttctggtctcggtcttggagcaggtgcccctcctcccttccaggctccatcagttgctcatatctctcccatctctcccgctgccccgcacgtccattcctcc

SEQ ID NO: 60224 - DNA, 1442 bp, Bovine  19866880785841
  misc_feature (1)..(1): n is a, c, g, or t
nggctacagatgagatatcgattgcactgaccccaggagagccctttccccagcctgagacgcgtgcagatcagctcggtgcctggctggcggctgccagggccttgctgcctccttccctgtagccgccccggtgcttgggatccaggggaagccaactgtggccccaccaggtgggctggtttgggctgtggccatggcctgagctccatgggctcttggctttcaggaaagggagtagggaagggtgcagttcacgtgagcaaaggtgtgaaggtgggaaaggacagtcagcagagagtctcgagcgtaaggtctggctggggtcccggggagtgggagaagcagggggccaggctgcgggcgggggcgggtgcctgatgccgccatttgggcaggcagtgccagctttgggaccaggcgtgatgcgaccctgacctcctttgctctttgagggtccagcctccgctccaggcagtctggcctgctggcagcttctgttgtctgttcctcctccctctgtttgggcactggagcaccagaagtggaaaaagggatgccctccatccgggtcccagaggaggcttggtgagggcagaagcggtgtcctgccccctccctgcccagcccgccatgctgtgccccctccccagaatggggcagggagcatggtgcactgggagttggaatgtcccaggagaaatcagctgagagtcacaggcaggtgcagcctccttcacccagtcacccattcttggaatcctgcggggcaggaaccaatcacaacgcggagctcttatcggacaagcaagatgccctcgctgacccccggtcatccagggacgctgtggtaggggcagcccaggtggcttgaagctttcttatttgcccaacatgcccccatatattttgaaaagaaggaaggtgggcttccctggtgactcagtggtaaagaatccgcctcccaatgcaggagacacaggttcgatccctgatccaggaagatcccacatgctgcggaccaactaagcccacagcacaactacagagcctgtgctttggagcccaggagctgcaactcccgaagccctcacacctagaccctgtgctctgcgacaggagaagccactgcaatgagaagctcgtgcaccatatctagagagcagcccacgcagcagcaaagacccagaacagccaaaaataaatacataaataaatattttttaaaaagaaggcaggcattcttctttccttttttttaaccctatggtttccacccatctcatcatggaaggcttctagtgcactgggaagattgcatagctttatctgggtgatggttacacaggtcaatacatagggagaaatttatcaagctgtccatctcagatatatgcacttctgtgtgtgtgcatgtctatgcatgtctacacatgtgtatg

SEQ ID NO: 60225 - DNA, 619 bp, Bovine  19866880793744
  misc_feature (1)..(1): n is a, c, g, or t
naaaattcaaaacagatgaaaaaccaatcaacccgcttacattcttgatgaaaatgtggaaaacttaatgggaaaaaaaaaaaacccaaaaccctccagatcttaaaaagactcttttatgaacaaatattgtatgtggtatttttcaaaatagcctttaccactttgcagatggtaccatgatcaaaaatgagtcctttccattttctgtgaattatacttgatttaaagagcggcagggagagaaagagagagagaaaatgtatcctttgctgtttgatgtcacatcgcagcagttttgaagactcctttcccctcttaaaattcattaaagaccccaaagagcctttgctcatcttattttatcacatacgcatgtgtgtgtgtatctgtgtacacacacacagaggctgtgctgggtcttagcagcagcacacaggacctttttgctgcaggatgtgaaatctagttccctgactggggatcaaacccagactccttgcatcaggagcgaggagtcttacccactggaccaccaggcaagttcctgtttatctgctttatagctatcaatatttactctatcagaaattaaaagtgaaagacttaaaaaatatca

SEQ ID NO: 60226 - DNA, 1525 bp, Bovine  19866880798049
  misc_feature (1)..(1): n is a, c, g, or t
nacatgaccattacttatctcctgtagtgttagttgttccatcatgtctgactctttgggaccctatggactgtagcccaccaggcttctctgtccaaggaattctccagggaagaatactggagtgggtagccattcctttctccaggggatcttcctgacccagagatcaaactcgggtatcctgctttgcagatggattctttaccttctgagccaccagggaagccctctcttccttattttccatctaattgcaccagcgtgctttcaatgctttaagaccctgctgcagaattctcattgaaattgaaaactaccaaactaccactacaaaggaaccaagtcgctcttagaacgcagaagacagggtccaaggactattgcgtatgttaattatttgcgtgcttctgagaaaactgctttatctacctttggcttattattttcaaatataaaatgggaattataacccttatcttgactatttcacttggttgtcgtgaggagctgatactggtatgataaaaccagtggtaaacttgtcttattaatcattacaatggcccagcacccagcaaggggccctggactcagcagatcctcaaataatggcaggcaatctgaattacatcacaatttccatgaacgctactcagtcttgcaagtgatttgctatcatctgacattaggataaaaatgcagttcatgcttccaaaagtattggctattctttcccaagtatccttgtaactgaactctaaacgcaaaacattttcaagagggatgattcttaacagagtgaaagaattgcacagaaaagctaggggagaggggaaccttgaatagacaacccaacacaacacattagaaaggaaaagaatcaaaataataccatcaaaatttttttcagatctagctagacagaagctctgaatgtttgtgagcttgaaggggccattgagattatctagcttaatgtttcctaaagtctgatccacaggaggtgatctggtttcatgaaaagagggtaagaagtgacagatcttcttaggcatatttacaatgcatatcccaaaccctagtatgaccttatgaatagaagcaaacttagggttccaagaaatggcaacccactccagtattcgagtctggaaaactccatggacagaggaacctggcaggccagagggctgcaaagagttagtcaagactgagcgtaacaacaagggctccgacaagtcctgaagtgaagaagccaattcacccttatttaaccctgtatcccccagacctctctggccatgagccctttccatggaagacctatgaacagcttgtagatcaaacgctgggaaaggccaagctggccccaggtcatgtagctatttgcaaaagactcagatgtcctaactctccacccagagttctcgccattagaaatttcaagtaacagtatggacttacaatttggacaaagatgaggggacaaagctgctgatcaggcaatccaatgggcagcata

SEQ ID NO: 60227 - DNA, 919 bp, Bovine  19866880817953
  misc_feature (1)..(1): n is a, c, g, or t
ncgtgagtttgagtaaactcccagagttggtgatggacagggaggcctggcgtgctgcggtccatggggtcgcaaagagtcggacacgacttgagcggctgaactgaactgaactgaactgaataacgtgttaacttttacggtacagcaaaaggattcagttgtacatatacgtgcattctttttcatctgctttgtcgcaggatactgagtaattctccccgtgcacacagtagggccttgtcgttcagccattctctatataatagtttgcatctgccaagcccaacctcccggtccatccctccctcactctccctccgtcttggcaaccgcaagtctgttttctaagtccgtgagtctgtttctgttcacagataagttcatttctgttgtgtttttttagggggggagggttaacattttttaaatttattttttaattggaggatgattgctttatatcgttacgttagtagcatctccctttgttgacaaaattcctgagctgtgaactgttcccatccatcgattcatcccctcagccattatctatggcctacatcctggccaggtgcggggttgacacagataccatcatggaatcactgcctccttgactttaaggaattcgcctttcactctcttcctaacactcagggactgtatggtgagttttcccacgtgttccctaagtacttcttgaatgccattctggtgacaaacacattaaagtcgggttttatctgtccctgtgcgttggaataataacacactagacagacgtggaagagaagcggtgcctcatctctgcttccatgataatgctgcagccggctagtgtggcgctgggatgaaaaggaaaaggttatcaaaatgaatggaatgtgcactaatatttcccaacagagagcacagt

SEQ ID NO: 60228 - DNA, 1618 bp, Bovine  19866880823717
  misc_feature (1)..(1): n is a, c, g, or t
nagatatttgctgtaatatggagtaattaagtagtaaaaacttaaaagaaaagataaaaaatttccttaatttagaaaaaaggaatgcaattttgatacaacatagatgaaccttgaaaacatgatgctaagtgaaataagccagacacagaaggacaaatattatatgattccacttgattgagtgggatctcttataggaaatgcctagtatgtgcaaatttagagacagagaggagaaagatggatgccaggggcttggggagggggaagtggagaattagtgtttaataagtagggcttccatttgagaagatgaaaaagttttgtggatggatcatggggatgtacctgatcccgctggattgggcactcagtgcttaaaacggtaaaatcttgtgttatgtatatttaccacgattttaaaaacaaaaaattaagttgtaaaaaaggttcaaaatcagggtgatccctcaggccttaggagcctggaggggtgggagtcagggaacagtaagagaaatgagaatgaaacatcagagaggcagaactgcaggggggatggtggggggcttctcccagagctgacccaagcctcagtctgcccctgagcagaggacagggacccaggagggagacccaagtgaggcgttcttgggtaatgaacctgtcacatgcaagggggcaagctgagactcactcttggccaacagagggactcagggaactggactcaggggtgctgacttaaaagaaaaaattttaaattgtggtaaatcatgcataacatatccattactatcttaaccgtttttaggtacattcacattgctgtacaaccatcaccgccacccatctcctggactcttttcatttagcaaaactgaaaatctgcacccattaaacaataggggtcctgattgaggggtggggggggtctttacctcacccacacccctctgaggtcccagccttgtggagttgcaggaacccagggtcaggaaggtagcctgatccccgggcctcctgtggcaaccacgggtacctgcctgatgttttctcatctttggtccaggggatcttgagatgattctggcccctgaggactccatttctgggatgctgcgggatcccggtggttcgtgagagggatgctggcgtctatacctgccgagctgtcaatgagttgggcgatgcctctgcagaaatccggctggaggttggacgtgagtgtacacctgtccccacctgtgccctgccacctgccctacttctgggcagggaggagagaatgctaccctgtagcctgccagtggggagtttgcatcatttggatccagagcacgagggacagggattttagagggagatggtgtatgtgctcccacttgctacgtaacaaatcgccctgagactctggcttaaaacagtgagcatctatcgatgcacagtcctggagggttaggattctggttctgactcagggtctctcacaggaaggcacttattatgttggtcggggatgtggtcacctgaaggcttgactgggactggaggatccaccttaagttcatgtatgaggcttttgtcaggaagcctctgttccttacccttaggt

SEQ ID NO: 60229 - DNA, 1084 bp, Bovine  19866880830791
  misc_feature (1)..(1): n is a, c, g, or t
nccgcgcccagctcattctctgccaggcactggtactgtcctgcgtcgtccatctgcaggcgggcacaggagggggcatggagttcaggagaggagggcgagggtggtggggagcatctggggacagctggacacaggaaggggcccctggagcaaggcccacctaaccgggaaggagctgagagcccaaaccagccaggggcccacacattccatcagctgggcagacgtggccgctatgctgtagaatccagagaggaaacccctgccctttcatacttgcagcttaagggtggtggcggttcatggctctaagtggagccatatgctgccaaagcatgcttgagatccacctcttctaaattacatacattaaagtattatgacaccacagcacattattagggatgcctttttaaaaaaaaaaagtttgggcaacactgagttagaaagaacaggtttctgaactgcaggctccttgggtgcacagctgcaagacttccggggtaggagggagggtttgcagcacttcctggccctggtgaaagggaagacttcgtcctaggatatccatgaccacggcaatgaggcaactcgggaagaatgctggctcagattcacttccgaggggcagtaccgccatgagatggagctatgggcagccaaggccagggtccacacccagaagatcatatccgggaggccactcccaagggactctaagtgggaggcatggcatgcaattaagagtgccgagttgggcgtcagtccaagatgagaccagctctggctcccctgcttagcaccttgaacccattactagagcatgaccatgtctctggagactcagtttcctcatctctaaaatggggatgataggatcgttgtaagcatcaaatgagatcacacttactaagtggaggcacagtgcctggccccacaatgtaaatatgcaggtcacggaagccctgtcgctgctactgtagctgtcttgataccagtctgagacaggctcccaaatgagtgagatcaaggacctctaaagtgagtccatgacagccccgaactgtgggtttctgcgcag

SEQ ID NO: 60230 - DNA, 1188 bp, Bovine  19866880852033
  misc_feature (1)..(1): n is a, c, g, or t
ncgcataaacatctaaatataatgcccagcgtgttcctcctcgcagtgggcagcctgggttcagctggggacagaaggctgctcgcagctgtgcttggagcccactctcccacttcccaggtggctggatgctgaagctgacccgggcgcaggagcaggacagaggcctctactcctgcctggccagcaacgaggctggggaggcacggagggacttcagcgtggaggtcctgggtacgtcaccgcgtggttctcacgggcgcccacccatccttccttccagcctgcgagcctctgggagtggacccagcacagacaggagggagagaccaagccttgtcttctttgcctcatcagcagcctctttctgaggctgccatagaactttccagaaacagccagaatcaacccaagatgaaagggggcaaagattttcaataccacccaactgccttcctctgattggggccttctcccagcggcactggtatttgcctcagccagctgcaaatttttattagatcccctgccccatggcagcaggtgtgagggaatggagaatggaagacagaaccagtgggcgcttggcttcctgctccgtggttgctcagcctggtcagtgagcgtctgtcttccctgcttctcgcagttcctcccagtattgagaaggaggacgtggaggacacagtcaaggtccccgagggggagatggcccacctgatgtgcaacgtctcaggtaagggccacacagcggactggaggagggtgaagaggcaactgtgggaggaggggtcttcatagatctggggtgcctgcccactgccctgctgttccctgcagggtgtcccttgccatcttggacttttcactctctatgcctctgccacaaacactcttccttactcatctgactgcagagctcagttcagttgctcagtcgtgtcggactctttgcgaccctatggactgcaacacgccaggcctccctgtccatcaccaactccaggaacttgctcaaactcatgtccattgagtcggtgatgccatgcaactatctcatcctctgttgtccccttctcctcccaccttcagtctttcccagcattaggatcttttgcagtgactcagttctttgcataaggtggccaaatattggagtttcagcttcagcgtcagtctttccaatga

SEQ ID NO: 60231 - DNA, 2086 bp, Bovine  19866880892190
  misc_feature (1)..(1): n is a, c, g, or t
ncttgcaggcaggacgcccaaagctgacatcagttccttcgtgcacctttcattcctcctcacgtggctgtctggatatgaaagtgacccaagaatcccatgactcgtcatctgcatgattccagaaggaatctttttaccttaatccaaatgggaaactagccaaataatcgtcatttcttgaaactacagctggatacgttattactttttctaggacaacatttttaagggcagtaggctcctgagagtctggagactgtcaccctcacagatggggcccacagatatctcgcaggcctacaaagtggggaagctgtgattgtctcccacaggctggctcatttcagtctgcatcggcactaaacattcagagcttgactcaattcttatgcctcaatctttagagtgtcagtttcctctcaaacaagtatgctaacagtgaatttcaaatcaaatgggaacatgggggaatatttcaaaaaataaaggaagctgtggaaacaattcatgaggtggccctctaatctcaagaaatgactagaagggtgaaaaaataaacacctacaagagaaaactctgagtctgtagataatatctaaagatgtcttaagtctagcactagggaggctatgatgatttatcccatgaccagcccttcctggaccaaaggaggcttcatggcaaaggcattcttttatctgttgttggatgtagcctgtcttccaacttattttccctgatagtataggtatttcataaatgactccaaaacatgaatacgtactgcgtgcccccccaaggaaagagacttggtgaaaggaagggcagccatcagccagtgaattttaaatacatcattcctataaaacagaaagaaaagaatttaaggacaattttacactcccaaaggatagctgaagccccacccaccatatatttataaggaagtcataaatatgatctaagcaaaccacaaacacaaagcttttttaaaaagtggttgctgccagcagagaaggcgtggaatggggttccaagtcatctctaccatgtaatccaactctgtgaatggagccaagttatgcacaatgggttcccaggcctgataagatagaaatctaaacaggttgccagtttcctctccggaaaccaccctggaaagcccacagaggcaagaaagaggcagatggatctatgaaaatggcacaaaatccccaagaaggcagaggtgactgggcacagctctagggaaaattgctagcccagaggagaggtgggcttggtgctaggtagcagggatggtcaaagaccgtgcccctctctgtcccctcaaggctggaacctgccaaacacaccaggccagtgagacacagcacccactcccccccacatcctctacgggcactagtccaccctcaggctgccagacattcaattcctctaccccttcccgcctcgccctaggagttaacctgtgagacacacaaaaccatgacagagaaaaagttttaaaccctatgaaagaaagcaaagacttgaggaagagcgacagggggaattcccactctctgatatcaagacaatctgcaaagatacaccagttaaaatatgggggacagtgagcatcagagaagtaaaccaacagaacagactagaaagcttatggatagatttgtgcatgtatggaagcttaatatttaaggtgacaccaagtcaatgggaaaagaagaggctgcttaataactggcactggaggaaaaaaaaaaccaacctcagctcaaacctatataataaatgaggaaagctgacctcagcttcacacttacctataccccagggggatttggctgctaaacagaaaatagacattttgtgatctggagtaggaatgggcctctcaggatccacgaggcatgacccagaaggctacaactacatggcctcgactccatcaacgtgaaagattttccctcaacatttcaactgggaaaagaaatcgccaatgtcttaagacatacgagggactgagactccaatgtgcacgaactcaagcacagcaaccagggacagacagcaaacccgg

SEQ ID NO: 60232 - DNA, 1240 bp, Bovine  19866880901257
  misc_feature (1)..(1): n is a, c, g, or t
nccctcattttacagatgaggaggctgaaccccagtagaaagtgacctctccaggtcatgcagccacttagaggcggggggtgggggcatccagagcctgacttgcggcccctgccccacctcctgcacctcttgcaatggccaggctcgcctacgacgtcagcatgtcccgagctggcctctcccatctgtccccagagtcccccacccctccccgccccctgcagcggaagcttgtgacgggtgcggtgctgtgacccacgggcaggggcttgggcgctgcaaggggcggtgcaccagccgcctccatgctgggcagcctccctgagaccttctctcgcccccgctgttttcagcaccccccaccatctggggctccaacgagacgagcgaggtggccgtcatggagggccaccccgtgtggttcctgtgcgaggcccgaggggtgcccacgcccgacatcacctggttcaaggatggtgaccccctggtccccagcactgaggtggtctacaccagaggcggccggcagctgcagctggagcgagcccagggctcagatgctggcacctacagctgcaaggccagcaatgctgtgggggttgtggagaagaccaccccggctggaggtttacggtgagcggcccgggggcgtggcaggagcaagggtcagctggggtgagtggtgggaggactctgggccacggtggcctccatctggctccaaaggtgggccaggggagcagccagaggcccaagataatgagattgaatagttatcctggggagaagggtcatctcatccaacctcccctggctagagaagaaattaagccaggagacgggtctgtgtcggggcccagggagagcccagtggagaaatcaggtctcccctcgtggtttagggcttttcagaaacttgcacccagaccccaaaaaccaccactaataactaactgctcttgattaatcacttactgtggtccagacccccagggcttgtcatagcaacagctaatttcatctcagggactagggccctggtcccccaactcatgggtgagtctagtgggctctgggactgacccaggtcctcccgctagggggtgagaggacctggttcacaccgagagggtctgactatagataaagtgaaagggttagttgctcagttgtgtccaactctttgcgaccctatggcctgccaggctcctctgtccatggattctccaagcaagat

SEQ ID NO: 60233 - DNA, 2558 bp, Bovine  19866880912229
  misc_feature (1)..(1): n is a, c, g, or t
ncattcccctgcccgtgaacacccacactggcctagctcggggctgcagcctgggatctggagagtcctgctccacaggggtaagagatagaccccaaggcctctgacctcaccccctctctcagtcagctcctgcccaggaaagcctaagcctgtgcccagcactagctgcccagaaaaggaatcccaatcactgtgacccatgcaacacatctgggcagaatccagaaaagcctgggatcaaacccctgtactgccagctgtgtgctctgcgaccctaggcaagtcacttctctctcatctgtacctacacctctggaggattcacccaccatgcatttcaagccgggcggggccttgataaatgctggcttgaggagggacccttggctgagcgtgtggatttctgggattttctggaacctactctcttggtctgcgaagtagaccttgacctctggtcactgctgactcccctgaggccaaatcccagggaacaactcccccgctgcccctaggcctcttctgccctggctctctcgtcccgcctctgcctcggtgttcagccagctcttctgtctctgtgcctcctccatggtttcactgtctttggtttccctccatctttgtctgccaggaactgtgtcccggaggaaccaatactccagggcttttctgtgttcccttttccagagatggggagagggaggcagggaatgagagagaaagagagagaagagaggagggaaaaaaaaaaaatcaaagcccacatattggttccagatgtggctctctctcccagccctctccagcaatttaattaaattcccccagacagccaggagggtttcttaatgatcaaatttcccggctcccctcctagaacgggccctctctgtctccctgacggatggccgacgggactcttcctgcagtcagctttgccaagcagggtccgtggtggtggagtggggtggggtggggggcttccccggagcacaaaggaccctgctctgcgccccactctgtctccctccatccccaagggctctgagccctcccgagccttcgcttggcagagcctcccactcagctgagctgcatggggtggaggggtctgagtggtccttgccctgagctccgcctctgggccggcctgccaggaactgaggccaagcgggtgacagtgggggtcagatggggagtctggatgaatcaagactctgggctcacagatcagcgaggcacagggcaggctcagacctcctgggcaccctccccaacccattttggcaaggggatagaccaaggctcatcgagggcaaggcctgggctgagattacacatacctgccttccagggatggagaaggcaatggtaccccgctccagtactcttgcctggaaaatcccatggatggaggagcctggtaggctgcaatccatggggtcgctaagagtcagacatgactgagcaacttcattttcacttttcactttcatgcattggagaaggaaatggcaacccactccagtgttcttgcctggagaatcctagggacgggggagcctggtgggccgccgtctatggggtcacacaaagtcggacacgactgaagtgacttagcagcagcagcagcagccttccagggacagagaggcagacacagacagactagcatttaggtggagacgatgtgcccggaggaggcctgggatgcttcccgcatgtggagttcagtgtcctcagtagcacccctgacttctggagcaggaaggaatctaggtgagcctcgaaaccaccattttttgtgcccatgaagcagttaagttgagaacaagccaggccagaccccaggccccagacctcctcccatctcgaggtgggggtcctgaggggctctgcgtggactgaacgtttgtattccccaccccacaaattcatacgtggatgccctaacctccaatgtgatggcgttagcaagtgtgactgttggaaggcgttagcttagatgaggccatgagggtggaactcccgcaataggattagtgcccttgaggtcatcccccacaggggatggcggccgcctacaagcaggaagaagcggccttggaatgaaacctaccttgctggtgtcttgatcttgagcttctcagcctccagaactatgagaaatgaatgtctatggttggagccacctaacctatggtactttgtgcggcagcccgagctaagacaggctgcaggtaccttctctccctgttctccttctgatccctaaggactcatctcttctggaagaggctggggggtcaggtgaggcctcggatgtgggcacacatgatggcagagaaagggggaggggtccctcaacatcccctctgcagctctgggctgcccatctcagagcttcgtcaggggctagcccagcccacaactggctctcacaggccccacatcaggaccacctggcaatgtctggatgcggaatgtggtggggacatgtcagggaggaggctgcccttggagcaggggctgcagccagcagggccggattt

SEQ ID NO: 60234 - DNA, 3468 bp, Bovine  19866880918827
  misc_feature (1)..(1): n is a, c, g, or t
nccagcatccaggatggccccactgagcccctccgggtgctcagtgctccccaagaatgtaaccatggtcacccaagtggaaaggccttatagcaccgagtgtgagcacagaaaggccagagaaaacataaccaaactcatcaatcagcttctatcccactaccttgactttattggccacctgggagcccacatttttgaactcaagataatccacatttttcccctgtttccagaaggagcggtctcagtggggttatttgtttcctagcataccacatgtttgctatggagagcatcatgggtctggcccatccactcgaagaaggcatgcactcttatggctcctcccaccactctcagccttggcttgggaatccaggcctgtctactgtgtctacattgggatccaagaccggctgcggggctggatcaaaacctgggctctagacacttggctggtccaagaaaagtggccccttccccacccgtgggccttccttacccttcctcacaccccactgcctaaatgcatcctagtctcagccatattagagcctccctcattctttttttttcttttttaatgtggaccactttaaaagtctttattaaatttggtacaatattgcttctgttttatgcttttgcttttttttttggccaggaggcatgtgggatcttatctccccaaccagggatcgaacccatatgttggaaggtgaagtcttaaccactggaccgttaaggaagtccctagcctctgtaattctaacaccccacctctcaccttatcccactccagtcttctccctgaaggaaacttctcttttcttctgaaagagtaaaaatactaatgatggagagtatttgctgcaatcttattgagtgccaggcagtctgcatcatgcctccttagatctcctctagcaaccatggaggtcaatactcacccttcacgtgacggatggggaaactgaggttccaagaagcaaagtcacctgtccaggctggacttggcatccacgcccacctttctctaagacctgtgatcagctgctccactccatgctacgtcagaaacgtagcatgtcagtcccaacaagcagaacttctagagctacagtggaccctggtgggcagcccttgggctggactcggacttacctttcagactctcagcacctttgaaatgccgtaaactcatagcctaccatgtttcaccaaactacctggggaaaatgagaggagagagaggagcaatctcgtagataagtcttcccatccttgtgtgatcacacacccaggaccagagaggtcggaaccgtctcaaagccttgcttccctcttctagaaggaattgaagagttgagtgagggccctggaggacagaactattaaggagttgaaggaactgacagacaagtcagaatgatggagctactgaggataagaaggagcagccgggggagccagtatcatcacagtggtgtgtgggctccaggcagccaggcacttgagtgatttactgccgaacccatccctctgtgggaccagcctccaagtcacatgtgccctaaggaatggtttgggatggtcccaagaaatactggagcagcttaagagttacaggaactgttactcatccccatgcctccaagactgaacaatgaaaggagctaaaccacagccaagagctccaagacttgctccccaccacccagaccggaccatcacccccccgatggagctcaagtgtcaccaagcccctggtgctgtcatcaggggggaaggagcccgcctcattggcaaggggtcattgctcactgtgctgtatgctaagccttgttgtcacttatggccatgatgtcccctttgtcattgtcatcagtggctgggaagaatatccaggatgaattgaggtttcctgtctgtcccttttattcttttgttctctctctctcccctaattaaaaattccactgacctgctttgtgcatttgggcagaatctgtcggcttcttaccctacagtttcccccacttcttcctggaaagcttggctttcacctttgacttttggattgaggtgtctactcttcactcccctctccaagtgaagttctgacgggctagctcactcatgtggccccagtcccctggccagtggttgagctgggaatgggagttgatgtggctctggccagtgggatgtgtaagggtatctcctgctagggtgttttcagaacagacacacaaaagaacaaggtcactgtctgatttgaaggcttatttgaaagcaatagtagataagacagagtggtatgggcaaaaagaaagatgatatccttctggctgattcacactgctctatgacagaaacccacactgtaaagcaattatcctccaagttataaaaaagaaaggggaatcggccattagaacagaaaagagagtcctgcgatagatctgctcgtccatgggcaactgattctttttccaactttaaacttgttgttttgtattggggtgtggctggttaacaatgctgtggtagtttcaggtgaacatcgaagggactcagccagacatacacatgtatctattctcccccagtgggagaaggcaatggcaccccactccaatacccttgcctggaaaatcccatggacggaggagcctggtaggctgcagtccatggggtcgctaagagtcggacatgactgagcgacttcgctttcacttttcactttcatgcactggagaaggaaatggcaacccactccagcgttcttgcctggagaatcccaaggacagcggagtctggtgggctgccgtctatggggtcgtacagagtcagacacgactgaagcggcttagcagcagcagcagcagtgttctcccccaagcccagcaattgatttttgacagaggtgccaatgggaaagggaagtctttctgagctaacagtgttgaaacaactagatatctgctatctgtatggaaaaaaattatgaacctggatcccaacctcacaccatacacaaaaatgaagttgagatgattagtaggccaaagtgtaaatgttaagctataaaacttctagaaaaagaggcacaaggaagaaagagcccctcttcttccactccgtgatgtcgtgtctgcttagaccccctgtaactttgcagcctgaaaccatgaggaaagccagcctgcggggaagaaaagagcaaagagaagggctctttggaactgccctaggtgtgcctccatcatagttaaggatgcgttttccttcagagttaagccagttgcattgcatcctctgttactggcaggaaaagcttctcactgagacatgcctgtcctgcagcaaggacacacatagcagcatcattcacactaaaaggagagaacaacccaaatgtccatcacagacaagtggataagcaaaatatggcatgtcccg

SEQ ID NO: 60235 - DNA, 714 bp, Bovine  19866880972589
  misc_feature (1)..(1): n is a, c, g, or t
ntcttcccggccctgtactgtgggcatgatgatcccattttacagacaaagaaactgaggctccaagagttagaattgaaacccagggaccgcccaactcctgagttcatatccttcttctctctgctaaattgcttgatatacaagattgcctgctcttgaaccaggattcatagcccagtcccacccctaaccagctgtgcgatcttgggcaaattggggggaaaaaaaatcaaaaaacctctgtgcctcagtttcctcatcagtaaaatgagactaataatcgtgtttcacagggttgtgtgggtttggtgggctgatgcctgttacgtgcttgatccattgctttgaggggcaggaagtgctcaggagggacctgctctgatggtcaggatcccacagagagctctggtggacgtgtgttgccggggtggcatgccggggaggctggtggctgagcctctcatctctctcaccaggccccaggctacacaggcccccaagctcaaggctgtgctcacccacaactcctcgggggaaggctcagggcaccgcaggcgatgttgccctttccgagtgcgattcgctgacgagacgctgagggacacagcactccgttactgggaacgcagctgtgctggtgagcagacaggagggggagctccaggactccagaaagttccagcctgaaacctggccagcagaggctgggcc

SEQ ID NO: 60236 - DNA, 1945 bp, Bovine  19866880973028
  misc_feature (1)..(1): n is a, c, g, or t
ncaattcaccaactcccctgcgaccagaacatcatggcactctcacagcatgggagatgcaggacttactcctcttctgattgaggggaaactgagccagaggtcaggtgaacaggtgaactcccttaaggctcaaagccagtgaggccagcaaagaggtgagaactcagacgtctcccaactttctaccacacccgaagaagattctgaccctgtatttcctccacaaaatgtccccttttagagcagatgctttgtagttgaaatgaaaggaggatcacggggtgggtgaaccttatcactgctcctgctgaagcgagcgggagactacaagcacctattggaaggactgtgaacaaaggctaaacaaaaacaaacactttcagaacttccccggtggcccagtggttaagaatccaccttccaatgcaggggacttgcgtgtgatccctggttgggaaactaagattccacatgccatggtaagcccgtacgccacaactagcgagaagccagcatgtcacaatgaaaagatccagaatgctgcaacttagacccgaagcagccaaataaataaataaatataaaagaaaaaacagaaagaaagtatccctctactttataaaataaatacttttgtttttggtggtgacagtccctagggtctttaactcctctgatcaacccaaagaaactctgggcagcaaccatgtcagcaggccagagagggtaagtttgtatctgtggatttccaaggagacaggttaagaaacagcccccttaactgttacctggaaagcagagagctagcccttctgcctagaggcgggagagaggcgcaactgtgggtctgaaactcactcgatgccgaggtccacctcggggatgccgctcagcatctggttagacagcatctcctccgtcttctttgccgaggaaacccggatgttttctggcagctcataaaggcaatcctctgcattctttggcttgactttctgttcctcatgttccacgatccctttccgcttcttcagttctgtctcaatgtacttcatcctgaaatgagatacccgcaggcctcagggaggggcaggacagctccaaccctggcccagagccatgatgggtgatgatgaagttgtcatcattccatggagaagtgagaaaaataaaaataacttttttcagtttttaaatcaagctaaaagttttcaatttaaagcaccagtcgatacaatgagatcctgtcccaccacattatggttggaagtttctttgatggcagtttttatttaacagccttggtggcaaaatgaaaaatgggcaagtccaatgtttctccctccaattttctttaaggggtgggatgggaatattaccagccaaggaatttaaaaattctaagaaccacgttcttaaagaaatcttgaggttttcaaagttctcaagcctgaggtggtggggtaagggggaccagggacacaagaggggtcaaatttgctgtttttggataagattagaaatgtcatctgtgactaaatgtcagacactatctggctggagcccacctccaatcgctcagcgctgaaaagactgacacctacatgtcggcatcctcgtcccttcggttggtttctgcggaaaatgatgtccccagatggaggtcttcctcttcgctgatcctacaaaaaagagaacagtgaaggagagccttagagtcacatataaatgaggctgaatatgatgctacatgaataaaacaagtatgcaatgaaatgtacaacatcctgtccatagttggaaaaaataagatacatatataacacgtaaccagaaggaactccaggaatatacgcaagcacactgatggcctctggagatacttcagggggagagagtagatatatttatttttcacttttgcgttgcttgtattattttg

SEQ ID NO: 60237 - DNA, 798 bp, Bovine  19866880987437
  misc_feature (1)..(1): n is a, c, g, or t
nctcacagttttacaaagctggcctcagtccaaggccccagacacatgcagctcttaataaacatttgccccaatgtctcgtattctaccttgtggaaactcactggtatcattcacattttacaataatttgctgggaatttcctggtggtccagtggtgaggacttagtgctttcactgccatggtccaggttcaatccctggttggggaactaagatcctgcaagacgagcagcacagccagaaaaaaaagaaatcgttaaccaagtcatggtgtacccaagcttctctgctaagaggaccatcagatgcagaaaaggcagcagtacatttccctaacttctcagcagctccctgttcatgtgctgtttaaagacgacggatggtggagcatctcccagtgcaagaacctgagatctgggtccatcagaatccagaaagacaggcccagacttcaaccccaaaggcagaggagggggttttccaggagacccaactccctctccccagacaggcctggagctaagcccagcaaaggctcgagagaaggaggacgagcagggttagggatcctttacctgcagcgggatgacaaccatgaagaccttcttgtctttatcagaaaggatgtgcttaatgaaagcccagccagtgccgatgagcgcaatggtgatgaacagcagtgcccccttcaagctgcaaaagggaagaatgaacagacatcaacgggtctctttagcctttcactctgagtcacagtctacagctcattctatggtttcatgcacttcctccaa

SEQ ID NO: 60238 - DNA, 1622 bp, Bovine  19866881027854
  misc_feature (1)..(1): n is a, c, g, or t
nctggccttgtgggggacagaagctgctgagtaccccgcatctgaggaagttgacagtggcttgtcatccctggcctccagtttctgtccccttctacagctgccagggccatagtgctgccgttttacctgctgctcccagttccttccttgcccccttattacaaggccagggttaggttcatggcctttccctattcccccgataaaccccagagctgcagatattgacaggagacatcccagatgggcatcaaatctcatcaaaccccagcaggcaatggcactgcttcctggaatccaaaatcaaccagccccctgatttacccacttaggatcttggcagttgagtgttttatgttattttttcgacagatcattggcaatttcttgttaatttcccctgagggctggtgagtggagagtcagactagcttctgttctcttgccccctggaatgccatctgtccagacgagacagctggcccattaggcagaggaagcacccccctgtgcccgtaccgtccatttgattagtgttcaagagcgtctgccagcagactgcctggcggctgctagaaacccagcccaccccagcggggccagcggcagggtggctggagccaggactacactgatggaatgggaggcgttccggtggtggcatctagttcctggctcggtgccctgcctctccaccctggctcctccggtgtgccagccaccaccccccatcacctggcattttagaacccaacaggtatttggcacatctgtggtcccacctcttcattttatagaggaaccaactccagtgtggcatgggagcctgacttgcccagcttttcaagaaggtgttggaatgagaagctggaaccatctctgcaagggcttcctcttaaatgccccccatctctctcgaagccaggatcccctaggtgtcgaattcatcacccacgagctgtgtgtccttgagcaagtccctgcctctctctgagcctcagtttactccttcaggaaaatggacaacagcacctgcgtagccttgagggcacagaggcggatagtgtccctctcgttctcttccttcctcacaggagagccccgggggagccggggcagcatgatcggggtgatcaacggccagaaatttggtgcagccgtcctcaacaccagcgtgcaacaggaggcacgttccggggtccccacaatccacagcagcatcagccacatccccacaagtgtgggtaagtgggggccagaagaccctctgactccagctgaatccaaaccaaagtaggtggaggtggggaccactttcctttcccaccccacagcccccaaccaaacaaaataaactgcatttaaaatcagcccaaggggggacttgcctggtggcccaggcaagagtggctaacactctacgcccccaatgcagggggccggggttggatccctggtcagggaactagatcctggatgctgcaactaagacctggagcagccagatatatttttttaaaaaatcagcctgacagagtgtgaaatgaccaggtttatatgaatgcagggtcagatcgtgcctttttgcccccattattgccgtggaggttttctccact

SEQ ID NO: 60239 - DNA, 1064 bp, Bovine  19866881028383
  misc_feature (1)..(1): n is a, c, g, or t
naattttgcacaggggtaatgagataatgacggggcactcaagcctaacttggcagaacgatgcttctagatggagagagatggagctctggtttggatggccatgagttctttgcgacaggtctttgcagctttcatagaccttcacaaacgccatcaggttttacacatgttttaggaacgcaagtcaacgtccctataggcttttcaaaaggacgtatttctaacgtgcacttcacattaaagttctgttcttagccacatcctgctttgtagacagtaaaaccgttctcttctcttttttcttttaacctcttcatcggcataaattttgatattcctgatagtgagaaatcaggaaatgtcaggaaggtctcatgcaatcataaaaatgaactcaaaacccatgatttgtaataactgtactagattgtgtgaaaattggggctttctattttataccagtaggtcgtaacaaagtataaaatggatgatttgaagtgatggggtcattacagagtatcgagcagatgggaatagaatgtaaaaaagagtggatatatcaacttatgtatgtgtgactgattcactttactgcacagcagacactaacaatattgtaaatcaactatactccaataaagtaatttaaaatttaaaattaatttaaaaattaaaaaatatagtaattaggatataataaaatatttctgtacatctcttcctaatttgcattttagtcaatttttaatttttttattgaatagctattgtgtgtaagactgacaggagcctgtggtttcgctttatatacttcgaagggaatctgcctatttcagtgaaagcatgtaaaatcgggtttaactctagcctgcaacctcaaagtcaaaaaagagatttgtttccaagattaaccaaaatgcatttactcaagactgtgtttaaaaggtcatgttaagaggctatctagtttgtactgacttgttcaagttgtctctggtcattggagaaatggcaaagcaagaatttcttttgaattttttggggttttgtatctgcatatt

SEQ ID NO: 60240 - DNA, 907 bp, Bovine  19866881031605
  misc_feature (1)..(1): n is a, c, g, or t
ntctgtcactctgtcaataccttgagctggcggctcctggctgctgtggccttcctccttcccatagctgcagactcagccctgcctccactcacagtgtgagaaaaatgtgctaacacttgctgcaggacccccccagcctgtggccgtgcctcagaacccagggctcagggtccctctgctggagtttgagagccttccctggatttggcttcgaggagctgagaaccccctgagtcgtatgccataaggtgggcagtgctgccctgcctcctccctctaaatgtctgcaggcagggcattagtaccacacaggactgtacctaccagccagccctgacttcctgctattaggagctccttgggagcactgtgtgactttggacctgcacctcaacctctctgagagtcagtttcttgctttgctgctactagggccaggctgctggctatggcgcaccaagtaagtgctcaaccagtgcctggggtcaaggctcagctcacccttctcatcccaaccggtactgcgaggatggatctcgagtgctgagtggacatctctgcaggcagcgtcaggacagaaccaggaaaaccaagccccattccctgtgctggggcgggaagtcattcagctgggaaatcatttgtccacaagcccaagcctagtcatggagttgcgctaccatgagggaaattgctctaaatgtgaatccacctgcgagcctggggaaagtgattttgatcctcatgagcggacagcagtagtccttctgtgcacaatgttttcagcctgtctgccttccaatcactcctaagtaatatgtttcatttggtgtgactgctcacaggggccctgctccaccccgcactggctgcagaagcataacatttcaaatcttatcgaaca

SEQ ID NO: 60241 - DNA, 948 bp, Bovine  19866881107553
  misc_feature (1)..(1): n is a, c, g, or t
ngggaagtttatgtgactttccatggtcttcagcagacccaagccaaggccttggtccctccctggacaggctggcttagcagctccaccacactcactcctggtgcccccactcccgcttcagcgagtgcacggagagccagcctcctttatgctctggggggcacatctcagacctgggggacatcaaaggagctcacttaacagatagaaagagacagtaaacaagaatttatctacagattaagacaggcttgggtgagggggcaggcttggattagtaacagcgggcaggtaggcagcagggccaacaggtagaaagacagacacgccgggctccccctcaccaggtaggcaatgacgtcatagccttgctccttcagccacacgaggatgcaggaggtgtccaggcccccactgtaggccagaaccacggagcctttgccggacatcgtgactggagggagacgagaaggaatgtgagtgacccagagccagccccccacaccccgcctgccagcccctctcagcagctccctcctggcctcgggcacccttatcccccagacaagccaccatggggttcagaacaggatgttcagctgtcatcaggtcatcagcatgaggagctgacccttcatgcagccacacctctttcacccccctgcccatccccacagaccatgctggggcttggcagggggaggcatgtagccaatctcccaccagccagagaagaagacaaaagactaagctgctgggaccgaggtcaggatgccaaggtcgcagtgtcaggagacgggaggagccgtctcctgagtctcaggcagcccacacatctccttgctaagctgggccagggcagggcatggccctgggagcctcatacagatcacccagcacccctactctgaccccaggaagtgggagtcatgcctgccgctgggg

SEQ ID NO: 60242 - DNA, 1703 bp, Bovine  19866881186626
  misc_feature (1)..(1): n is a, c, g, or t
ngggtcctcggggtcccagagaggaggcttcagttcccgtgctttgctcttctttaactgtagatcgggatcctgtctaccgtggggtcagaagccgccaggtcaggtgtcttgtcgggaaaggaaagatggagaagccaggacgccgggtctcctgctctgacatgaagatagctttgtgaaatgacttgaatacggctcttgtcaggaggcactgccctccgaggggtaggagcgggcgggggttggagggggcagccactcctcggcatcagacaggatcgtgtgaccaggagcagccatgccaggagactggggcccgaaacctggctgcttcacccactttcctttccttctcaggaaccaccagtgctgagtttggtgcctgggcagagacgcggctgctgacagcatgacgagcgaggtgatcgaggacgagaagcagttctactccaaggccaagacgtactggaaggaggtccctgccaccgtggacggcatgctcggggggtatggccacatctccagcatcgacatcaacagctcccggaagttcctgcagaggtttctgagggtaggcaggtctggtgtgctctccaggaggagagcccacgtccaccacccaggccttgacgagcgggtggggcgggccagctcgtaggctttgccgcaaggtccccagccaggagccggctgtcatgctggggcctcctggtgccggaacagagcagctttctcgcagactgttccatttttccagaggcggaaacctttgctctcttgccatgtttgcaaatatctgggctgtgggtgttggctggtctgctgaacacagactcccactttcttgtcctgccaccgcctctgtgccaggctggcagcgctagggccagagcctccccaggcccgcctccctgcctctcccttggcacacaccgtggctgctgttgccccctgctccacccgcgtgccagcctcccaggtgtgctcaccgagtgccctcttccttctttcactgcttctctccacggcccttgtgagcgagaggagatgagtgcatctagtcaagttaacacctttaagtggaggttggctttcatctcaggaacatgtgacccagaaaacggctgtgctgtgctcacgcccaccgccggcgccacccacgccagccaccagcctgtgctgatctgagtagttctgggggctcacaaggaaaggccctttgcagaggggtccctctggcttctaacccttctcttcagtctgtcttctctgctgcttcaggaaggcccgaacaagacggggacctcatacgccctggactgcggagccggcattgggaggatcaccaagcggctgctcttgcctctctttggagtggtggacatggtggatgtaacagaggacttcctggtcaaggctaagacctacctgggcgaggagggcaagagagtgaggaacttcttctgctgcggcctgcaggacttcagccccgagccacagtcctacgatgtgatctggatccagtgggtgataggtgagcctgccgcgcctctctgcactttcctgcccatctctgctcctgcgggtggggggccagaggctcctcaactcctccctccccggggctccacctcaaaggctcatttgtttccacattttgtttcaactcagtatctgctgcgacccatttgggggcagtt

SEQ ID NO: 60243 - DNA, 1315 bp, Bovine  19866881195487
  misc_feature (1)..(1): n is a, c, g, or t
ntctatgctaaaacccttattaaaggtgatttcccttggtttggtttggaagaacagtttcatacccttggaagagatcacctgaagaatctaagccattggctgcttactatcgatcctttgaagatcctttcatcctgagtgaatcaggatccttcagaggaattagaatcttaaggaatgtgaaagaatggattgttttgaagaacagttttaaaaaagacttctggagtctaggtgaaaagtgtggatgcggggaattctctgcaggtccagtggatagactctgtgcgctcacttccgagggcccaagttcagtccctgtttggggaactgagatcccatgagcctcgtgtgcagacataaagagcaatagtgtgtttgtggagagttctggggagtgaaagccagcaggagaataagaggggtgctggggggaggggagcagcaggagagggggtgacggcaacttgaccagagctgctggacctggactgggctgggggtgggggctgcccagtgcccagacggtcagtattatgggggggaagttaagtaactgcacacgacacagggaggcaggcattttaggaactttaaacaagtccattgagaaagtattttttgttataaatgaatttggaggaaacaggtcttactgaagaaaaccacaaggccattcccatcacaaatgtttctggggttatggtttgggcttcactgaagtgacaactgccctgaacctgtctgaaggtgcttcacagcttccctacacagtccacatgaatatccacacacacagatttatcattaggttaattaaccctgagtcaggctagcactagaagcctgctggtattcaagcccatcacactgtagggttttttggaaattctagtatctgtcacagctatattttctggaaactcctttcttcttccccttttaaagttttttgtgttcctttgttttcatatgtagaatctgagttttatttaaaattccagatggctggctggctggctgtccttatttgagtgtttattctgttatttttttttccaccttttttttttttaaaagaagtggctcttttcacatcaatgccgtattttgcttttttaatgtagttttaaaaattgttgatctatgttatatatatagcaaaatgagtagctgttgtacctaattgcagtgtgtgagtaacaaataatctcaccatttatctattcagcctaagggatgatttcttgcagcacagttaaatctgcttcgaagctttgtctttgtcattttgctttgagttaatgcctgc

SEQ ID NO: 60244 - DNA, 1210 bp, Bovine  19866881210210
  misc_feature (1)..(1): n is a, c, g, or t
nttcgagtggctctgacctgctctgtaattacgttactttctacctactgtgccgcggcatttccagttctgctacctctaggggcttcctcgccggtccctgtgacgctgtcactcaagggctttcaagtcagcgatgtagaaatcagaaagaaaagggaaatggtcggagacacagtgagaataaatgctcctgcttttctctctttttttcccctttccctttttactttattcatttaatctccccgagtgagactgtaaggcttaatgaagggttggacagattattagaggctgtagatttggagggggagggaagaaagagccagagagagaaagagagaagataatttgacatttaccccgactgatctaaactgattcggttatatttatggcttataaagtgtttagaaagaattgaagggggggagagaagtgcaacatggcaaagagaacagagagagaaaaataatattgactgccaaacaaaactcgtactttaattcctgactgccttccgggaggggccacacagggcctgggccttgcatcaggtggggttgcctgtccccacctcttgtttgaccaggtgacctccaaaggggccacttggctccatggtcaaggccagtctctcattcaagatgcaaacacaggtacagctaataggcacctgctaaagaatctgcctgcagtgtgggagacccaggttcgatccctgggtcaggaagatcccctggagaagagaatggcaacccactacagtattctggcttggagaattccatggacagaggagcctattgggctacagttcatggggtcacaagagtcagactcagcgactaaccctttcacactttcacctttgacccagcctgccagggctccccaacctctcccacagccattcagctccctcaccctgacccatcgcgggaggcagctcttcaaggctccctcctggctccctctcacccaactctgttgttccccttggcagtctcctcttggccttaccacccaatgtcttcagcctatgtttctccttaactctagccctgtgtgtccaaccgccaactatagttctcctggcccaaatctcaaagaaaactaaccctcaagatgtccaaatcccaatgcgtgattttctcccattctctcaactcagtcattgccatcaaagtctacccagcggctcatg

SEQ ID NO: 60245 - DNA, 1077 bp, Bovine  19866881261172
  misc_feature (1)..(1): n is a, c, g, or t
nacacgactgaagcgacttggcagcagcagcctggcaggagggcctagccgccagcggcatgtgggatcttccccaacctgggaccgaacctgtgtctccagctctggccggtggactctcaactgctggctcaccagggaagtcctgtttgtttttctccagagacttgaagcttagctgctgcctctgggatgagaagagaagagccctttaatcccagagcccaggcagggaagcatcttggtcaatccaagaaccccagctgggaagttctgtttttatgttatatagtgagagactgaggcatagagaagtgaaaggtgggccttagtctcacgaaaactgaccgagtcacaatttgaacccagcctgtctggctcctgagccacggtgcctgacttgatagcactggccccagggcgtggggctgtcaccaccgccttccctgaccccacgggccaaacgacacggtcacagagcctggcagggtttctcagtgtgggacctcgtctgccaagagggcagtttgcgtgggcctccccaggatgtcaggtgtactcgggctggtgggatgggatgggtgcccggggatcaggcagatgccaccccagcccggagatttaaaattcctccctggaaaatcagataatcaaggaagtcaaataccgtgaaatgagtgtgatccttgccagaaacccacagggagccgcagagaatcatcacacggcaagtgcaagagtgtgacccaccccctcatcttataggcagggagactgaggtgcaggacacagcggggagccccttggggggctcctgaggggcagggtctgggcaggaacatgttcagtccctgggctcctagagctcggggtctgctgagagtggtcctctgtgtcccagcaatgttaccgtggtttcgggctgatccaggagggcttccctgaggaggagacttccacgctgagacctgatgttacataggagtcagtgaagctagtgggaatagcgtttcaggcagaggagaaagcaagtgcaaaggccctgagggcatgaagaaagcctgcttgctgcagagg

SEQ ID NO: 60246 - DNA, 1018 bp, Bovine  19866881283931
  misc_feature (1)..(1): n is a, c, g, or t
nctcagtacctggcacagtagagttggttttctgcaggttccctcctcgtgaagaccatccggaagtcgggcagcatttctggaatgccttactgttctctggaacagtctcctctgaggttgccgtcgtcttccgtgtaccgagacagatagtagactcgggacttgttggaacagccttgtggttttgatgaaaagccatagtttaaaagtgtccaggtctaaccctctgcagtctggttcaaccaaacccagatgcacatgggggtcactgggcccctcgtctgtgatggctgcaggagacgctccttgggaactgccgcaggaacccagggagtggacgcctgcagctctcacgctgtcagagttggctccaatgttgccctcccaggatccctcccaccagtgggtactggacagcactaaggagagggctgcaaggccaaggacatttctgctgatatcccaggaaggaccatctggtacagatgtactgtccctgctgggcaagaccagcgtgcacactgataacctcggtctgactgagttgagtttagcagaagtgatgctgcagaagtggcaggggtgaatctggtggcctgtggctgggctgaggggctgcagatcctctgaacttggctgggccttttagggggtgggttgaaactgcttctcggagggagcctgtgggaaatctgagttctcttcagttcagagaaatgccatgtttttcgtttggtttggaggtttggttcttgaagaaagtgtccaggtttggcttgagtttgggttcgtgcactagctcctggaaccaggtgaaatgtgggcttgtctcagtgagcattaatgtctaggtcgatttaggaaaatcattttgcaatccagcaaaatgattgcagctcacagcctggccatagtaagtattcattgagtgtgggacagacttacttattcagcaaatatttactgagctttcagtatacagggcacgctttggggcttaaatacgtcagggagc

SEQ ID NO: 60247 - DNA, 2067 bp, Bovine  19866881318954
  misc_feature (1)..(1): n is a, c, g, or t
ntgctcccatttgtgccttagctttggtccctgcgtgtcctggacagaggctgaccggtccaagcgtgaaagtggctcttggctccttgcttgagattctgggggtggggtggggctggcctcctggggaagcccccgggaagccaggtgcccttctccagagggctccaggttccacgcttcttctcctccctcctgcccatccttcctttcttccttccaatatgagtgccgcatacagtgccaggcccgaccctggctctgccctctcaggcatcataagctggcacccccctggcccttctcaaagctaccctgccctacatgcccctcccagctacccctggcctgtgtgccggggactccagcacagaccccagctttagagatgctccggttgccttcagccccctcttcttggctgaccattcacgctaagcccctggacagacttcccccccccccaggatccctctacaagaggacctgggggtactcattgggccggctgcctatgccaaggtggtaaaaagcctgggctctggaccaatgtgcagatttaagtccctgccccagcctttactggccatgtggctttgacaggttgtttaaccccgtgcctcagtttccccttctgtaaaaatcaggctaagagcacccaggtcggatactcatgagggttcagtgaagtggttcctgttacctccatttctcagggggattcctgaggctggggtggaataaaggcttcgcctgtggccactgtgctgatgagccagcgccaacctgcggccctaaaccaggacccgggcctccttaaccacctctgctccctgttacttcttatctgatgaggcgtgattctctcccaaggctctcctgctggccctggagtcagggatgctgcctggaaggcacataagggtacagattccagaattcctgtctgagccccactcctagggggtctttcaaaggaacccagctctctcccaagaaacctgggtgttagggggcacagcctccatgcacccccccacctccacttccttccccagcctcttctggctgtaagtatttctgcagcctcaaaactcctttgaccaaggcccagtgttaatttgttaaatccacatcgaggtcctggggacccgttgtttatttttgtgaacgtgttggcagagatcacatttggggtgggggagaccgcttattcggtcggaataaatgctaattaataaaagttatttatttgggttggagctcgccgtggccccagggtcaggcacaaactgactatttgaagcaaaaacaaacagagagtgtctctcaacagcttgagaaaggcagaaacgaagaggccgggtttatttgtcttaggaagaatttgcagttaattccctccagactatttagacccttaaattaaatggaataagaaaaaccatgggtgcaggggaaggagccaggaacacttgatcatttggccgagagcagagtttttaaatgtctttggcctgaagtcagccaagtaaatggtatgtgtgaaataatttaatggcagagaacagggcagcagtcactttttctcactgtaatgtagtaagagagagagcgtggctgcctctgctatctgagtccgtttatctttccccggactcagcccctcacggtagcccctaaagagcccaggtaaatggaggtggtttcaggctttattttcaatcccagaacttttactgaacaaaaggaaactttgggcacagcctttttgggacagacctggccccagtgctcgctggcccgaggcttcaagagtatttatttattttccaaatgcttgaagctcaagcgtggaacccccagaggacacacgcccaccacatccacttctcagggggcgattcaggaactcgtggtaacgaacatccggcgcatccactgggaagcaaagtgcagcctgagagtgagccctggctgaggccaaagctgtgggttcaagtcctgggtcacctccaagacacctcctaaatcttccacatcctcaaggcctcttctcagcctctg

SEQ ID NO: 60248 - DNA, 652 bp, Bovine  19866881341888
  misc_feature (1)..(1): n is a, c, g, or t
nctggccctgatcgtgtgttaagggggtgttggggaggggcgagacttgccagagaggtggcggcagcgaagggtcctgggcgcactcttggctgcaggacttccaggctgatctctcctctggcgctgatctctcctctggccctggtctcatcttcctggcttccacctctacttgccagactgggaagtgggtttctgcagccccaggtgatctggcccgacgcatcctgtaaccatctggggcacccctgagaggagggtctgcccatctcagatgttgctaggtctgtcccagtgtgtctctctccacttgtccgactccacacctctccagttcgctcacatctccagtttctccatcctagacttctcccttccctgcaagcctctgggagatacccctggcacgccaagggttaatggcgctgggtcctgacccacagaggttctcttttgggggctttcaagaaagactgctgaggggtggggaagggcttctgcctggatctgactgggaagggggcagagattctgggcttgggttggaattcagaacccgtacctgggcagctgtgtggatccggcagctcttgcgccgtccctggaggtggcagactgaccaccagctgcaccattgatggaggctccg

SEQ ID NO: 60249 - DNA, 977 bp, Bovine  19866881415676
  misc_feature (1)..(1): n is a, c, g, or t
nggctggcttgcctttattgtggagtatatccgacggtgggtccacctccctgcctgctggaagataaccacccttgacctggtcttcctggagctggcagcctgatgggccaacagacctttaacagcaaaataccagctttcacagggatgagggtgtagttcggaaggggcttgaggctgaaggatgctcgtgagttagcatgttctgtggccatactgaggtggcctggtgtgagcagggccatagattggaaggcagtatgatggggagagtgaccaggtggcagctagaaaggagggcagtggctgagtgagggcctggccctgcagggagagccggtgggctttctggagcccctgtgtgttccacgaagcctgctttaccctcctgatgtcaggaacctgtgctctgccctgaagacaggccagcatggccagggcctcttcacagacagcgaaggcaagactcagggggaggtgacgtcaccctcgcaaggacactggctggtggtcccaggtttctggctccagacctcagctcagaccatgtgccaggccaggctgcctctctggatccaaacagacctcagccccccaggcccccaacgtcttactcttgccaagaccctggcagcacccccccacactcgctttctgtctctgtaggttcgtggtgtcctgtacccctagctggttttgggggccagtcgtcaccctggaagactgcctggctgccttctttgctgctgatgagctgaagggtgagtggatcgggcgggaatggggctggggggctgggtcagcatacggttcaaggttccgggacgcactctcagcgtctcacccctgcctgcggactgggtctgggactgcacactctggcagccccaccagcctgaagcttttaggggttcccctgttttcctttctttacttatttggtgggcaaaattggatagcattctttaattttg

SEQ ID NO: 60250 - DNA, 1059 bp, Bovine  19866881667366
  misc_feature (1)..(1): n is a, c, g, or t
ngtttatctagtaatttatatgaggtctttaaagataactttattagttacagtattatttatgtattattttctcagtttgtcaacgttctaacacacactaaaagacgtgcagagtgttccacgtgtgtgatggtgcggctccatgtatgtgcaccgtcttctcctcgtctaggttccttgagctcacgtgaccattccctaggcagaacattttcgtccttctttttattctgaaactctctcccttcctatatagtttgagagtttcttcctcagaaagaacgacttaagtaaaaataagacacagaggccctctcttttcattgaaagaaatcattagcaatctttacactccttgctgtgagaaaaaagtatgctttatgctagtaatatttgctgttttttctacatatgtaaataaatctcatacgtatatattttaaacagtgatctggtttcaagtgtcattacttagaaaaaaagaaagtcattccacgtggtgtctttggcagttacatgcactaggttatttagagacgatttcctttgttgatgctgagtgttgccatttattaaattgtgttcgtaatagaacatgtccaatttgcggcttctacagctcaagagtgtttggggttttgaggaattgcaagtttgtaagatggcatgtggcctcaccattttgtttatttgtttgaattatttgatgttagatgagctagagtctcataaagtgataccgtactatacttatgagctgaatcatgcaataatatcttttaaatgattcttcttttagaaagtggaaagtctaaaagaagtaccgtggattcaaaggtaagaactaaccccaacctgtgcgctctcagcttttccaggtgtgtgtgctcacgcgcatgtaggactgtccttgtgcatatgtatacacacacacacacacatctgcatgctcagtctgcaggcggttgccttctgtttggggagagaacttggatgctctgaaataatttcagagtaagactgagtgctgagttacacagcccttatgtgatagaa

SEQ ID NO: 60251 - DNA, 843 bp, Bovine  19866881908761
  misc_feature (1)..(1): n is a, c, g, or t
nctgggctgaccccacaggcccctccgggcgtctccacgcgggccgggccggcttcctcaggagggcgcaggcgtggagcccccttgcttctctcagtgcttggcactccctcccatcaggagggtctgtgcttgtcctaaaccctgtccctggttccactgtgggctgaggcttggagtcgctcccaggggaagcgggggcagtctccctgcagagagaggccttcccccgctggagcgcttgcggccacctggctccaccctgcaccttctgacaggcggatccaaggccctcccctcgggctgccctggtacttgaatcacccacaggccgacggggctgcccagaccccgccccgcagcccggacggtcagagatcgtcctcgacggcgccactgtgctcgctgaggaggtaccacttgagcctgtcgggcagaggcagggccttgaccttggcgtccacgggccacggctgaaggcagaggcggatgcacacgcggcacaggtgcttgaggggcggtgggtagctctccagctgcctcagggaggagtgcagggcctggatcttgtccgccaggctgcccacggggtggatgtcgaagctctcgggcagccgcagcttctgggagctggtcaccatgaggtccagcacggtctcggccttgcgcagcaggtccgcgtggctctcgtcctccgcgcagcccgggtgggagcagagcctctcgaagacgatgtggaagccggaccagcaggacgcgccgtgcagggagcagttgtaggcggctcccgactccagcaggaagcgcagcagggggaagtgagacttaagctcttgaggcaga

SEQ ID NO: 60252 - DNA, 1565 bp, Bovine  19866880369501
  misc_feature (1)..(1): n is a, c, g, or t
nacctaggttcaatccctgggttggaaagatcccctggagaagggaatggcaacccactccagtattcttgcctagagactttccatggacagaggagcctggcaggttacagtccatggggtctcaaagagtcagacatgactgagtgactaagcacagcacagcacagaatagttataatgggcttccctggtggcacaacagtaaagaatacacttgcaatgcaggagccacaggagacacgggtttgatccctggattgggaagatgtcctggaggagggcatggaaacccactccaatattcccaaaccacagctgccaactttaagctcaatacagatggtatcaactcttaccctctctcatagtcagataatcaggggacacctatggatgtatacttctcctagctctcagattcattcactccatttttctctcctgaattcttctaggtattttccactaatatgttttagtatggccccagggaccatgagggctttccaggtggcattaatggtaaagaatccatatgctaatgcaggaggcctggattagatccctaaatcaggaagatcccctggaggaggaaatggcaagccactccagtattcttgcctgggaaatcccatgggcagaggagcctggcaggctacagtccatggggttgaaaagagtctgacgtgactgagtgactaagcccacatgcagcagggaccacaaaatagacaatgactttttaaatataatattttaaaataatattgaatgcttcagataattgaccacaagacaagggtaattatcaggatacaaaattataaacacaatgtcatcccatcactttaaaaataaagtattacatatataaatattttaaaaaggaagacaaaatacaccaaaatataaacatggttcatattgatattaacactggttttctctgggcagtgagttgagagtgacttctactgccttttctcaaatccaagcccagattccatgccatcacctagtcaagtcactgtcgtctctcacctggcctctacagcagctcccaactgctgtcctgcagctggtcttgccaattcactcaccatgtaggaccaagggggatcttcttcaaatgcatatctgggtactatggagacaggataacaaactggtaccagctgctggctccttccatgaaatccaacactagagattccccagaggcagaagtgagcttaatggacacttactgaatcccaatactcattgcaaaaactgtttgtttgcatgcttgtttgttggtagaagtccagtgtgttggttagatcttgggaagtgtagcaagtgcagagagtgatagccaacagcaaacaaggattcgcaactgcagagggtatattagttttctaatatattgacatgtaacattaccacagacttcatctaaaacctcatgcatttattatcacccagttcctgtgggccaggggttcaggcgtggcttagtagtgtcctctgctcaggactgcaatcaaagtgtcagctggattgcattttgttatgga

SEQ ID NO: 60253 - DNA, 3096 bp, Bovine  19866880427752
  misc_feature (1)..(1): n is a, c, g, or t
natgcatcaaagtcccatcagctgagacttgccctgtgctctctcacctgggggtgcctttctgatctaggaactgctcaggttgtcttccatatcatctctgtcagttccgtccccagcttggctcaatcagcagctataccaaagctttgtactcacccctgcaatatctacagcttcatgctggttcagtccaatttgattcttttggctgattctccccaccctgaggagtcttagcaattgcctttgcatcaaggattagcatctctgttcctgaccaccctaacaatccctcttactttcactcactccagaaactgcaggagagggttataacccaaggctatcctggccattggagaagttgatttggagaggaatagaatgctgaaagggtttgtaaagcaaaatctcaatccagagatgacaggggagagagattagagatgatatgagaaacggaagaaagagaaacaaggcgtgtgtgtgagggtagaagagttgttgggcgaacagggtagtgaatccatcctcccaggtcatactctgttcccttgagaacaatacatctcactgaagcaaggttgtgtctctggctagctctgaacagaagtggagatcccagtctcatctggtgctacccaacacaggacgtattgatacatttgatctcttgtgatttaatttggaaacagagttaggtattcagaaccattcctgagcttagaggccaaaaaatcagagataatatcaagtgatcttttaaaaaaaatcaccaccagggttatgttgtgggagagtcaaccactgtatcagttggcagtgtcaaaattataaaaacaatcatggcagcaaaaaccctataacctcattcacataagaggttatagaagtaagtgccttcttctccacttcgacacccccctcccttagattaacaccctttgtgatttcttgaaaactatgctggatgtttactaacccgattttacctatataaacatgtgaggggagagcagttaacatcttctcccctggaacatccagaccaggaatggacaaactttcactatcatagatgatagtttatctggaaatctaaacactggaaatctctcaacactgtacatatgctaagtgtcttaagtgttatattcatttgaaatgaacatatctaaactccacacacagaactggtcggatgttccaggtgagcgcttctctcctatagccacacgaatgcaggcacctttcttcagtcactgcgtctttctcttctcccctctccccctccccagcttccctgtgtagagcctctttctgccctccaccctgggcccagaagcagcattgcttgtagaacgaagtgctaagcttacctgcacctttctctgtttttaccctgcaatttggggaagtgacagaactgtcataatgtgtatgtttaagtctctgagttttaaattcaacagagggggaaaaaagatgaagatgagaagggtagcagacacattttataatttttcaagatattagtcccatggcctcatttttttcacccccacctcccaaaattcctgcataacaactagatagaatgataagcagtgacactttggaaggcagccagtctaacagtattagagagataatataattttagaactggagggggcctcagacctgatttaatacaatgctctcatgttaagataaggacagtgaggcgcagggaggtgttgtgacttgctcaaggtcacatagggagtttggtctattaccagccctgtggacagtcaaggccaggctatctagactcgggcgggactcaagtagcaacagcagagtctgtgcagagggttcgaggcaatgatgaagtgaagggcaggggctggaagaaaagaagccaagagaggttgcagaggaagatgctgtagccgcacaatttcaatccgaatggtcaagcctgagacatctgggcgtgagaggtaccagatgggcttgggatgggcagcaatcaggcactgggaaattcactgggagtcaaggcaaccggaagaagctgagtcaaagaggctgattttgcaagcagcatagggctctgcatacagaagctgcagctgcaactcaaggacagcatttagatttacagagtgtggataggacttttggtcagcgtcagtcaccttagccaggcctgtgaatcacagccaaatctagatgagttgtattattgactatgataatgggagggtgaatggtggctctgactgcctgcatggcaatcaacctttaagatggctagaaattttgatctggccagcccttggcctggagaataatgtcccagagacacagtgatcaccgtgaacggaagctacttcaaagacaaaggccacgacacacagccctgtgatggaggagtccactttgtcatgggtcagagcccaggttaagcacagaccttagttggggaggggaaggggggatgaggagagtgatgacctggagaatgaagagaactgagtggactgttttcatctcatggatgcagaagctatcagtggggcaggagcaaaacatcggtgctatggatactaagatggtaaacccctaaatccttttacgtctgacagtatattcagaagattttgtcacagatcctgagaaagtcacttaactttgctatgcatcaggctaaatcaacacaatgcagaaacatctggatgaaaatgaaatgcctctgtcagtagtctgggtgttttgtcgacctgacatcaaacagctggatccttataaacatttggatgaagcactgaatttttcatttttcattcagaacacaaaatcatagactctccggcttggcaggaacttaaaggtcatctaatccctgatatctggcatagcctcaaatgacctgttttgtgttattgtgcacattaaacgcttaagatatggggatgtgttatgtctaattatacatattgtatcttatttaaacacatgtttattttaacattttgttctccttggctgtttaattgaattgtaaatgaattgtttacagggtagactaatttattatatgta

SEQ ID NO: 60254 - DNA, 1408 bp, Bovine  19866880433719
  misc_feature (1)..(1): n is a, c, g, or t
nacccatgtgatgcatatttgtatctcagctcccagaaaattatcaggctcaatgcagacatgacagatggaaaaaccagcctttttaggacttaaaggatttagaagctgcttgtggcatgtgccacagttttgaaacgcataattttaaaagaccgttttctttattatcaccagaagatgcttaggaattatacctgtggaacagtgcttgtgggtacatttttcaatctactgcagtgtcagggagggtttaccaaagttgaaaagacacagtccaggctccaaggaatctatggtctaatctagacagatgaacttgtcattttattacagagagagaaaacattacttaaaaggaactagtataaagtgtctatgagcacaagaatggggctttcccggtagctcagcagcaaagactccacctgctgattcaggagccacaggagaggtgggtttgattcctgggctgggaagatcccctggagaaggaaatggcaacccactccagtattctttgccgggaaaattccatgaggagtcgtcctcgggctacagtccatggagttgcaaagagctggacatgaatgagcgactgagcacgagtatgagcacaagaagagagtgactgagtgtgcatggagtgagatttggccatcagggaagactctgaagaggaagcaatgattaagggcagccatgctggggcaggagggggagtggacatcttgtgcattacatgtaaatgatctgtcatctctagtagctgggtaacactgggtcactgacttgccatagtgctatcagagatgaggcaagagaaagtggcagagaccaagtggagaaggaattggggtcaaggggtcgtgtgcagtgctgttccccaaactaaaaaatgaacacggcacacttgccctgctggtgcagcttcatcctgtttcctcatctcctccctcctcccaatcgattgctacctgatgcctcttcagcatacaaattctggaatttccactgcttggatgcctctctgcagaattctctccagtatgtggtaggagccacagtagaattttcagccaaggaaggacttaacttcaccaatacgtctattcccaacaaaccgcaggtgggacctgttggaaatctggaacttcaagggctgccacttagctcccaggtgtcttaatatgaattggaaaaagtttccccttctttgagatgctttattccaatagtcagaaaagcacgtaatatattgctttcattagaacacacactttactgccaccttccagaaaattactattctgtatacaaatcgagaatgtgtgaaatataaatggaacccccttcaatgcatcattcttatagtatgcaaccttcacaaccatacatagcaatccta

SEQ ID NO: 60255 - DNA, 1452 bp, Bovine  19866880445079
  misc_feature (1)..(1): n is a, c, g, or t
nttcttgtctctttgttagttttctctaactttttcttaagaaagatctcaaacatatgtgaaaatagtccgaataataagtcctcatgttcccaactgttaccaacaaatgttggcccctgcgggttctttttaaatattatttatatcactttttaaccccctttgaatatgtttttacacgttgtaaataataatataatgcacttaatataattaaatatatgtactgaataacactaccatacattttataatttgtagattagtaaacatatacacattggagggcatgctcaaacatgtgacactgcaaaaagaaagtgtggctagcagtgatctacggacacaagtgacttgtcaaaacagaaatagagtgtctgggttctgggttcaggttcggactccattgtttctcagctgagggaccttgtacctgtcacgtctcttctcttcatttttctcatctctgaaatgggtctaccttcctctcagcattgctgtgttgatcaaatgagatcaggaatgtgaaaggctttgcacatgaacctcatgaaggtgtggagcaaatcagaccaacccaaggtggggtatccggtggcactggcattgaaagcagaaatccaaggtcaggaagttcagttactgactaattgaatcatgtttctctccaacataagagaaaaaaaaaaacatgaaccaagaggcatgaaatagagaatcagttgccaactggaacaatgcaggctttaaaatatggcccctttgtcctctccatgggcatttgaagtggtcacagtcacaaccaggcccagaatccctcaggtcagtcaggcctgatgggacgctgaggtcatgtagtaagtaagggttggaggccaggcctcattttatcttcccagtcccccttcttttcacagcctatttggatgtcttctttggatgacatccccccaaaactttaggtgaagaattccctctccagccctggctcactagctggacaatcccctggtcaccttgccagccaaaaggaatttagagacagtcctctgttctcaacaccatgggttctattgtttaaattgtatttataatgtttttcaactatcctctgtcactgtgctttattagactagtgactccctcccctgtgtctccaaggacacagcaaaggcaggactggccacccactgtaagtggaatcaagatggcaccagggctgatttccagggccagtggaaatggcattgcacactgtcctctcttgatggccacactgccgcccagctcatacccagccctgtccactgctgcccaacctgtccccggactcctcaggaggatccgcactcccctgatctccatccctggaggacgagagtctccagcgggacccagcacttgtctgaggttgctgacctcttttctaaggggctccctgcctctcat

SEQ ID NO: 60256 - DNA, 1840 bp, Bovine  19866880472765
  misc_feature (1)..(1): n is a, c, g, or t
ntctccttcagaatggactggttggatctccttgcagtccaagggactctcaagagtcttctccaacacccaccattagggccccttgaaaagaccaaacagtggtttccttaagttcaaattttctttttccaagctgtacctattaagaagctacattttcccaacagaagaaataaaaaagcaaggggaagtttagtttgcttagaaacaataagacctccttctcctctctctcatgtaacagcccccacccttcctccagtaaatctacaggtgatatgtcatttggcttgatgacagccttggagatgatcttctatttgcaccttcttcacaccagaaagggagctttgagtctgccccagggctctgatatcttgcgtgtgagttgtttgagataactctctggacttagtgtgataaatctgtcctggaagcttctgctttgactcaagagaagccacataaaagctttccgagtaccattgtgtactctccacacagtttcaaaagcatcccaagtggaggatacaatatattgttttaattacaaggggataataggctaaagtaaaggagttttaccaagaagaaatgagtctcacaaaaggagcaataaaagctactgctattgttattactggtttcattcaggcctagacctcagtaagtttgggacggaggccaacttgtacttgaaagccattcttccctgccccatacgttccattcttctctgggcatcgtttctttcctcctctttcatgattttcagccaccagaggagcccagtcctttctattgagaagaaagcctgggttaaattcatttatacaaaagtaatagggatgtaatgtgttactcctcccagaggtatttacatttcaaaactttggcccagagagggtaatacttaattcaaagaagcaagcctctgtggtgggactgtaagccttctggaagcaagaatttcaagagagattttttgagaggaagataccaaggggataggagcttggacaatagtcccttatttttaatgccaaagcataacggcttaacataaggcatttgagtaggatgaaattggtttcctcatttccccatatcaaatttatgaaggtgcctattggccttgcctctacagaggtacggccctggtttcactgactgctttctaaatcagaatgactcatttgagaagtggtatagctcagctcaagacaattcacttgaggatgtaaattcatgtcaaatagtgatacaaaggagtgaaatgtcatcattaccttcaaagtatgaaagtcactcagtcgtgtccagctctttgcgaacccatggacaatgcagtccatggaattctccagaccaggatactggaatgggttagttgttcccttctccaagggatcttctcaacccaggggtcaaacccaggtctcccacattgtaggtggattctttaccagctgagccactaggggaagtccaagaatactggaatggatagctgtttccttctccaggggatcttcccaacccaggaatcaaacccggggtctcctgcattggaggcagattcttttccaactgagctatcagggagattataattcccttgggagagagtgatgcgtctcctcagtctaagctagtgcattactgagggccattagctttgaaacatgacacttaaaaacaatcttctgtttttaccctctgctcccttgtagcaagattgccatttctctcttttttaaaaatacttctgggccagcaggctgggtcttagttccccatcaaggactgaacccatgccccctgcagtggaagtaca

SEQ ID NO: 60257 - DNA, 1682 bp, Bovine  19866880502605
  misc_feature (1)..(1): n is a, c, g, or t
nctggacactactgaagtgagatagcagcagcaggagcagcagaaaattgcgaactacagtttttacagggcaaaaaaatgtttaaagaacttagtttaaataacaaagttaaaatacatgtattaacaagagattcatgtaaaaatagaccatcattgtagtgagaaatagaaattccttgctccttcagaacaaatgaatacagcttcttcattctttttaaacagcaataaattaggagaacggactcacaggtgggtaggctgagaagataacctttctggaagtggccaacagattaaatgcccccaattctaaaggaaataaaaaaaaataaaatcagttaatcctaaaggaaatcagtaccgaatattcattggaagggctgatcctgaaactgaagctccaattctttggccacctgatgggaagaactgactcattggaaaagaccctgattctgggaaagattgaaggcaggaggagaagcggacaaaagaggatgagatggttgaatggcatcactgactcgatggacataagtttgagcaagctctgggagttggtgatggacagggaagcctggcgtgctacagtccacggagatgcaaagacacaactgaatgactgaactgaagatcttaacactactttttaaagctcaattattttattttcttctttctccaggcaactttctgaaaaacctctaattgttgccaaagacctgtgggtgcttttaaaggagtctgattaggtgatcaaggatagtcagagatttgcttgagttcagagtatttgatttttataattgttattttagtgggggtaaataataaactggagttctatgcatttcataagatgtgcaccatgtatgtgcccacccacgtaccatcctcttgggagaaagatcagccttgagcaacattaagaaccccaacaatgaaagtcttagagtgtctgttatgaacagagtacgtatgtaataatacaactggcattttagtgggatggatggaccattttgtcttgagtcttctcccttctaaccaggatatagaagggagcacagaagacctgagaagggcctcaggaatcaatgtcagctgaggcaaggaaggcagaaaccagcacagggtgcatctgccgtggactgtctgaaatgcctcttccctgagatctacttctgcctgaagcttgcagctcatcagagcagaaagaggcagcagagctaccggtgggagcaactggttttggtaaacaatgaggcaacttctccctcaagagagcaaatcagaggcgaaataatatacgatggagagaaactctccagcagttacaagacagccaggaaagggctgcctctcttgactgaccttggtggctgcagaggctgaatttttctggccttgataaaagggcagaaggattcaggtatgatctggggcactcagctgctcctggacctgcgtagaagccagcataggcagcagctatacctagggcttccctggtggctcagacagtagagaatctgtctgcaaatgcaggagacctgggttcaatccctgggttgggaagatcccctggaggaggatgtggcaaccaccccagtactttgactggagaatcctcaggtcagaggagcctggtgggctacagtccatggggtcgcaga

SEQ ID NO: 60258 - DNA, 1168 bp, Bovine  19866880512717
  misc_feature (1)..(1): n is a, c, g, or t
ncagcttctgcctctgccctactctactccagtcttaaccccgtcccatttatctcacccaacccaaggctgttagtgtgatgatcacaagcacaggctttggaggctagctgtgtgaccttgaacaagtcacatagccttttagtaaaatggatccaataaacacctacctcttggggtattgtgacagtgagtgagataatgtacaaagtgtttagtatcgggcatgaaacatggtaagtgaacaataaatggtggctgttatcactcttgatctaaacaacctctgcttcttgctctcacctccctagttcttgactcccccatcaatcttagagttagttttgatcactatctccctaaacctgcagcactttaaggtcaagatcttaatgtctatctgtggcatcctatttagttccctacatctaataaaaactgcatgctcaataaatgctgggtggtggaatgggactaatactctgacttagataaggtgtagtggggctgattcccgggctcctgagtcattacctacgatacaactcctctttaactgggcttctgattgagttccattctggtttcccagttctccagagaggtctaaacattttctccaccaaagacactgcagtcctatccctgaatcccatttcagtctggggctaaagcccaggaacaatcccaggcatcagtactctgcctcaggttctatatggcccatccactaatggatgacttaaactccaattcttttcatctctgtcagcacctctcccattgaggtggacaatggtcattttcttactcttaaataaaatgtattttttaaagtatcactttatttaatggtttatgctatacaatctaagttaaaacagtgctctctatgcaaaagcagtttcaagacaagaatcctaacacctatgcagcagcctcattggaaggccatgtggcatctatgaagagccaactcgttggaaaagaccctgatgctcggaaagattgtagtcaggaagagaaagggatgaaagaggatgagatggtcggatagcatcactgactcaatggacatgaatttgagcaagctctgggggatggtgaagggcagagaagcctggtatgctgcagtccctggggtcgcaaagagttggacatgactgag

SEQ ID NO: 60259 - DNA, 1297 bp, Bovine  19866880557318
  misc_feature (1)..(1): n is a, c, g, or t
ntgggttgctgtgaggatcagatgatatatacatatcatttacataaattaacatatgcagtagcaggacagtgtttgaaacataatgctgtgtgtgcatgctcagtcgcttaatcgagtccagcacttttcaaccccatggtctgcagcccgccaggctcctttgtccatgggaagaatactggagtgagtcaccatttctttttccgggggatcttcccgaccagtgagtgctacatgtacttgctattgttatgagagttagagttccctctccccttatcttcctaaacataatgcatctgaattctcagggatcctgctttccctatttccactccctgacaatctctgaaaacatctaaattaaaaagaggccaatcctttctgggtaagtgggatttggaaaaaaggaaaatgactctgccatacattacacatcatagggggaaaagtttggtggaaagaggtgaggtgatgattcaggaaagcagattgtagtataaattcagccccgtgggacatgctgtccacttcagtgggtgtctgtttcatcatttctgaagggagtaatttggaacagacggccccataggctcccttcagagttgacattttttgactgtgttctgagttactctgagctgtgatcactcaaaatttttaatttcaagcattctctttagagcccaatcataaggaatactctaatcttagattctgacataggccatgtaactatgtgcccatatgccaggttcccttcaacacaacaaatcacaaattatgtgttaaacttttaaaagaacaaaatgtatcatagtttttattatatgtacatgatgattggttgataacataggaattcatagcagaatgccaaataaaaatacacacgtcatataagctaatctctatttagacagttgtatatagctagctatataaatctctatctacttatagatattttatgatgcatatatctagttatatgtaggttagataaatctgagatacgtttcagataccaacttatttccaagatcctgtgtcactagaaacatctagaatagtgcacttaagaaaaagaaggaattcatggttttaaaaattttatgaaaagtcacatgtgtctatatataaatatagatgttggtattaaaaagcagagatatcagtttgctgacacatgtctgtatatatagttaaagctatggtttttccagtagttatgtacagatgtgagagttggaccataaagaagattgagtgtgggaagaattgatgcttttga

SEQ ID NO: 60260 - DNA, 983 bp, Bovine  19866880709937
  misc_feature (1)..(1): n is a, c, g, or t
ntggggaaatagaaacctcttcaggttctcgctatagcaaaggctccacctcccacatctcatttctttctctcctttaccttggctggcattatctcgcagcctctcatctccagaagcgaggatcacccctctcctttgatcttcgctgctctgatcgagaatcgtgtctttttccctgcctcccccatcagtacttcctccttcctcctcctaatccacctcctcgctcctgctacagatgagaaattctaaaccactcctttgaaataaatattcctagagaggctacatgatatgaacaagttcctattgaaagcgtcaggggagctacacctgcctcttagattctgacagtgtgtaccaggaactcattcagcctgaatcagaggtcggttgtcggagccggcttttcactgagcctcgcagttcagttccactggggaccggcgtggaaggctgatgcgcgctgtggttggaagccgctctcggttgaaagtccgtttccaagcgcggaggaatgctgggtggccttgtatcccagagggacgttctctcaagatagagcctccaaaggcacctttaggctctgcttttagagcacctggttccttgagaggcaactcgatgttgcaggatgtgcagtagtgggtgatgaaagcacaagggattccctcttaaaagttttcatgatacggccgaagttttttgtttgttttgctttttttttttggacacacctgccctctgcagtgaaagtgcagagtcctaaccactggaccaccagggaattcccagaagactgaggttttaagcttgagctcttctgtttgctagccaggagaaagggaaagtgttagtcgcacagtcttacctgctcagtcttgtccaactctttgtgaccccatggactgtagcccgccatccccctccatccatggaattccacaggtaagaacactggagtgggttgccatttcctt

SEQ ID NO: 60261 - DNA, 3019 bp, Bovine  19866880824130
  misc_feature (1)..(1): n is a, c, g, or t
ntaaaggaaataatcttctaacctcacatctcccaatttggggtgaaacaagccctcccccaacctcccactctcaccattcttcccaaagttcccaaagagaccaggaggaaagcaggacagagggcagagcaggagtctggctggctgggccagtggggtatctgcctgttcatctaggggcagtcaggtatttatctgaaagggacgctgcaggtgggtggagaacatggtctgagactatatcagggagttctgcccccaaatttcaggtccccaaagccatcccaacaagtgacttctttctttgaggccccagacagcttctccttttagaaggcccctatgaaaatgcaaatatttctaggatgttaagcctatcagctaacactttccttatcagccatagcacatttgttatcagcaaacaccttggcttaaattatttgacaactttccaagtgtgtgtgggaaaaagaccccgctttgtccctggtaggggaaggtgaagagtggagataggtttggggaatgcaaagtgggaggagagacttgttagacgagaccaaagataagtctccactaacttgaccacttgccttgctctgaactcatgggagaggggtgggtgcagtggcgggaggttttgtgtatatgtgtgtgtgtgtgtgtgtgtgtattgtgtaatctatgtaaggacttctagaaaccagaaagcaagttctgagaagaggattgcagggaagttagtgggacctgagtagaatgtatagattctcaaaggatagttgatttgttgtttagtggacttaatttttaaaaaatatttaaacagccaggttgctctcctactatccaacttgttcttgcttcccttataaaaggttatttgaggggcttccctggtagctcagtggtaaagaatctgcctgacaatgccagagacatagattcgatctggggtcctggaagatcccacatgccacagaataactaagcccatgaactacaactattgagcctgtgctcaagagcccaggagctctagagcacaataaaagaagccactacaatgagaagccagagcaccacaaccaagagtaacatccccctcgctgtgactagagaaaagcccttgcagcaatgaagatccagcacagccaaaagtaaataaataaaattagatatatattaaaaaagactatttgacaatttacccttatctactccagatcacattaagcacccagtagaattgtaggacagtaggcaaaatgccgggctggatgaagcacaacctggactcaagattgccgggagaaataccaataacctcagatatgcagatgacaccacccttatggtagagtatgacgaggaactaaagagcctcttgatgaaggtgaaagagtagagtgaaagctggcttaaaactcaccattcagaaaactaagatcatggcatctggtcctaacccttcatagcaaatagatggggaaacaatggaaatagtgacagactttattttcttggactccaaaatcactgcagatggtgactgcagccatgaaattaaaagacgtttgctccttggaagaagagctaagaccaagttagacagcatgttaaaaagcagagacattactttgctgacagatgtctgtctagtcaaagctatggtttttccagtagtcatgtacggatataagagttggactataaagaaagctgagtgctgaagaattgatgcttttgaactgtggtgttagagaagactcatgagagtcccttggactgcaaggtgatcaaacatagtccatcctaaaggaaatcaaccctgaatattcattggaaggactgatgctgaagctgaaactccaatactttggccacctgatgtgaagagctgactcattagaaaagaccctgatgctgggaaagtattgaaggcaggaggagaagggggaagaagaggatgaaatgattggatagcatcactgactcaatgaacgtgtgagcaaactccaggagatagtcaaggacagggaaacccagcatactgcagtccatgggggtagcaaagagtccacacactgccaaactagggcttttagaccagggcttgtttccatttttgagaaaccacaacaatgagaaagtttaaaaataaagttgtcttctttaaaatatgtttacatacaacttcataggacaagaaaagtaaaataaggtcaagggcaggagggaaaaaaagtcaagagcagagataattgagaatattttaagtaatcaagttagaggacccagctaatttatatcacatacaatgctaatcctgacttcttttagttataacatgtgctgaataagagagcagtgagaaacaggacaactgggagaactcttcaagatgaaactagattccttgggggagggaggggacagagccaaaagtccagaagacattaacattcaatgtacttgaaatatattcaaaaaagtgtcgagatggggaaaggaaagaaacaaggaaggaaggaagtgagcagaagaatggagagagggaggcagagagaggaggaggaaggaaacaagactgaaaaaataaccttcttggtagtgaaaattatttcagctttttgggtttttcaccatgaatgatatgatttcactttaaaggttgattagaaaatacaataagaagatacaaagcatgagaaattaaaaaagcatttgatgaagaactatgaaactcagcagaagctctctattaacagagaaaatgaaaaaattattattatataagaagcaaaaaaaaagtgcagttatatttcttgtctcaaaccaaagttagacatccaaagccaagctgccatgatgcccatgagtcctgcaataaagaacattgacagataccagactccctcctcagtcagtcattctactgctctgcctttatgtacaaaaagatcaaacaacaacgagttggattttctaggttatttaaagagattgttgt

SEQ ID NO: 60262 - DNA, 1580 bp, Bovine  19866880832894
  misc_feature (1)..(1): n is a, c, g, or t
nttggctccctgctgttgcagaacaaactgatgtggtttgcaaagctcttaacaatctggccccgcactttggctctgcaagccaagctcccatgaacctttcagtccagctgttgtagaattattttttggtcttcaaaaatgccagttttctttctcacctcaggtcttggctcatgttgcctggggtggactgctcccgttcctctgtctggagaacttctgctcactcttcaagagatcatcacgtcacctcctttggggagcttccctggcacttttactacttgctcctttttcggtttctacagtcttctgatcttagctctgctgcagcccttctcacatttattttgcttgtgatttattttgtcatgtaatttattttatggtgagtgaacagacactgagatcagattgcctggattcaaatcctagctcaaccacagaaatgttggatgaccttgaacaaagtctctgtccttgctttcctcctctgtaaaatgggaatataacaccacagttactatgaagattaaatgaactgtatattaaaggtttaggtcactgtctggcacttttagtgttagttggtatcattatcagtagctgtttgaagtcgcctgtcaaggttccatccttttcaacctgtgcttcaaccatcatgatgtggcctcttgcaggcccatcaataagtcaatgagccagacctggaagtgagtgagacgctctgtttgcacccttgtgtggaggtgaatagatgctgacatgcatggttcctgatttctattctatgttcttctagaccagagctccaactggatcccttctgtagtcctttccagctccttccaacatgctttgcccagccccctcaatccagatggactccttgggtatcaaaatgtccttgtagactcagcaatctaaaccaagatagcatttctcctccaactagttctccatgcctgtgggtctcccttctggaaacatcacccagttgattctcagaagagtctgggagcatctggagctttattataccactaagttctggtctacatgctatgtttgagtcactcaaatatctagttctcagcacagtaccaaactttgtgcattttaaaaactagacaaatggatgatggaacgaatgaataaataaatgggatcagtgatagagccatccattagcattaatgctccctatgctttcccacagtgtagtggtgtacgaggttgactgtacctggattttctgtaactaacagctgaaagcatcctaattagaatacacttccaaagcatatgctcatttctattgttcttatctggaattctcaacacagtgccaccatctggaataaaacaggtctaagaacatattttgggctcccagactgctgggaggggaacacctccaagagcagaacagttgggcatccaagacaaacttcaacttcttccaagctttggcttggtttggagagaaccaatcacttagaatcatagtgatggtgaattttagagcggaaggaatggtgaatgcaattcaacccaattccttcctttaaccaaga

SEQ ID NO: 60263 - DNA, 1853 bp, Bovine  19866880837794
  misc_feature (1)..(1): n is a, c, g, or t
nagaggctgtagtgtgggctggttaagagctttcacctcaggctgacttgggttttaaactcagctcccacttagctgcatgatttaggacagtcacttactccttgaagcatctggcgcctcaactgtaaaatgagaatagcagttcgtatctcatgaggttattatgtgtattacatgagacagtataaatgtagtgtttagaatagtgcctggcacatgcaaatactaaatactcaataaatgacagctgtcatcatggttgttggtgatgacctttcctgttagcattttctacctacacaagtgctgttctcctttcagtccatggcttgctcctgtctctcttcccctgaagtcatcaacccctcttggaactgcccaaaacctacttcaaggcccagttcaatctgatccttcagattattgcttgctactccaaactctactcattgctttttttttcctttcctatgaaagagttttgtgtcatatctgttatacaatttaggaattagttgttattaatttttatgcttcctcatttggactataaggtgcctgaggagggactatttcttcagccgctaatgagattctcgctctcagtaatttggcattaagacagatagtaggtgttttattagtttttgataactcagaaagcaaacaagtaaaagtcattattaaaatttaaatccaggggtttcttgatcacctgtatggtctccttcattaatataaatcaagatttatcctgagaaaaattatttattctaaaacacagcacagagaggagaaaggcgtggtgattgaagagttccaaagttaagatcagcactgtttgttaagttagtgtctttactgacacgaatgaccttatttttgctttcctcatcacttcttggcctctctctgctgtctcacctctttttccaatcccagaggacctgctgtcctcgggaagccctctgaatatctccttctagcttgagtttctgaggaaaaagtttctccaagtttcagaattaaccttttctgtgttctccatatttcctcagtatagttggcagttaagaaggatagaggtctggccagataaaattttaaagtgacaaagggccgaccccttattatgttccttcccaagatactgggaaagtgacatctcaaatccaaaggtatgaatgtctaatgacagcatttaaaggagtgtattaggagagttgaagagataccagcgagtgagaagtgatgtgacaataagtgaagtattgaggagatggccttttcagtgctcctaaaatctctcttaaggccaaccccattgtggataatccagagatgcacaaatgtaataataataaccaaggtttattgggtacctacagtgtgccaggcactcttcctacatgtctatatgtagtcattcatttgttccatacactatcattactccattttatggaagaaaaaactcaaccctagagaagttaagtaatttttctaaagtcacacagccctctaatggaaagctgggattcaagccagacagtctgactgagaggctctccaccgagaaatgcttttttgattcatgattctccccttgtaaacagcctggaaagaggcaacttcatgataaaaacctagatatcaccaccatcatcataatcatcgccatcatcacagcaaacaaggtcctatatcactgtgtacagggcacagcacagaatgctcagaggacaaagaggtatccagccccaccgcgtgtctgaacttgaccccttaacccttcagattgcttcaaatgcctccactaccacacagcagtttctgctcacctcacccga

SEQ ID NO: 60264 - DNA, 1655 bp, Bovine  19866880873772
  misc_feature (1)..(1): n is a, c, g, or t
naaaataaagtatgcctaggacttgaaaaaataaaatgcaatatgcccatgacaccagaaaggacaggaaataaggagtgtggctgaggcaagtgcccttttcccccctggcttaatctcaaagttgcctttgatttagtaatcacacattgcagatttcttaaaacaattccagtttcaactattttgctctatttttccacaagtaagtttgtagaataaaatgccccaatttttgttttggaaaatgtggtcacaacaaccattttaccattatagcagtgcaatagtggaaagggagcaggctcagagaggcacagaacatgcactcaagcgctccgtgctagcttcccaagcatcattcctccttcagtcatattcgtgtttcatccaacattctcttggtgggcaaaactatcaaacccccattccacagatggaggcactaaagtctaaaactctcactgacatctcttcagctttcttccccttgattcttcagcttctcaaaagtatttatgagtgaaacaaagcgggaaacatcattaccttgacaaatggtgccagaattctttggagtattaagactcctttccagtgagggagactgccctgctgaaagttatgagacacaagaacaaaccaccaatggaagatgagatatcatcctttaaagggatcatgtttactctttctggagtggctttggccccatctgactccgtgacctctgactgtccctacatccctaagattctctaagcccacgataaggtgctgggaaaatatgcccagggcttatgtcctctggagagaagtcaaagatctcctgttgtggagggccagtctgctgctaaaagaaacttttggaggctgcagaagccctggctaagctttcccacatcagcttttcccccactctcctcccctcaatgcctaacacagctctcccattctctctcgcctattgttttccaaacatccctcctttcataaaagctgtctggctgggagcttaaaatattgctggacagtaaaacctacccatcagggtcaatccagtcatatctgctcagtcgtgcagcacagtaggggcggggtagagaagtgggaggtgggcttttaggtgccaaaggaaagaggccaaagttgccattttaccgctgagcgccaagagacgaagagaacacatatctctccgggagatcctactcctattggcaagtttaccctgggtgatattagcttgaaggcttcccaacccctcccatcccccacttctttcccagcctaatctaagggctacttctggaattctccaaaaggagaaaggttgccactaatgttcagtcttggattaggatggctggatttagagttcaattccaaaaaccttggaattagcctaagagttggcagaggtttggaagggaaagaaatgcgagaatggagggacaaggtggggtggtggcagagatgtccaaattctaactacaacttgactttctaaggcctttcttttatcagaatgaattaacatgcccccaggtagcccgagggatctaaaccatgtatttgaggttatgaaagttctctgtactttttcactcaaactctgccatagaagtagcagtgatgttaatatctgttgagtg

SEQ ID NO: 60265 - DNA, 917 bp, Bovine  19866880950595
  misc_feature (1)..(1): n is a, c, g, or t
nttgatgaaaataactggacttttttcatgctttaaatatgtgtgagacactcatttctgacccgtctctttatcttctttctgtgatcatctacttagcatcttccccaggcagtgttggttgccaagcacaactaagcactgggccagaaagttcccagtcaagtgtggttacctacaggcagaaaacagatcccgtctgttacagcaacccagataaggagccgtgtcagaggctttgttgtttatacaacccttagagtgtatcttctttttaacttagtttattatttaactccctccaatataaaatattgggccacaaactggtttctgtgtgctataaactctttgctttaaatgtgtcattaaaattttaccaccaaattaagctcccttgacttttcttaaataggtgtttgtgactttgaaaaatatgagttgtctgggttagagaaaagaaagtggcagtaggctcaagttattaagcagcagaggaaatatgacccaatttgatgtttttttaaagcaagagagatgagtctgtgagtttaaagattttgtagaataaacaagtttttgcaaaatcttcctgtggttctctcactccatccccaccctgtcctccacacccagccagtaatctttccgcagaacctatctgatcaccagattcccttgcttaaagctgtgaagttcaaactccctgggccaccctgggttctcccatgacctgctctctctgagctcatttcttctctccacctccctcccttaaagagccaccccattgcaacaagtaggcctttgctgcccccatgtcctgtttaaaagctcaccagcaccctccactgcgaagtgcttcttccttcaagagataagttcaaaacccaccttttcatggtttcctgaaagga

SEQ ID NO: 60266 - DNA, 1368 bp, Bovine  19866881000105
  misc_feature (1)..(1): n is a, c, g, or t
ngtgcgaagtcggagcgattccgagagaaggctttattacatccgttatgcccagaagcccgaggtacccaatgaaggctccccaggacccagcctcccccacggctaccagagtgacaagcgccgtctcagcaaggccagtagcaaggccaggtcagatgacctgtcggtgtgacctccagtgtgggagaaccagatgggaacagaggaactcagagagggaaggcatgtcctttctgaccccatctctttcattctcaccactgctatgctatttttggactctgggtctcaatggcattgctcattcttcccagaagatgttagcaggtctttgtggatgcggtcagagacatagctatctgtccaggctgctgtctcttccccatcatccacccagaatcctcaatgaagcctttcagattactctgtgaatgggatggaagaagggaggggatcatagcaaatctggcctgggagggatagccagaggggtaggatgactctacacaacagccacacagctgatggattctctaggtccttctgacttccttgatctgaacacccttcctctggcaagaaagagcccaaagttcccaatccaacaatgagcatgagtcaggaaacatgcctcagatgtgctcttgtgtgtgttgtcttcttggaccataccttggaatggtggtgaggttgccgtggtctgccctcggctgcccctccctctgcccagtcttacttaaaaagaagtccttggaactcaaccagcaagctcaactttacaagtgccttggtatgcacctctggcaaatgtctcaccttggtgatattgcagcctttccttctgccagggtgtgcaaccagcccctggggctggaaagctctcccggggagtcactgtacacacaattccactggaattcctgccaccacctggcatcctgcagctcttttacagttcaagctgatgatagacaccatcccttccattccccctttggcagtccctcgagtgctcccctaaacaccttattgaccagaatgcccaagaagccattgtcctctcttgaatcctgaccagttcaccagccatggaggccagtggaatttccctaggtcttatgaaaacaaagaggacattgtgcttctcagattccccttgggaaaaagaataattctgttgtgaagatagaaataaaaaaggagagaaaatgctggaaaactattttcccctcctgtttgcttcccttgctgactgccaacttcgagtgccaagaggaggtgtgatgacaactatggaggcccccagatttccctttccctggagtatttagcaggggcagaaagcagtaagggaatctccaggtt

SEQ ID NO: 60267 - DNA, 1394 bp, Bovine  19866881065608
  misc_feature (1)..(1): n is a, c, g, or t
ncgtctcttcctctcctcctaccactcttctttaaaccgaatgacataactgatgtagagttaaattaatatccttcccattgcccatgttttcctcacctctgacagtcatcctcccccacgtggtagcacatgggggcggtccttgctgaggccctctagccggcctgctcatgtcaaatgctgagtcaaggtggctcgctgggtcttatttgagaggagtttttactggaaatggcagaaaacaaggaactacatcactgagtggctactatgtgcctattatggttctagatgtttccacttattcacacactgtttaatccccatgaggaaacatgccctctttacaaatgaggaagaaattgagaggttatgtgacttgccagaggtcacactactagacagtgatggaggcaggctcgaatcccactcttccgaggaagcatgagtcctaccacctaactatttctgttcccattgctcttgttgcaatctgacatcaatggaactccagcgcctgctgtttggccagctgagaacccagcggtagacagtgtctcagccaagggcatttactggctaaaaaaggaaataactttctatatgtgatttctggccaacggtggcagatgctgaggagtctgggaatcctgaccactgtgggctgagggctccatgtgatcatcaattctaggaacagcatatgcaagggatggccagccaatgaaccagaggctaaaaggaaaaaccctgggcctcttatgggaaagtggggaaagccctgcttgtggagttaagacactggagctccagtcatggctttgtcaccagctgtcagtcctgtcagtcctgaggcctctttgcttttctttcccttttagaggcacagagagaaaggcaggctttgaagtcaggtagaccaagttcaagtctcctacacagcatttgctacttgtgtgactctgtacaagttctttaaactctgagtctcagttttctcagctctaaaatgggataatactgctttcctagcagggctaatgtaagagttagaaagtggacttgtaaaatgcttcacacgtggaaaacactcagatagtggtttctgttattactaccacttaacttccctggaccctggtcttcatcttgggttgagacataaggggttgattttgattgatccctagattcctagattccttttagctctactgtactatgaattgatgacaagatgttggaaataataaagcatttcataaatgtatttttcattaatagccacataagtatcaatcaaccccttctgggataataaagatctcccaatatttccttgtaattcaatatctccatttgccattccctcccatccattccttggaaat

SEQ ID NO: 60268 - DNA, 728 bp, Bovine  19866881233364
  misc_feature (1)..(1): n is a, c, g, or t
naacagtaagccatacacacttcccacccgcttgcaaggatgaaattaatccttttaatattttcattactcccttggtgctggatctgaatcctgtggatttgacagctattttggtcctgatcctgcagttcaatctgggcaggacttggttcttaatgaatcctattggcgtgcgtgcgtgctctggttaaacctgtaacgcagcaggtatcccattgctgttcagcggatgaatgaatttggctcaggttccttatgctatcactggtcaagcctctccaccatgcccattcatgaccttctatccaaggctagtgccccctactctgaacccatctgtctccagtatttttttaatattaaacaaaaggctaagcgttaaggaatcagggtacagctcacagtacaactctgctttgtcacttcactgaaaagagagaaataaacctactcaaaggagtagctgaaatggctgaaatttattccatccaatctttccctcaagttcaagttaaacagtgacagattctgttttgttttccctaatttcaattccctagataggaaaccatctgccttgatgaacgtgatatagctctggaattgtatgtagtggaaagagagagcctacttggataagggttgactgtgaatttctagtgtgaaccaaccacagtaactattcagctggaggcaccagtgttgaggacagctaactctacctt

SEQ ID NO: 60269 - DNA, 1523 bp, Bovine  19866881363141
  misc_feature (1)..(1): n is a, c, g, or t
nttggaactcagagaaggtcatggaggctggagtcttgcctacaaggaatgacggacaaaaaggcctccaggcccaggatccaacaaggccttgctcagcatcacttgtactaaagtccatggtaccaaacctagatttagtatctctgtcaaattgcagttttaacctcccctagaaatgtaatgttaatggaccagtctggaattttctggttaagcaccagtaaattaagctgtcacagggtccctctccatcaactcccccatccccagctgcagaagaggcaatctgcatgataaaacccttgccagttcccttctcctccctcttcccactaggggaatcctttttttcttttattactaccatcttttcttttgttaatactttcttgctccaccctatgaaaaaccttccattttgtacaaccctatccagcatccttctagttgctagatggggtgctgcccaattcatgcatagttgaataaagacaattaaatcttcaaatttactcagttgaatttttttttttaatgttaatatactcagactctcttcacaacttgacctttgccttgaggacacagatgtgtcctgttgcaaagacctggaacagcagtttggagccgcggtatattcatgagaaaccaaaccagcagctggtttaggctagcaaggtgcttactcactgggacatctacagacaaggcctggatttttccacaagaaatattctggatacaagtaacgcatcaatgggcttgaacttctatacgtttgcaatgatctaaacctctttaaacatagaagtgggatatcaaatgattaaatataaagcccccactccctgtgtagccaagagtaatcattcagtaagtggtgtcttggctcttaactcagtaacttcaacttcaaggaagtcctctgtgctccctagactccaaatagatgatctacatcactcaattctatctacccctttcttcatgtctcctacccaattagcctggcaagctcgccaattcattcccacacactggccgccctgcccccgagacttacaacctgctaacctaccaggctaggcccactgcggagggcggggtgatacctccagctagggcccacggcgcgcagccttgtgggagttgtagttctcgaaacttacagtccccggacaggcgtccccacgggactcgttttcccgtgctcctttgcatgggtccacttggggcaagtccctgggtagatgagaaagtggccggcagcttgcttataaaaaagtggagttcagcggtctttgttaatggagccactgctacggaggaagtcagggcgtgtttctgtcccgccaagagtgctggaggccgaacctgaaatataagtttaatgttccctagaggacgaaagatcaggagctgagctcccggctccgggtatccccgcccagtctgctgcaggagcggccaacaccgacccgggttaaaactcccgggaagtcttcgctgcgcccaatctg

SEQ ID NO: 60270 - DNA, 960 bp, Bovine  19866881667733
  misc_feature (1)..(1): n is a, c, g, or t
ncaggcctatttacagagtctttctgaggtcttcactttcctaaaaccttagccactccttaaggccaagtcaggtatctcctcctctaatgtagcttttttcatgtggatcacttcttagagccttataggtcctagaattggtcattaatgaatttctatttcattctcttttgtttcctttatgtaatttagtttaaccatcttaagcagactgtgagctccataatggcaagttctggaatcattcctgaacatcccaggttttcaaattctatgtagtcaatataatagcaaaaataatgaagataatagcaataattgtaatttaatgacagactatgatttcccaggcaccctgctgaactctttacaaacactatctcatttaacaacctgtgaggtagatattactaggttcagtttacagatgaggaaaccaagcttcagggattaagtagcttgctggagtccagttgtaaatcagcagctgcaattttcaccctagcatgtgtgattccaaagccctttgcagtattgatcaagtgctcccctcccctaccaagtctgctacctctatcttatagtcataccatgaaagggacacaaagaagagatacatggagggccagactttatttggacaaactacacatattatttcctttttccttcctgaaagccccttcatgaaggactgatttcatagaatttctaacccaagaacacttattgcataaaacaaacacccttgagagatagtgagaaagatagtcttgttttgttttggagagtcttaatgccagtgccagacaatagattaaaaggtgttccctccagggatctgggataaccaatcattcttccctaaatggcatcccagtcagtttcctccacccctctgcccacatccttctctctccccaccaatagcattcaagtctcagcagaggggcccag

SEQ ID NO: 60271 - DNA, 1011 bp, Bovine  19866881738393
  misc_feature (1)..(1): n is a, c, g, or t
ncaaataatgttaccagagtcttgaactccagctcttatctctatctctgcgttctccaaagtatcacgtgatggaaaaaaaacacaagctttaaagttcagggggacttgggtataaatcctgattctgccgcctcttagcattgtgaccttggacaagtgaatcaatatatttaaccttcattccccgcatctgtacaatgggaataaaagagctactttgcagggtttacatgattaaatgaaaagataaatgtaaaggtgcaagccatataatgtacatttagcaagtgctaactattagagaaaaaaaagactcttcaattctaggtatatacttttttcatcctcacaataacattgagactctcatccacagatgtctaactcttagaatgctatggcaaatgagacctacattgtgtcagttcctgatagcatgagtgatggacagtagcagaccttcttacttataactttggtcaagaaattgttgtgctttctttttgtgtgtcagatttccagccaaaccaggtgatgaattcgcagagctgaacccgtatctctgctccagtaatggacagaatcatttctcaacctaatcccacccaatcctggggtctttcttattcaccatgtagagtttggagaagaaggttggcctccttcaagagaggaagttccagcagaaacagtggcccagattttaaccaggaacaacctggtgaccattcagagacttatcatgagtccagaagcagggaactgttctatcattcagtaaacacttcacagttttcaaagggctttcatatttctaaccttctgggaaggccaattcttaattatttgcatattcaactccccccatgtctcctccattgagaaaatactaattagcccattcagaacagatcagtcgctcagtcgtgtccaaccctttgcgaccccgtgaatctcagcacgccaggcctccctttacttatacatattattttggtccatgtcaat

SEQ ID NO: 60272 - DNA, 1253 bp, Bovine  19866880766345
  misc_feature (1)..(1): n is a, c, g, or t
ntggagtgggttgtcatggcctcctccaggggatcttcccaacccacagatcgaacctgggtttcctgcctcgaaagcatcaccccttgctatgttgattgcagtagccctgcggctcctattctttatcccctttgggcatcacacgaggtcttacccaatctgagccactgctgcttctctcgtcctgtcttccactgtaactgcctcaatctccgtgctttatttacacacactgccctccttgttatatctctagtccaccagggctggaggccttggggcttttgcagtgctgagtatatataataagcagagcaaaggcccttctcccagttatctgtcagacttaatctcattcccttcagttttttgtagtcaggagtcacgtttatcatgaggccttttttaaattccctataataaaacagcagagccttttgccactcagcattccctattcaacatgccttgctttcatagcatttttctctcatgttacttttaattgcctctatccaaccttctagacagtaagccctctaagatcagaggtttcctttgaatccactattgttttctcagaatatacaatagtgccaagcagtagtagatgatcagtaagtattttctgaatgaataatgggccagggagtatcaccttgtaaacattgtttaacagatttttatttgatgatgtagttttaagagttggtggggtcattatactcccttgatctctgtcatattatttcctaactttctccctctcccagagtttaattacatatgttatgataaaatttcccaggagggagatatgcacgtaaataatttggggccctatgaaagtagccaccgattggggtaacggtttccatgccagatcctaaagtggatgcttgtcttttgggcaggtttttaatcgcctttggtttcctctcgtgcgacctggtgctctcgcagttctctctcacatgctgcttagttttcagcattctccagaggcgttccatttggtaagttacgactcaagtttcctacttcgaaaaaccttgttttaaaatttcaacttagtattgagtcacatttgtatttgtgaaaagattatagattggtcctaaatctattttcctgtagctttatgagtccttttaaaattgatattgggagatttcctctcaaagaatatattttaaaaatgttttggatctcaccaaaacttccactttgggatcacaatgagcaactga

SEQ ID NO: 60273 - DNA, 3376 bp, Bovine  19866880398501
  misc_feature (1)..(1): n is a, c, g, or t
nacggaggcatttccctttctgaaggggcttagatgacattattgtgcagacagacctgtgcagagcgggtgacgctgcccccagcactgttgaaatgctctctcttgcccagggcttttatctggggttttgtaaatgaaacacctgatccttcttttcaggttcttcagcaaagagactgattcctctttctctgaaaaccacagtgcttctggataaaatgaaagaatttctgaaacccaacacagtgtgaggataagtgggtccattcgtggagacaaaggagaagattgtaaggaatcagatttccagggtcttcctgagtccttcccagagatgattttatagtgatgggaaaacaattctcaaggaaaaatcaaagatgtggcaatataattgaaaagaggacctgcagaaggaaggaaggaaaaataaacttcaccccatggaacatgtcattcatgatattctttactaaatttggacccaaaatcatggggacaccattgattgataggatagaaagagctattttttttttctgaggcatgaacaggactattatgataaataagtggtttccaatgctaactggaaataagcaagaaagaaaactaaatgaaggaaaagaaatattctaagagataagttgttttcatgaagtagttaaggatagtataaatgagtgtatacttgaagatacggttataaaatcatagggtttaacaagttaccattttccttgttagtgatgatgatttgtttctaaggcaacttgatattctatggagacattggtctccatggcccaggtcactttatagcattcctaaggagtgactcttcttgctttgcactcagcagactcaagacttctaatcggcaacatctcagactctcctttttggctgtgaggctgctgagctctcaacaaaattcctaaataggaatacttgcgaaactttcatgcctcagctgtcagccaaagacagggctaagacacagctattttatttccttgtaataaaggtataattgttctgtatgccagatgtcagaaagacttgtaccaggtctttctctgtgtcttcttaaaaatcaaacaccaaaaaacaaatgaaagagaaaaaaaaaaaaaactcagaatgtcagaaacaaagctatcatcattatcctttggcatcacttaaaatttgtatgtagcttttaacaaatggcagggtcctggtgttgaggatatatgttatgtgacagtgttttttattcttcaaagtcaagttgcaggtaaagggggcagctgtttctttaaataattattttttctcattactgtccccaaagggccttggactgccaacaatcagtgccaggcaggccctcagtgttagcattcttcatcagggtagccctttgaatgagaccactgaggggagtgcgtgctattctgcttgggtcctgatgtggctggggtgaatagcagggttgaaactgtagtagttcttttaggctgctgatagaatgttagattttgtcaaagagaataggaaagggagctatttcatgccccttggcagtgagactgccaggctggtacccagcacaggcttccccaccctaatcctggcaggtagacccatagcaaggaggcgttgccaaggtcaggctgtccaggtgcttcaggattatgtgagggaggaagacagggctggaagcatatggcttaagctgaataagtaggagacaaatgagtgaccaagaagtgcctagaagagtctaagacaaatataaaaagaagggtcagagagaagaattttgaagtctatatccaataatagcccaaagagattccatgatgatttgaaaacctgttgtactgtggaaatcccaacccacctgctcaaccttgtcccagtgagccagcttttgtaaatagagggcccatgctttttccaggagacttttggcaatctggagagctttttctgtgggcaaccttgaggctgaagtgccttgagactatcccaggctattcttcaatcttgctctccctttaagaagcaggaacaccagacaactgctccctggtgtctcaaagctgatgattggttattactagttagaaatgattgtttatgggccttttaaaacatgttgaaaatttaacatccaggaaaaaaaaaaggcattggagacagaaggcagtggtgggatgactgctcaatttttccctcctcaagtctaagcatttgtagacgtgagcggaatagggctccaggagtcagaggtactactgaccatcccctttcccctatgcccaagcactatgtctgaattctttcttctccattcagacctgggacttcttttctcctctttcttctccccatttctaatcacctcatccaggctgtctggtgttgtggatggtcccagagtgaagctggagttgggtagagaacagacatggtgctggaaggctgtggatccgtgcacgagcgtgtgcccatccacgggtgccaccccacacttgtgcgtggttcactgacccagcccttgaagaactctgtttcattgtatctgtgtttgagtgtctgtgcaccaaaggctgtttcaatcatgtactccatcacgtccctctactagaaaaataagagttcactgcagaggagctgactcgagtcagtggaggtagagaaacaagggactaaggatcattcagtcagcctcctcagacagtttggtgaaagctgaagcagggctcatttggcaagactctgtttagcacagtagcttaactctgatttattacataaaagtttctggcaaatacaaatagtaattccactctggtaacaactgtgattgaaataattgtagtctgtaaataaactgcagaaaacaagcattagtgggtaggttgtcttggatatcatttcgagagtccagcactgaagaaatacatactcttacggacgtagaattggaagagatattcagaagacctgtgactggttcagccccctccctttcctccagacccacgctaagccatccaggtaaatgaaactctttcctctgctcaagacctgaaaaaaggagaatacacatgtcctgtggccccttattaaagtgactcatggtcttctatgctgggaaatcttggttaattatttagtatttatgagacttgtatgactgccttcatggacataactttttcccggtgtttctttttttcgatgttaccctaagttaaagttgtaatacatagaatcacaccagatgtcagctcactgcaaatcctattgggcatttgaattatattgcaacacctgataaggaggcaataaagcagatacaaaaaaaaaacataga

SEQ ID NO: 60274 - DNA, 1039 bp, Bovine  19866880419677
  misc_feature (1)..(1): n is a, c, g, or t
ngcttattcataacctatagcctgagcttctcagggatttaataaagagtgttttcctctcacatggtttaccagccttgaaatgttagagaggaaatcaagaagtcatcattatatggctgcatattaatcattagattttatagttggtcatagttcttttatttattaccattttatgcatcaaatgcaatattcagacacacatagacagttacacagattcagggacttatgacctaggaaaagtgggcttggtttctctgtgtgtgtgtgcatttctaattatgtcgggacgtcatccaaagatgtgactgttgtgaaaagatcacaaattaaccggcgagaatggaaggcaacccggagttttttgagagcaatcttagagcttggagaattcataaaccaagtaaaccttctgacataactataaaatgtggtataaaccctagaaaagaatggccatcttgaaagggtaacagcacttttatgagaattccaaccgcaccatggcaacatcaacccgtcaaagcaaatgaagggtagtaaaagtaaaattaaacatgatgaaggggacaccagcttgctaacagctttccgagcagtaaagctttcaaatgttatctcttcattggtctgttcaatcacacatgcctgctaccaagctttatcatattatgtatctttctcatcactgccgcctgccacgggcttgatggacttgtctgtatattcacacaggaggggaggagagggctccccttccccccactgtagccccctccttgtgagccctcatctccctcctgtaattcttctctcccactgtcctctcttgcccttgctctggtgtccaacatgagtctctcttgcataacaaaggttgccgtgcagctctgagctttgggaactaaatatagatcaaagccccatcctaccctgcatcacccaaaagacagatcccaacatgcgtctgactttgtcctctcttttagtctaaaaatcagcatccttctttctcctctggttctcctcccag

SEQ ID NO: 60275 - DNA, 2796 bp, Bovine  19866880456040
  misc_feature (1)..(1): n is a, c, g, or t
ncttgatggattcaggagagaagaggaatgagtcatcccgactctgaggacacccgttcaccctgtaaggaggggcttcagataaaagggtgggatgctatattaggacagccacccactcctgggtgcataactggaaatttcttattttctccattttactaagtcaatgcccagaaaacaattttagtattctaagagagagttgtacctccctcattgcaaaatatgctctttttgtacttttaattcatcttaagagctagaattctccttcttagggagtaattaaggaaaagctggttgctttttctatataatctgactttccctttgcctggggcagtatttcctttgccagaccatagcatggagtttacggcatattagataattattctgtgcatgccatcagcactgacgtcaacaccctggaaacagacagacaatcaagcaatttgaggtccacagagaaaagcaggaggtggaaaattttccctgttaagttcctggcattttttggtaattagttgcagataggaaaagcgatcaatcactttccttgcagaatgtctgactaaacgaaggttctggtttttgaggttcaccaggcccacaaagtggagaaggaaatggcaacccactccagtgttcttgcctgaagaatccaggggatgggggagcctggtgggctgccgtctatggggtcacacagagtcgaacacgactgaagcgacttagcagcaggcccacaaagatgcctgtgaacttcagaagttccgtcattttaaagctgtggtcagccagtgacttggaaagtcctgccgaatgcaaactgtgacagggatgctaacttcctaggaatcaaattaaaacagaaacccctttataaatgcaccagttctcagaaagatttacatcatagatacttcataactatagcgattttgattctgaaataaatcacaagggtgtgtatatatgctgttttaggatgaaatggtccccaaactgttttcatttgctatcgttatcagaacatctgaaatcctgacttcgaaagaaataagatgcaattttgcccaagacaaatgtagggattaaagttaaaaatctggactcaaatcctccttgtgccatatgctagctgccatttccaacccctctgtgccctggtctcctcacctgttactggagtgagttgccatttcctactccaagggatattcctggcccagggatggaaaccaggtctcctacattgcaggcagatttgttgctatctgagccaccagggaagcccccctcacctgttatgggggtgatactggcacctaccttactggctgctatgagaatgaacaggtgacacaagcagcttagcacaatgcctaccacagagtaagcattccattaaaagctttctggaaaattctcggccagagatgaattagggggggtaggccaactggccagtttcctggaggtcaatgtataagatgcccaagaaatcactggaaacataacaagatcaaaaaatgggattttcaacaagagtacttaccacacatgattaggaagaatgctggggcaaaccacttgtaagaaggtaagcctctgtaaggataaattcaaagaccaatagagggtctccgaactcctggagccaagtggccagggccttaggggtatctctgtaatagttttcttcctccccctccctctttccccaagaggaagctcagtctcttcactaaataagtatttaataaattataaagaataccaatctgaaggcatgaaaatttattagcctgtccaggtgtctccttggtctaccatgctctgagctatttgggcactgggatctaaacactctcccggctcttctcattctctctcattatttaaccacccctcagtggtcagaaattccagctcaaaccacctgtagtcaagtcacaaggcacctccctccactggggccagactccaagggagaagtgaccctctgtactcgtgtgaggacctacagcacttaagaccaagaaaagaaaaatccactattaaaatactgctgggacctatcagtgagtgttacttagaaggtgtggttgaaatttttctgtagggatgtaagtttagattgtgaataatataaatagttgctgacttttccaaagttaatatagcagcctgtggtccacagttttttttttgctagaatgataagaaggctatggtctgatcaataactactccaagtccatcctgaaccatggacactgtggaaagtaaaagaaaggtgagtcatccacctggagaatctcaagatcaaaaggtagcccagtttatcttcctgatttcatcatgaacatttatctccttcaccctcatcaagaggtatacacagagaatagataaattaaaatttcagttgttaatttaatcaagcatgatttgacagggaacctgctgcaaagaggacactctatgatgaagtccaataccaaaaatagtgagagtttaaaagtggattatttgaaatctatcccattcccgttactcgtattcattgctgagaaagaagatggtttactcagtctactatcgtctaggcacatggaatgaagtgactcattatcttcactcaatattaaggaaggcaacaccatggccagtgtacagataaaatggtcaagacatacagagaccacaattcggccaaggttgcactcctagaaagaggcagacctgcacttcccacgctgccccgctggcccactcctaaaactg

SEQ ID NO: 60276 - DNA, 1504 bp, Bovine  19866880466262
  misc_feature (1)..(1): n is a, c, g, or t
ngtagagtagcaagcctgtcccaggctcagaggtacgggcggggtccaagctctcatgagtatgaggtccagctgcacactcacgtgtgtgcgtgcatgtacacacaccccagtgccatccagagacctggagaaggaggagtgatggtgaaaacctcccaggacacttcttcagtccacacaccttgtttgcaggtggtcccttggagcgaaactgctttcacgtagtgactcgtttattcaggaagcatttgttggtctcctgggttcagaaatatcaatatgcccttagactccactccagcaacctccatttctgtgtgctgcactcatttcttccatcggtatttaatgaatgcccactacttggtgagcacttggcctgactcctccaagcccacatggaaatggtatgtgctcagggattttgcagtcaaggtgaagagtgtcccaggtgagtgagggcacttttctccctgagaccaggtgaacttggggtgggtggaccgtgcatgggtggagaatgtggaacacggagttctcaaactcaaggtgagcatgtgcacagttgaattgaggaaaacagctggctctccagagattaaacatagagggattttcctagtgttacagtttaggggggatcagaaagaaaaccagtgttggagtctacgctgttttccttatgattccttctccataaaccacaatcctgtctctcattcaggggcagtactcctttgcttggctgccaggagactccaaggaaaacagctttgggggagggaaggtggcgtctctctgtgtttgatgtggaaccagtaatgagaaactggaggctgctcagtacctgcctccaggtgtcctgtctggacagaatgactccctgctgggttgtgagcaagcgtttgtcccatcttatgggccatattccctacgaaataggcagtcaggtgacccagagaggactccattctgccaaatgtgccagtgccctgccattatttcttaattgctggcaagcactgtcccctcttgctgtgtggaagcccgttggaggtactgtggaccggagcctgctggcaatgactgggaggctgcccacggcccactgcctcccagcgctcccgggtggttcccctgcagactgtactgggctccagccagtgggttgggtggtgggcacccagggtcacagtgtcttctttgtctctggaaaacccaggacactaaagagaaagtgaggatgttggtaatccaccggcaccaatctggagaagtcttgacagcagcccctgtagcggacgtgaagtttatgaacaaggctgtggctggtgaaagctcttgaggctgtgaactctccctccttcctctgtgatttgaaatttcagttagtgtgggagtgccttaagccattgtttagatttgaggctgaatttagattgaataggaaaatgaatgttgcatgtttagaaagggatgtcagttccttttcttctccttc

SEQ ID NO: 60277 - DNA, 2257 bp, Bovine  19866880500443
  misc_feature (1)..(1): n is a, c, g, or t
naatctgctgtcactaaaacaggactgagttggcaagcatttttatcctcacactcaacactttgtcctacagtggaaaagttaaataaaaattagggatacaaattagagccattttctgaaagtttcattttaattgaattaaatatagccatgtcattgttccctctttacacagcccacattgaaatggagactaagctattgttggggtccctgaatcaatggagaaagactaagtagataaatctggatgcctgaaatattttttagactaatgaccacagcaaccaaaacactgggatacccatcttgtgtttaattatccacaagctttcactgtaactggctccagtatttagtgatacttgtagaaagcatcctttttcatcttttactcaaatccgctaagccatgattgagtcccctggtcctcaaagccatgatggagaatacttgttccctgttcttcactctctttgggagtacctctgctactctaagtgtgatccatctttgggaagtattgatgttatctgtgagcttgttatacatgcagaatcttagaccttattctaggactacagacaacacattttcatcagagtctgggaagcactggactcgcagctttaaatgtttccactggtaagaaattatcgtgtattaacgtcagtgaatttagtgagattctccccaaactgtctaaaatattgaagattttctaaaagcataggtaattctccagtgatttgtctcatcagaagaaaccttatgattcctgtgctgattcaagtgcttctctaactccttccttttctcccagttcttaattaattaattagttaattaatagccaacagttgtttttggcctcagttttaggagcaatggaattgccaagtacagcctttgctggactctatttcctgctgaattgttgtttgatcctacattgaaattcagagagtaaaataagaagactgagggctgggtcacatgggaaagagagcatagtcatggacagagcaaagggggctcctttttgcaggcagggtggtgggactgtagctagtaagaacgagaacttctattagattgctggcaaatacaccagttcctgagagtccctcctttcatattcaagtctctaaggtattggatctaaaatttagaaaatcataaaccacttactaagtagcccaagatgttctgtgttgacaaaatttcccccaaaaatgtattgctcagcaagttctgggaagtttaaaaatcacctaattatacacattccctatgagataccaaaaatgtagaatttttcagcattcagaagcacaaattgatttcttttatggttacacctaatgttgtgaagttatcagtactgagttgtgattggatgcctagaaaaattagacttctttgtctctctttctccagttttgtcttgctcagttcaattagacaaatattaattaagcacttcttttaagcacctgatagggtagtatactgcttgttctagaggatacaaagttgaatgcattagcgaggagcttgtgtttcaaattccactttattataggtcttgtcagtcattagaagtttcagatgctgtgatggtagctaactatagctaatgtgtactgagtgcttcctgcaagccagggagtgttctaagcgttctttatccatcaacttactcagccctcccaagctccccagaggtgggcattattgtgttccgaataaggcaggacagagcacatcaaattggggaacccagggaagaccacacagatgaggtggcatatgatgggaatttcacagtaagagttgggttctgacagtagaatcagggaagcaaaatggtggggagatgagggagagagaatgttaagaagagcatcctggtctccaccagttcctccttgaaataagggattccataactaagtatcacgtttcctgctatggagatttaaaactcatagtaacatgtgaagtactctgcattgcactaagaaaagtccaagtttggctttgtgaaatccactgcttcccaaatgtatttcatcatccattcaacaaatattgagctactgctgtgatccattcactgttccaggcattgcagacttagatgaatttttctgcctttaaaaaaacctacattttaatggggactaacaggactccttgttcactctcttgtgttcaaggcgacacttgttaacaagttctgttgagttta

SEQ ID NO: 60278 - DNA, 1072 bp, Bovine  19866880508051
  misc_feature (1)..(1): n is a, c, g, or t
naaatgcagctactcaaggcgaacgctgcatatttgacattaaaagcatttcacaaataagaaatcaccagaagcatatgagatgttggtctgttggaatgcactaagctcctcacgggtgtattttctgcttacagctcagagaatgaaaatcgcatctgcttttctctccccacccaccaaaaattcagaaagttatagggttattggttaacaataattttttcctatacagaaaatactggccagcatagaggagaaattacaaaacatgagacaagagaatagatcccatgtaaaatatcttactgagatctgcatgaggccttgagagcttgtcttaagccactatcataggttctgcactgcctgggaatccaacttgagtgctgacctacaaaacttgttggaccccactgttctagttctgaaggcccttcacctccacccttcaagccaatttagatttcagtacaacgagaaccttttgtacctcattttgatgctacagcaggcaaacatcatgacttatccttagcacatgcctgcctgctcctctcacaagatgggagaagaattcatgtttattccaagcatcacagccaaatagtcagctagactggagaggtgttattccctgtgcccatacctttcattttgaaagtcatttttcctccatttttttttcttagtggagaaatggttgcactcttactttaaaatatggccagtggttttgccctcttggaatgttaccgtcaccaggaagagaggtttaaatctctccaatgggtcaagtcctgttctaagacctttatgacttgccatccagtctatttgtcaagcagggggaacgttatgattgtgaggaacaggcactgggggagatggatgagagatctcttcagcagcaactccattcccgtgatcttggctcacacttctagcgacaggttctgttagcatcctagctagtcagctgttcaggtcatcaccatgcagccccagccctgttcgatgcgtcattcctgagcttagcttttacaaagaaaaaaagcaaagaaaaaaaaga

SEQ ID NO: 60279 - DNA, 1361 bp, Bovine  19866880536056
  misc_feature (1)..(1): n is a, c, g, or t
ntctttaaattaaaattaaaaatagttctaaagcccacaatgactgggatagcatcttgattatgaagataacttcaagaaaatggaacaactgataacatattgccaggattatgagctagtcccactgttctgtactgtgcctgcaggccccagggacctatttgtggcagtttctcttccttcagcccacactgtttgtttaataaatggttatttatggccttttcagccattatagcaactttggagaaagtacatccttctcattggttttggcgctgaaatttcattctcctggcaaaggtataaaacagagttgaaatgcaggatctgccctacaaagtgtgagggcctctgagaagagatcctcttgattcttcttgttagtttctgtaggagcttattttttttaatttagggtcttaaaagagacaaacttcagagctgaaagaaactttagagtcatccccattttatagatgaagaaactgaggaccagagtggcctctatgactgtgatcacatgacaggagatgaacccggattgtctgttaatgagtggattggatgcagggctcctggagggaggattagctttatgggctactcctgagacaggatattatctcctgcctagagctgcgatatgcacactgctcagttgtcgtgtgcagtgcctttagtacgtgtctctcatgtgcctgtactgatgtgttttttgatgtgaagtattgcaggcgacataaaagacttgagttcgatccccgagtctgaaagatcccctggaggagagcatggcaacccacttcagtatttttgcctggagaatccatggacagagaagcctggtggggtacaatccatgaggtcacaaagaatcagacttgactgagtgtctgagcacacagcacatatgccaggatactagaaggaagggctactgtctctcacgtttttcgaaagatgatcccagaaatgactgcagacattcctgaatactgagtggtcaaactcagagttatcatggttctaatattgcatacggttccccagaattaggatgatagatttttgagagccagaagccactgggaagcctttgggaagccattgggaagccattgctttatctgcctcagttttacacatgggcaaactgagtttggataacatgttgaatctaaattctcacagggatttaggggataacctggagctaaaacccatgtcttttgattctctgtttttctgtcaacatcaccagtctaccactgacatcatcatcatcaaaaataaagtagtatttataaagtgcttactgtgtgctgggcactgttgcaggcagttcatctgtattt

SEQ ID NO: 60280 - DNA, 4848 bp, Bovine  19866880544951
  misc_feature (1)..(1): n is a, c, g, or t
ntttaaactttacaatattgtattggttttgccatatatcgaaatgaatccgccacaggcatacatgtgttccccatcgtgaaccctcctccctcctccctcccataccatccctctgggtcgtcccagtgcatcagtatgttttatgacaacattatgtatgcaggcttccctggtagctggtaaagaatccacctgcaatgcaggagacccccattgaatccctgggttgggaagatgccctggaaaggggaacagctacccactccagtattctgacctagagaattccatggactgtatagtccatggagttgcaaagagttgaacacgactgagtgactttcactttcactaggtatgattagatcaagttactgctaagtcacttcagttgtgtcccattctgtgcgaccgaatagatggcatcccgccgggcttccccattcctgggattctccaggcaagaacactggagtgggttgccatttccttctccatgcatcaaagtgaaaagtgaaagtgaagtcgctcagttgtgtccgactcttcgagaccccacggactgcagcctaccaggctcctccatccatgggattttccaggcaagagaactggagtggggtgccattgccttctccgaggaatctcttgatttgcatctcttgaattacaggtggattctttaccattgagtcaccagggaagcccctcagggtgtgaccccagactaataggattagccattcctcttgaacttgtgagtgaggcacactctcaggtcccaacccagatacactgaatcagaaactctgggaatggggcccagcaatctgtgttttaaccttccctccaggtgattctgatgcacgccactgatctattaatatccagaatatgtcatgtcactgttccaaagcagctacccttcatcatgaccaaagactgactcaatagatccgggaaggggatcacaggtacttgttcttgttttctaagtttttcaggcatccaggtatgtttctgattaccactcctgtggagggcttctcaaacctggctgaacactggaattaaccagggaactctaaagcattacaatggctgagttctaccccagccattcacacttggtctgaagtacagcctggcttggcgatagcaggggagtctcaaagttcccaggcaattctcatgtacattgccaagtttactataatatacactcgtgtacactaatatgttagtgtatctaatatacagttcaacatgtattaaaatcacctggataattcattgaaccaaattcctcagccccccgcccaaagaatctataggtttgggtatgggtcctaaaacgttcacttctaaagaattcccaattgatgtgctaaccaataccactctagaggaatatgcttactttttagatacctgggatctactttgggctgggatctactttgggctgggatggccaactttctaccctctgttcctcctccaaactcttatatatttaacgttcattcttccttataaagtacccatccagttaaattatcaacatttttaaggcagagctatgttctccccatctgtgggccactctaggaatcagtgagttgcactcagtaggtattcaggtgaataagtgcacaagtgtctcagcgctgcttcccaatgcttcttttctccctactggatcagctagccaggtcaatctatcaggggcccttgatctcatcgaaaagaatcgaggcatctatttttcttttaagatgacgggaaggtaaatatccgtccagtcctagagatttaggttgcttggggagactgttccaataataccccagatgaagtacagccatctggagagtgtttggcatcgatggaaacctactgctgaatttgttcctggaagacattcattttagaatgttatttccaatttggcacatcacagagctgtacaagtcagagaggatttagaatccctgctacctacagagggcatcttatttaaagcatgtccctgacaaagcagtatcaaggaagcacaattggaaatctcctacaggggaataatctctctacagctatagcagctactgggacagcaaagcttcctaaaaaaaaatctaaacttttatcattccactttgctggggctgccttcttcagagcccagtcacaggaacagaacttaataagttcgtttctcttgacccacaacagcaattcagtctcaatgccattgccgagatgcatgatgccactgaggcttcccccaccccacaaaataaaagctcaggcaaagagtagagcccataatctctaacacgatggtccattctagatggactaacagaaggtagtgccgtggtgaagaatctgcctgcaatgcaggagatgcaggagacttggggtcaatctctgggtcagaaagattccctggagtaggaaatggaaacctattccagtattcttgcctggaaaatcccatggacagaggagcctagttggtggctacagtccatggggtcacaaagagtcagacatgattgagcaccaccaccatagcaaaaacagcaataacatgggttatttttactaccccactccagtactcttgcctggaaaatcccatggatggaggagcctggtgggctgcagtccatggggctgctaagcgtcggacacaactgagcgacttcactttcacttttcactttcatgtattggagaaggaaatggcaacccactccagtgttcttgcctagagaatcccagggacggggtagcctcatgggctgccgtctatggggtcgcacagagtcagacatgactgaagcgacttaacagcagcagggtactcatatggaataaagcaagaagctcagaagagggggatgagtactttggaagtaaaaaaaaaaaaaaaaaaacagtttaaaaaagtactttggaagctggtaagttacagaaattatcattaactcaatttttccaaagaatggaatgagttactttgcttctcaatttcctttcccacctgggagaaccagtgcaatactgatagggagtctttctgccttttgtcaggggcctggagcaaggaggaagctgcgtttagtcttcaatcttattggacaagactgctagactcatttttaaggtgtaactatcatggccacatacacttatatcttgagcatagtacattattaagaagcatggaccttgaaggtggattgcccaggtccaaagtcactgtcacttacccactctgtgactttcggcaagttactgaatctctccatgccttggtttccccctttataaaatgacctatttcacagcatcttttggattactacctgcgataatgatctatatgtacatgacgtacatacatgtacgtacacagataatatgtatactataaatgtataatatgaatacatccatctctactctggttacagaagaactctcttttaaagcatgttctctctctccccacttctctttcaatctctctccactcccaaaacatatctgaccccaaaaagagaaactaaaaaaaaaaaaacaaaaaacaaaacttttaattttctttattattattattttaaataaaaccactgactacagggaagagtttacttcaaaggctctgagctttagagactctagatggaggagttaaaagtccagcaatctcagttttggagtaggtggcctctggggactctcaaaggccctttcttccagaccttgggcactgtgacctggaacccccttggccatggtggttgggtcaaattatcagatgccaggtaccctacggcagggcaaagtcagcccgcccttccctctgctaaccatgcactgcccgctcgaccacgagctcatttgtcccccttccctcttctatcagacttatctcactctaacccagcaaactccaggacagtcctgtagggggaaccagagtcctttcttttcagagctcaaaagagttcagagttctggagataaaggtggggctggagccagggcctctattacacctttttgcctacgcaagccttaagtgcatttaattcagtttgggtgggctagtgaggggtttcatttcattcaccatattaatgaattcccttgcatccatctaagaaagctatttacttctttttgatacagactttgtaccattagtatccttccactaaaaataacttcaatcaacatttgctaagcttccactgcatacaagagtgtcccagctgtacaaaaggtgaaaaagttcatagtactttctgtcacaagactcacatcctagagcagtggggtccaaaagaatttctatgatgatggaaacttcttatatctctgctaatatcttagccactagccatgtgaaactctcaggtatttgaaacatggctagtatgactgaaaaattgagtttttactttgattttgattggtctacatatagatagtcagacgtggccagtggctacgctattggacagcatggtctagactggaaaaccatgctacttaagagtggcccccatgatccctaggccagagtatctgcatcccctgtagcctgcagaaagcagtctctgatctcaccctacacttcctgagttagaaactgcactggaataagatctcctggtgcctcatctgcacattgagtcttaggaagcactcttctagggacgaatccattcaacagtcataaaagatatatatatatatcttctctctctatatatacatatacatgtatatatatatgcaagtgggtctcgcaatctctcagagttt

SEQ ID NO: 60281 - DNA, 845 bp, Bovine  19866880558638
  misc_feature (1)..(1): n is a, c, g, or t
ngttgagtcacaagcagagaggaaacctctggggaaaacagcaggagctgtgggaggaagaagagcaagctgggatcccaaaggccatgggagcctcacccatccactctaccacctctgagaggctttgaacttacaggaagggaaagaagtggagacagtggcctcgaggcaggctgggctacaagagggctacttttctgaataagatctaaggtctcagcccaaagagactaattgttcccaagacctcaactcgagagactgcctgacaagatactggttagacctttggttattgaccaagtccctatcttagggactacatcataatggataaactagagaatgactctctttctcacacacacactcacactcactcacacacacacacacccctatctctactattggctctgggtgtcctgtaggaggtcaggccagggatgttgataagaatgtgagcgtgagcgaccgtgagccctggatgctgtgctgctggtgaggatgttctggggacactgcatgaactgtatctattatgccaacatagattagaactgaaaatgaggtgccactgaaacgttcatattctccaaaaccctgaaattgggtgttgtgtgaacaaaacaccatggttctctacccaaatttttttgactttaaatcatctttgaatttccaatgcatgtgtctccatggctttggatcacgcgttaccttgagttctctgacaagttaatgcattgttagaagaagttatattctgagcaaaatgtgcacatgtaaacaaatcccttaactatgtatacatttaagttactttctgggcatctatctga

SEQ ID NO: 60282 - DNA, 1615 bp, Bovine  19866880564201
  misc_feature (1)..(1): n is a, c, g, or t
naaaattttctataaatgtataaatataaaactagtaatgaaatctttatgcatatagctcttcctcaactataaaataaaacaaaagctgtgagctatatagcaaatttgaaaattaagtaaaaaaatttaaaagcaatacaaatcaaatttaaaatattaattcagtgtgacagatattattgtttacactaaccctaactcatagaagttgtcattatttataaaaagagcctcagatctagttctgtaatgaacttattttccctgtattttgaatttaatactatgaatgcacagggcatttgcatgcaaaggaagcttttcagaatgaggcaaatactatccagaccttgtttgctaggtcaggaaaatcaggcctcattctctgtcaatactttacatgttagaagtcctagaatgccaattttaattaaagatatcagcattacattattagtgaaacccacacaaaattgttctctaaattgcaaagttgctcaagtcagaaatttggcggccattcacgattctacgtctttgtcctcatgttttaactggccaagaatctctctaaaatattcactgactctgccctcttctttttatctccttctaactatatgaattcctgagactcaacccatggagttaaagactctagtttgagtaaggaggtatcccatatgctagtgatctctgtgaaaaccaacgggaggatggttgcatgagagtgctatttatacaagtggggttacacggtacttatgcatgcacctcttctttgtatttcttttttttaagttaaactatagttaatttacaatgttgtgttagtttcaagtgtatagcaaagtgattcagatatatgtatatatagtggctcagacagtaaagaatcagtcagcagtgcaggaaacctgggtcggatgcctgggttagatcccctggagaatggaatggctatctacttccagtattcttgcctggagaattccatagaaagaggagcatggcaggctacatatagtctatggggttgcaaagagtcagacatgactgagtgactaaaactactcctcctcatgtgtatatatatgtatgtatgtataatgtatatgtagtcttttttagattctcttctattataggttattacaaaatattgagtatagtttcctgtgctatactctaggtccttgttttttatctattttattatatggtagtgtgtatatatttatcctaacctcctaatttatctctcctctcccatgttttttgctttggtaaccataagttcattttctatgtgtgtgagtctatttcttctttgtatttcttttgaacagaactctaggttctagaataacccagagttacccattggtatgatgaagtccttcatcaatggagaggtcaaagcaattacttatggctttctgacttcccagttacaatcaaatctaacctagaagcttctttctcatagtatctgttatgatgtgttctgttgtcctctgcagcctaaatcaatacatttcatcattaaagagttcaacctctttgtaaagagctttggtttttcaacttggttggggttggggcagaaacg

SEQ ID NO: 60283 - DNA, 1634 bp, Bovine  19866880564590
  misc_feature (1)..(1): n is a, c, g, or t
nggaaactcccatggatggaggagcctggtaggctgcagtccatggggtctctaagagtcgggcacgactgagcgacttcactttcccttttcactttcatgcattggagaaagaagtggcaacccactccagtgttcttgcctggagaatcccagggacagaggagcctggtgggctgccatctatggggtcacacagagtcggacacgactgaagtgacttagcagcagcagcggcagaagcttagataaggggccttgcataaatggggtacagacctctgaggatcaggagctactgactggaactggcatctgctgggggtaccagggcactggtatttgggaacacaggaaatactggaaggaaaattccctttctcctccctcagcattccagtctcactttaatttcctctataagtagatcctaataggtgcccactggtaaaggacaaatataacctgcaatttgcagccccagcaattatatggtatattattgaaggatgggtttgagctaaaagacaataacttaatagacagtataagttgcttagcttctttaaaaaaaataattttctgctctatacccttgcttttcttagtaacatgtgaaaacatttccagtgcccatacccttctaaagcatgaattctaatggctgcatatgtattccatcatagggatgaaccataatttagttaaccaacttcctgtccttagccattagatgttttgaaatcttgttgttcttatccacagtaatgcagcctgctaaatctaagcacatatccttaaataatcccttagaatagatttttaactgtaattactaagccaagaaacaaaaaaaaaagcttctaaaataaaatatcactttttctaagctaagaaaacatgaaacatttatggttccttctgttctagaatataatgaggtaagattataccatcctaatacactgggtacaagggagggcttaaatagtgtctgatgaatgcaggcagaagaatggggatgaaattatttcagagtgaaacaaaacctttcctttaagaaaatatttaaaggcaagggggctattaatgatatcatctgcctcagttggtagagataccgtgttgttactgattttaactgaaatgcattcttagcagaactaattttgtaaagtatttctctacataatccaattttgctcagtgtttatggttttgacaaaggaacaggcagggtttgtgtcagtatttatggatggtagccttgtaggaattacactgcctagaggatattgctataaatctataatgatggttgtttttgattccatctttagtttctgaattctagccttcataattagaattccatatcataaactattggcctgtgacaattttatttttctcctgggatgcctggattttctgaggtatgacatgcttggccctctgtgaaggacagaggtcttgatggttctgagccagatgtttgaagcccaccttcctaacggagatgtgatgtgccagcttgagtgctatcttcagaaaatccgaatccaagcctttgtcagatccctgaggacaattccgagaaagttactaccccttgtgctggtttctcagtgctg

SEQ ID NO: 60284 - DNA, 817 bp, Bovine  19866880569178
  misc_feature (1)..(1): n is a, c, g, or t
naatactcgagacctgagagaagaagtagacagactgcaggggtggatacatctgctagttctggattctgctgttgtttccatgttaggagtaaagccactaatatcagttataaatagaacagcactatgtactcagcaggggcgcggaccctctaggcaatgttctcaacctcttattagtccgtgacccttcctgaaaaatcataaaaatagcacgtgctccttcaatagtatttggcatttcaaaagagattgaataccatgtctgaaatcacaaagggctggcagagcatgcttattccagcctttcagagccctccttcctctcctagattctgggagaacatgggcctcttgcctcatagtctcatatctcttggcaacagaagtcccagggcactggcaggaagttacctctaagttagaatctggggtctcagcggtagcaccgcggggctgttagtcatggcccaggtgagataattgagataatgatcccttgggaggggtccacagtgctgtctgagctgtgaacgggacctcagcagttttggtttcaaaggaggttgctaccctcctttttgtggacatgtggccaccgtggcttcccgactgcctcccgggtcttagtccctaggctcctcctgaagtcacaggagggccacagtgcctctctagtggtggttacacggtggccaacagcccaggccagctctgtgagctgtctgtgaccaactataggggtgtcacaagcttcttaggtagataatgggggcagcaccagcatctgagtctcaggagctccagctccagg

SEQ ID NO: 60285 - DNA, 1202 bp, Bovine  19866880579151
  misc_feature (1)..(1): n is a, c, g, or t
nacacttcacgtggactgatttttttttttttcataatgcctgatggaagaaatctcacttgatagtctgcagcccactagtcttggaataagagatttggctcaagtccaccccaaaatttatctttggagttgtttatttattcgttcagtgctgaagcaaccaattatctggcattccatcaaatcccaaataatgtattttaattgacattatcccaaagcctttggacaatctgagatcctttggtcctatcctctcattctggaaaatgcaatctgaaataggccataatggtggaatgccaaatcattatggggtccctgaaatccaacgccgttctcggaagggcagccggcctgagtccacatccaagaagtgcagcgttgatatgcagtttggcgcagaggagagagagattctgaaaaggtgcaaatcaccattggtttcccatctcttctgcttttctgtcatctcaactgtatcacaggtttcttccacccctagaaagctctgcagggaggcattctttgttctggcacccaggaggacctgagctgctgctgctgctgctgctaagttgtttcagtcatgtccaactctgtgcgaccccatagacagcaacccaccaggctcccctgtccctgcgattctctaggcaagaacactggagtgggttgccattgccttctccgagtgaccagcctagagcccaccaatgctgatcccattttttttttaaattgtaattaaaagcttgacacattctgtgggggttccctcttttttgtgggaataaatatgttttgtgggattaaagatacattggccagttcctatctcagtgctgtgttttagactgtcacattacaaaggacagagataaagtataatttatatgcacaaatattcagatgcaattaattaattctaattaaagacttatgattgaaagctgtacatcctttaaaggaagaatattgagaatttggataggtttttaaaaaatcataaatgtaaaaaatgcctactattacaatagctttcttctctcaattttaggtgacgctggtgtgtttgttatgactcacctcttcttattgcagctattaacataatggtcattggtttttataatttcctcttagttcattatttttgatgtgcacaacataacatatatttagattaaaacaatgta

SEQ ID NO: 60286 - DNA, 2331 bp, Bovine  19866880585279
  misc_feature (1)..(1): n is a, c, g, or t
ntttcattatgctcgatagcattttgaagcaggcttcaatttaaagtgacacaccaaatctaactttcttcaccctttaatttgactcactggtaacacaatttgggcataacagacaatgtactgtctattaacaatttgatagtgaattactgttagagtctgtcatcttagtatttatttaactgagctgcatatgatctagttgaacatttcatgtgtttgtattttgccttctggcaacctgtgtagagagcacattcagcatggcatatgaaatatgcatgtgctctcccttgaaaatatttataaatgtaagaggttaatagtgaaacacttaaacaaggatgacacaatggattctactcccatatgcatagttattattgaatttttaaactcattaaaggaaaaagtctggaggaggggctttaagaactagggacactgcatcagcttttgtgtttctgaagctcttgctgggggtaagagatggggagagttttcagttagccactagaccatagaaaaacacaaaaaattaattgacctttttgtgaatggggtaggaacattttttttcttatttgttgctatagaaaatgataaaaaggaccttggagaaaattcaggtttgtctataagcactatcaactcaatcacaatagcacttaaatagatctgaaaataactgtatatacacatacatacacctgtacatgcacacatacatccatgagataatacaaggtatatacatctgtgtgtgcacatatgcatgtgtacatacaaatatatgtatgtatgtgtgtatgtacatacattcatatatgtacttgtatgtatacattcactgtgtgaagaaaagtaatatctcatcttccatgttctcaaacttagttttcagccattcttctcaactcattccttatgtgtccttcaaatagtcttggattagtgccttggttatgttcctttaaactttttagttgattttatttagcaaggtgcttcatttctagagtcttagtcagcatcactgttatcaaaagtgagagagactttccagttacaccagacaacagatttcttgctgtttttctttggttgctgttcctttgtttaacttagtttgaaataggtcacaggtcaggcaatggtagatccaggggctcaatgatgttttcagggctctggctatgttgccatgtctggattcattccccactgaatgactgtatcattcgcagctaagttctcttcccagtggtgagagagagtattagcatccctagacctttatactaatggctcatcattggaaaaaatagggacattctctcactgttaagagttagaatctagggagatttctaaatggccctacctagttcacactgccaatcactggactaatcactgtatttgtttacattccaggtctagctggagacagagcacagcttaggaccagggggctaaaaatggaatttcagtataaatagccccatcagaactacacgtaatgttgtgtgctgggggttggggttgtgtgtgggaagagtagctttcataggaaaggggaattagaattctccttacctacccaggtgccttgactcaggatcacctcatatggtcatcttaccatgtacaggactcttgccctccacccaggtctcaatttctttcttttttttttttcctctaagtagtctttaatttatagctgaagttgcccaggactttccagggaagtcaggagtcaacaggagcccaagagataaaacactcgcatggccaatgagcctcaaaataagcagtaaaaatgggcagatggcctccattcaagagtcttggaaaagtagccagatgttctgtgctcacttaatagacatcaaacaaatcacatgcaaccacaaaatagattctgctcatgaccactggctgaatcaccgggagaagaaaaacaaagtctcaatcatgtttcttagcccagttcctctttccatcttcaaactgtcttgccattgaatcaaagccttccctagaatgacttgtggtgtagtacatggtgtcaaaattctagaagaaggtagatgtgtgacaatgagggcaaattccctaatttctgtaaacttggcttaccctttacctgtagtatgggaacaagaatatttctttcatgggacagttgtgaagcttcaatcacttaacctctttaagcttccatttcatgatctgtacaatgggcatatgtatagttatattttactcataggatacactagagatgcctatttaatatccttcctgctctttttccttagt

SEQ ID NO: 60287 - DNA, 2171 bp, Bovine  19866880636660
  misc_feature (1)..(1): n is a, c, g, or t
ntggaaggaggtgattagttgtaaattctttgttatatgaccctttacagagagagtttgcctaccgctatccactgctgccttagggtttgcagggacacaactagagcgaccacttgtgctaagtcatcagaggaagactcccaaacaatcacgagacggatcagaacagcaagagcaacaggcccccgtcttcccccaactccaggcctacaattcacaaagggaacaaatgaaagaataaaatcaccccagtttaagcttcccaggacaattaaacctttagcccctgctggcccctctgcttactgtgttcgtgcaaagagcaacacaggaggccagtggtgggtctttctctgcctctctttctggtccaatgcctcccaacttcctttcttcctcccagttcacccattgcatgtctggatggccccatgtggcttacaatgcttttggggaggcatattaatgtccactgcacatatcaaactctgctcaatttaatctctagaattgaccagtgtattgattgtttaaatgccaatattgcaattcatgacaatgtcagggttattacagcaacccccaaggagaggaagaagctagcttttactccctgatcgttagaataaagcaggggctgtcaccgttattggtttctctctgcaacagtacagggacatctaagatgcaggccataaaacatgtcttataaatggtgaccaaggaggagccgctagggagtcacatccccatcactgcttcatggatgagtgagttatcttggctggatggagcatgcatgtctaggtaccagcagcagagggtcaacctgtctgtaatgtgctgtgatgggattcctgattagttttatttggccaggtcatttgggaggctagctcccttcaggaagcctgggaaataaaaactaagttcagaatagaggccggaaatctagacgtgtggagctagggaaagcaccagttagcagagtggccgttcactgtgctaatcccaggagcttagatctggtgtccaacacacgagatcctcagactaaccagagcagtatgacctggagaacctggtaaagaccccaattcccaggatgtagccctggggagacggattcagtcagatattagacccaatggagaaaccacttgtgtgtatcttctttttcctatatatccttcaaggcctagtccatgtatgtggggccttcacggccattaaccccttctcagctcaacctgtttgtatctaataagatttccctggccacttaaatacatgctagagtgaaacagcactttgtgtcttgccacgcttagcttttaatatattgtttcatggtacattttatcttttaattagatggtcattttctcagaattatagccatctcgaattttcaactccaaaagcacttagtatcctacatgcacaaacaatcctcgtgcagctggctctcgcaagcattctcatctctttgagagggttatttgacaacgggttttttggaccaccctgtctaaacagcacctacaagtccctttctagcccatgcatgtgtgggtgctccgttgcatctgacgacacggactgtagccctccaggctccttggtctgtgggatttcccagacaaggacgatggagtgggttgccatttccttctccaggggttcttcctgacccagggattgaacccatgtctcttacatctgctttactggcaggtggattctttagcactgtaccgcccgggaagccccttctagcccacactgctgctgttgttcagttgctaagtcctgtctgactctttgcaatcccatggactgctacagcatgctgggctttcctgtccttcactatctcctagagtttgctcaaactcatgtccattgagtcagtgccatccaaccacctcatcctctggttgcccccttctcttcctaccctcaatcttccccagcatcagggtctttcccaatgagttggctcttcacatcaggtggccaaagttttgaagcttaagcttcagtctttccaatggatattcagggttgatttagcccatgaccccattttattttcttcatagcattttatcaatatctaaaatgttattacatagtcattgtctatcttgagatctggtctttgt

SEQ ID NO: 60288 - DNA, 2249 bp, Bovine  19866880669529
  misc_feature (1)..(1): n is a, c, g, or t
nctgtgtgacccacggccccagtaatcgcctccaggtgatgctgtctggaaaagctctgagacgaacagctggggcagtgaacatcaggcagaaaggaggatcatgggagtcaaagggtttctgaggatgattttccagctggcgtgttagattctaagcatgtctgtgagctctgggagatgggcaaacaggaagacaacaccctagatccaggaactcaagggtgaaggaatcacaaagttcaaaatggcatgtgcgtttgtaaagaccttctgtgattcgtggagtagtatataaacagcccgtctctccatactttctttggtaagaaaggtgaatttctactcatttcatggatgaggaaattgaggtttcaccagatgaaaggctaagccaaggacactgggtcagtcagtggtagagcaaagcccatccctagtccccagtctcgaattgaggctttcaaattgtggtgctgtggagaagattcttgagagtcccttggacagcaaggagatccaaccagtccatcctgaagcaaatcagtcctgaatattcattggaaggtttgatactgaagctccaatactttgtccacctgatgagaagagctgactgattggaaaagattctgatgctgggagagcctgagggcaggaagagaagggggcaacagatgatgaaatggttggatggtatcaccgactcaactgacatgaatgtgaaagtcgctcagtcgtgtctaactctttgtgaccccatggactatacagtccatggaattctccaggccagaatactggagtgggtagcctttcccttctccaggggaatcttcctaactcagggatcaaactcaggcccgtgtcttcaaaaggctcatggtttaatgtgggagacagacaagaatatacagcaaaatataataaaggcagggtggcgacctaccaatgtaggctgagagaacagagagagccctcattgcctctggtttgggaggctgagcctgggctgtgaaggatgaggagaattcttcactacccacccttgtccactgtttaccaggtgccaggcatcatttctagagcattatgcctattatttcatggagtcctaactacatgaggagggaccactgtttcattttatggataaggaaattgaatcacagagatataaagggtagtaaatctagtaagtcctacctaattgggaaggtatgaacctaaatggcttagtttccaaatccattgtatttactgcttcacagggcagtgcttaggccattgcaagtggctggagaaagaggtccttagttgacagtatgagagtgttctggcacttagtcatgaaggcctttcctgttgtagactagaaccttgcaggtttttgaggaagcgataccctaacttgtgttttgagaggatcactgatgatgctataaggaagggtttagaagcctgcatctgggccttctggagacactgacacataaattcagaggtgtgaagagaaggcttatccccgccttggcctctgcctaagtcctttgggtaccaaatcattcagggtctctgtcaaaccgtgggccagatgtaggctaaacaatcttcccaagaaggacatatagcattcctgacatcagttacatcgcttccctcaggtgctggggaacttgggataagacgccatgagccctgaggatctacccagggtgtgttgagtagacactttccacaaagagatagcccccagccaggctagtgaggataaatgacaatgccccagagagaaactgaacactgtgaaaggagcttcatatcctaagacccaggaaacatgagcggtttgttttctgaatgaaagtggagatatgattggagaaaaacagattatcctccttgtgggcactaactgatcattaagtgaaataaactcatctgcttgttaagttccatcccctcccttttgattcatacctctcactgggtctttttgttaggattgccagcttgaaaggttttagtaatagaaaacggcaaagtggccctgagtccactcagagttggagacagaatgccattcttacagttccgtccactgggcagaatgaagaaggaaagccaggacagcttagctgagtaaattcacctcttaatgtacaaacaaatcacaagtgacaggcccccacaggactggagaggaaagaaatggtgagtctcgtcatcccagggctggggtgagttgg

SEQ ID NO: 60289 - DNA, 2388 bp, Bovine  19866880675323
  misc_feature (1)..(1): n is a, c, g, or t
ntgaaaagactgcctttgctggcagaggtttaggacggaatgcaggaaaattgaagtctttcccaaatctgcacatgcttcttgctgctgctaagtcgcttaagtcgtgtccgactctgttcaaccccatagatagcagcccactaggctcccccatccctgggattctccaggcaagaatactggagtgggttgccatttccttctccaatgcatgaaagtgaaaagtgaaagtgaagtcactcagttgtgcccaactcttagagaccccatggactgcagcctaccaggctcctccatccatgggatttccaggcaagagtactggagtggggcgccattgccttctccgacatgcttcttgagcccacgctaagtcatgtcggacatttcagtcatgtccaactctatacgacctcatcgactgcagcctgctaggctcctctgtccataggattctccaggcaagaatactggagtgtgttgccatgcccttttccaaggaatcttccccacccagggatccatcctgtatctcttatgtctcctgcattggcaagtgggctctttcacacctcggaagcccggtcgagagcagaggactgtgctgcagctggcaccatgggggataaaaagtgaaatgaccatcacatcccctgcctttaccttttctggagcgtaacttgcatcacatttgacttccgactcttaacatggttgcatattatatagtatagtctttatttttttgcatgcatcgtcttagtccattggacagtctgttaataaaaacagctagtatttattccagttgtgctatgcactgggccctatgataaacccttgcatacatgaacttggtccttagagcaaacctgtaaagtaggaattattttcccattttacagataaggagatgcgggctcagaggagctctctctcttgtccaggattctgtagcttgggagtgggggaaggccttccttacccaaaatctagtctgacttcatgcccattttcttacgctgttcttctgcctctgttctgacccttttgagaggtttggggttttgaggactgggttgggaataactgagccacttttactgctttatgttggcatctctctaactcatcctgttgtttcaggcaggcagggaggggaagaggtcttacttaaaaacacacagctcatagttcctccttttctcactcttccttatctaccgccagtttctagaactagagctagcgtggaggttcccgagtcccagactatcctagcaacttggggactggatctgctccacctgaagagagagagagagactgggggcaggtccttgatcagtagagctgattggctcagggtcccgttctgggctccaccgcctcagttcacattgtgctcagccacatgttcatgggttgctttgagcacggtcattttccctgtcataaactcagtcttctcacctctcctatggggataatgatagcactcacctgagatgagtgtagtggggattcagtgaagtgtaatgagtgaccaggcacacaggaccagctttgtgaacagaagccatggttatccacagcctttctttctaacctccctatcatattttaaaaccccagagaagaaaacaaaccagaatggaaccaaaaataaggcagtgggatgtgaggacatccacgtcggcaggcagcaagtcaatgcttattttaattcctgttcccacacaccagcttattcacaaaatccttatcctgcctcactaaaataaatgtaccttgaaatgagagatggatcttattttgagacttgaaaaacatgctctggggagaactcttgtctgtttgtctcattcttgtgggaactgtgtccccagggtgggccagtgggctctgcctccttgtttatggatatgtctttgttgaggggcatcttccagaagtaaaggcagccagtagaggaaaaaatggtacacagacatcagccagtcatctaactgactgttattgagtacctactgtgtgcccagtcctggggtaagagggacacatgcttggccaccttctttcctagttttactgtgatttccaaccttgcccacctcctctctgactgatgagatcagggtatgacgaggagctccaatcactgtgttcgaaaactagagctgttctctagtctgtgtcagacctggccttaggcctttcagtaaactctgctagaaaatagaaaactttgctaaaaaagtagaaaaatgagttagtgtccagtcatggaacaattaaaatgattgagtatctgcttataaatgtatgcctgggcaggactctctgtgtcaaaggggttaaacaggacgtaaaaaaaaaaggaca

SEQ ID NO: 60290 - DNA, 1025 bp, Bovine  19866880681137
  misc_feature (1)..(1): n is a, c, g, or t
ntttttttcccaaaatagttggcaagtttccttttcccttagtaaccatttgaatattctaaacccagtaatatatccatgaagcactctgcctcttcacttttaaagaacatactaactataaactagaagaaatcagtagcacggtaagagattacttataaaataatgcattcagctcaagatcttaggaaaaaagtagtctttacaaccctagaataaaagatgatttctactttagtgtttatacttgaatagtcagagaactaaaaaagattaaaagtgataaaaattttcgaatcattttctgggggtaaaaaataacaataataaaacaaaataaaaaccaataaagcaacagatagaaaaggaaatcatgtacaattatggactaataaaacttgaaatctgcggtgagagggatgacatttcaaaaaatgtaaactttgtaagttcatacacacaaaaaagaaaaccattacaggataataattgaaatataaattgaaattttttacagatagcttcccctcagcgactttgctcccatataatttattacatttttgaaaacatgtacattatattgaaattctaaactattccataatacacaaaaagatgcaaaactatgaaacttgctataagataatcataaacctggtaccaaaaactgcctctcaaagcacaaaagtaaaataatttccctaagattagtgatactaaagttctacataaaataccaattatatataattcatccctgaattaaaataataacctagagcattgtggttacacttagcaaattggatagaataatttatctctgcctcctctcaaaatctcattaaaataatgctaataatactaataatagcataacactgaatggggaaaaatagcaatatcccacgtgggcaaaaagaaagggagaaaaactatagcacgtaagagaaaatcacaaaacgctagtagatgaaaagtggatattctgctgaaaattacctgacagagctcagaaa

SEQ ID NO: 60291 - DNA, 1458 bp, Bovine  19866880719742
  misc_feature (1)..(1): n is a, c, g, or t
nggagaccaggctcactgtaggggaaagaagggaagggaacgcagctggtgccaagagaaatattaacttgacatttagaaagcagtgaatccattcaccgcgctgcaacaatgaggtgtttgcatcatgagtcaccttctgttttcccattgtctttcctcctcagtggtctgacccagctaaagtcttggcagtttaactcagcatgataatgaaagggaggcttccgatcagttcagagttaatctctctcaccctgtctctctctcatacatacatcccctatacacacacacacacacacacacagtccccagacatatagtgattttgttcaaaagtccacttctgcctggttccttctttgatgaccctgaatttgcagttccagcccagacaacttgggcaccttaaaatgcttctaccttggcctggctttccagctactaatgaaaccatttccaggcaggatggagcattgattgaaattttgctgtatgcattcaggaaggccaagaacatgacaaaaatcatctacatagccacgcatggattttagtatttcagggcttttgcccttttatcctcttcccagaggcttggagaggtgggtggggtggatgccattctaacttcagaagctaagatctggatggttataaagtaccagactcagtactgggttatttgattgtattgtatcattcagttttcagcaggatccagtgggtcccatttaaaagatgaggcaactggaggattttggagtgttctcagctgggaattccagaactgggaaggattccatatctccctgactctacagctgccatcctgctggtgcagggagcatggaccagtctggagtatgggcagtatccggtgtgcaccccttcctctggtctcatccactccagtagcctgtagtggtccatggagagtcctgagtgttaggagggaacactccttttgcttcaatgcccatgctgcccccagaatcctcagagaagatattgcttcttatctccttgtcttattgaaactggatcttggcaggcatctgaatatctgtttcaggaccaagaagctcacaaaatgtcctgtccagaaattgcctccaggaatggatacaggtagatgtatgactgagttcctttgcggtccacctgaaactgtcacaatattgttaatcagctatactcttaatttaaaataaaaaggtaaaaaatacacggcctccaggccttacccatgacagctataggccagtggagggttctgttgctttgctcccagtctcagctctagaacacacccttgaatccccttgaatcccttgaatccccaggccccaggcccctcaactctacattatgagggaaattctacaggcctgatatgacacctgacctataagttttagcagtagtatgcaaggcaggagagagaaacagaaa

SEQ ID NO: 60292 - DNA, 1558 bp, Bovine  19866880724939
  misc_feature (1)..(1): n is a, c, g, or t
nggaaagagagtgtcttcctcacctggtcagcattaatagtacaccagggctttgtgccttgtctgagtgttcccacaggtctctaaaccagtctttaccgtatccatgggctaaatgaaattattaaattttgactacccagaagacgaagctgccaggtataacacttggaaacacactccttagtgaaaaaaaaaaaaaaaatttgcaggaaatacgtgtaattggtttccaagagccttctataaaataagttcaaatctttaattaaggagatgggacaaaagcatttcgtcttgagatattttccctctacctttgtggcttctgcgtgaatctcagaatgtgtgcaggaaagacagagaaaactgtgctcccattctgggtaaaggagagctctgttgtttgcatttggttagaaggcaggaaggtaagtcatctgactttgccaaatatggcccagacagcctcatgcaggaaccactcagcccatttgctggcagatgactgcattgtcagcgctgcgtggctgagggtgactgtgtggtgctgatgactccccctataaacctggcatcagaaggcaaattccgagtgtcatttgagcagtggagaagaggagagctggattgcaaggacctgtcgcccgttacctggggccacactgacttgggtgggggtttgtggaggcacaaatagaactgctggctcaccagggagatagttacagtaatgcagtgttaggtttcagacattactctctgttgcttggctactctcagccccctattcaggttggatattcttgttctgggcatgggccataacttatcatagtaagcactataaatgcaagctatgagcaagtctttttaggctgaacaagtgcatcttgaggattctttcacagaattaaagcacagggtccctatacttctgggtggttatcaaatatttctaggccttagctttctcttgttagaataaggatgataatgccagtttttgcagagttattgtgggggtaagaataataaatgtaaagtacctgtaaccatatataactcataataattgctagataaatcatatttgcatatatatgtgcatttattgaacaattaacatatgcatgtgtaaaataagcatatacacacatatagctgtagtaataattatcatatgtagttataatcagatgaatgagggctgcaggtgaattatctagatatatgagtatcctttttttcagaaggaggcaacttgtaaagtaacgttctagcaaatgattcacctggagatgtttggtaaagtttacttctacctgactctattttaaagctatatatatcatagtaatgaaacttatgagctatttaatactccatgtagagcaaaggttaaaagaaacaattttctgtgacataaatattaatagtaatagattggtagagggggttctgatgatagtaataataatatcatataagaaatgaatcgccagtccaggttcgatgcatgatacaggaagcttggggatggtgcactgggatgacc

SEQ ID NO: 60293 - DNA, 1449 bp, Bovine  19866880744220
  misc_feature (1)..(1): n is a, c, g, or t
ngcctccctctagatcaagtacaggcaaagcttacggtgaaaggtggtgaaaggcaaaattccaatagcacaactattattaatctacttaagccattaagtgttgtccagtattagattggaccggaaatcctggttttcaactctttcctatttgaacgcccgagaggcgtgtcagcaagtaagaggaaatgcgggaattggctttcagtggcctgaggagaggagcttaaactcctagatttatggctctgctttacctgaaacttttattttgcttttacttttatgtagcaattgagtgtactatattccagttggtgcttcttaaacattctaaggaagctataaaagtaagtatcaaccaatttgtacaatcatgttcatagtggtctttattgaacagtctattatgtgggtgcaccctagaagcccccaaaatgtatgacattttcagaagggatcttacagggaaggaggtagaatttctagtgtgaatggtctgtttgtaaactcaattattctagcttttcaaattctagtagcagaggaaaaggcaagcaaagtagagtagtgggggttgggtcctcattccactcatgtggaatgtacgtgtggcttctcttctttggccaaagttttaggactaacatatacacattactgtatataaaatagattgctagcaaggctctgctgtatagcacagggaactatactcaatagtttataataacctataagggaaaagaatctgaaaaaaaaaaagatacatatgtatatataactaaatcacttttctgtatacccaaactaacacaaactgtaaatcaaccatattttaatagaaataagtagataagaatgggttgacctaaatatcctcagaaatgattactacctctaaacttctatgtatcaacccttattcagacaataaaagtgaacatccaaagactactttggccaaaatgaaattatatgtcagtgtcgctaagcatgcctcacacttctaggaaggccccatagtattctttcctttgaactttctggtttcattcatatcctgaagtgaagtgaaaatcattcagttgcgtccaactctttgcgaccccatggactatacagtccatggaaatctccaggccagaatactggagtgggtagcctctcccttctccaggggatcttcccaatccagggatagaacccacatctcctgcattgcaggcagattctttaccaactgagttatcagggaagccatatgctccctttattgcctgagataaactgtctattttggggggctccaaaatcactgcagatggtgacttgaagccatgaaattaaaagacatttgctccttgaaagaaaagctatgatcaacctaggcagcatattaaaaagcagagacattactttaccaacaaaggtccatctagtcaa

SEQ ID NO: 60294 - DNA, 1446 bp, Bovine  19866880747366
  misc_feature (1)..(1): n is a, c, g, or t
ngaggaaggaataatttgccaacaggtgctttttcaagctactaactcttggtatttcctctgttccctgtaacactcattgcagtgtctgatatcatgctgttttactttcctagcctaatttgtgtatttatacatcattttggaccatgaactcctcaagatcaggggttgtgtccctcttctttgtgtagaatctgtaatgcacagccaggcacgttgcttttgcttaaaatgatttttcccttgatgaacaagggtgattcacatccctggttttgatgtgcgaggacttggaaatcttcttaacctaagaggagaaaaagtttctgccaaaggacggattgtcatgcccttccccatgcacatcctgtttttagtacattctgaataaagctatgctaaaggtataaaccaatttgcccagatcaaaagcaagtcccactttgtgattccaaagtccttggctcatgtgctttcatcagcacattcttccaaaaaataaatggcaacatgaattatgtctctttctgcccatatcctcagtgtccagcatatggtaatattcactaaatatgtgttgaagacatgcggaaatgaatataagttgggcttagctcataaaccctttgttctgctcaaaacctttgccaactggttcaggcagttacagcatctattaggcaagaccttgagctgtggagctgcccagttcaaatccacatttagcactgcttagtggaataatccatctccaatctcagcctacatcccctaaccctgatttgtcctgagcagaaggaggtccctgatatgagtttgaatggcaggctttactgacccccaccagttccatcagcctcacccatctccgcctataggctctgagtgacaggagctgaggactgaaatcgtcatccttccacagaaccagggcagaaggcacaaaaccatctgcttaatggtcatgtggcaacagataacatctcaaaagtccttacagtatattacttcactgatgaagatggatcacacttaagcagcgattcttgatctctacgaaacagctcatgcacagcaggacaatctcaaagataagacaaacagcagcaagctggtctgggactatgaaaatgcctgccgagacatgatttatgtgaaaagaaatgaggtgggtcactcctttatcatcaacagtaagtggattcttcctgccacagacgaacggaggatgtaaacagacaacacacttgcattattacttacgctgtttttctttaccaatggcctgcctgagatgtgggtttacaaataaagtcaacccactattattctggactgattattcattggggtggggggcgtggggggcgggttaaaagaggacacccctgccctcatcttccaccagataccctccttgtggctatttcactgactgcatga

SEQ ID NO: 60295 - DNA, 1686 bp, Bovine  19866880759928
  misc_feature (1)..(1): n is a, c, g, or t
nattgtacagtacaaggaataagccatattttatcataactttaaacagtgcataatctataaaaatactgaatcactatgctgtgcacctgaatctaatataaccttgtaaatcacctctactttaacagcaagaaacacataatgggaaactcaatcgcatggtccttcctttcagggtctgactcaagcagctctctgaaaatagacccttcctccctctgctcaccctccattgcaagatcagactcggttcctatcttttggaaccacagggacagagtctggcaagagtcactgttgtaccagctgatttaaattgaaatgttttccccagataaatgtgtgctaaataatacaccagctctccagccaaagggaagtgacaggcgctctgtaaataaaggcacttagttgctggtaaagagctgtaaagtggttctgagctgatgtttgctgaccagcaagaagcggcttcacctgctttatataattgtcactgcagtcttgcctgctgtatattaaaactgcatctcatagacccaactgtcacatcggatataccatccagcatggagtatgccgcctctctctgtaattgtttctgacaaccagccatcacatttcagatcttttcagaaagtatctggtccagaatccctatgctgggccagccctgacaccatgtgggctagaacagtgacaccaaaagggaatgtgaaaaaaagaagaggaaaaagagcttttgtgagtctaggagagcaagtgacacgcaatgtcaagtgtctggacacaaatcccagggaagactctgcctcctcaatgttaagacacatcttgtttcatttcatgttagaacaacttgccgtaaggctgcatgaagactgtggccccagaggatacacatctgtcctgggtccacagttctgacctgctatgttctggagagatggaaacatagctctcaaggcaaaacaaaggaatggatctcataaggactacaaaataaagagtgatgaaagtggggagtggcaatcaacctcaatagctcagttgtgtccaattctctgtgaccccatgggctgtagcccaccaggctcccctgtccatgggatttcccaggcaagaatactggagtgggttgccatttttccctccagggtatcttcccgacccagggtaattccaatccacttggagcttggtcatgccaaatgcccagatgaaaggtaacaaaagtatctgagaccaggggacgttctagtgggtcaccggggtctcaaggagggggagcagttggaatctcaatttgtccatctgaccccatggattgggatgaacccgagaagtgggctgtacagtgagcaaccagaggtgaatttacaacacccacccatcacggagtgactcctacgttgacagccaccacagggccaccacttttagaaggtcagagtgtcaccacagggaagtgttagaaggtcaagaacaagagagaagcaggtagaataagaaagcaagagggaatatggactcagtgaggctacagcttcaacagtccttcattaagagttgaatgaaatgcttgctggttactggggggatgtacactccactccagtgccaaccaggagtctctgaagactaccaccagccatagagcacatcctctgcctcttctggggg

SEQ ID NO: 60296 - DNA, 2386 bp, Bovine  19866880762574
  misc_feature (1)..(1): n is a, c, g, or t
ncctcactctcccctggggactattttagcctcatcctaacgtcagtctttcttctgtcactaaactgtgtggttggcatagcgaggctttgtttataagacgatcttatgtttatttgtgtagccctttctacttttcattggaattactgcattgggttctgaagtcaaacctcaggagtctgtctatgggtgacctcatcagtacagtcgataccaagggtctactctcttcctggggaaagtcagcaaagatgctccctgtgagtaggaagacgaattaaagcagaagctataaggtaacctcccatgataagccacagattcattcccaagaataaaaagaaagtccattagacaaattataattaagcatagtaagcaagataaaaagttctatccacatataagatgcaaatgagaagcgagtaagaaagcagaatataaattcttaaagtgcatccctttcattcaaaactgtcaccagttttacacactcgtggtttgcctggccatctgggcatcttggaaagagagctttaagcatctcttggaagttacgctaaatcatcaccctggaaaaaagtgcctcgtattcttcagatgaatttcagttatagtatttatacccttcgagtaaatggaagacaatgcataggctttcccttgtgtgaacctaattggggagacaatgaatggttcatgaaatggcttgtctgagtgagttttaaccaaaatgttggggggtgctcaagttcaagatgtgtggctctctgcacctggccctttaaatcatgcaagaaatacacgttaatatagaaaacaggctccattggtcattgtggccgactcggtgtcaaggcaggacagtaagtgcaggtggtatgaataaacaggcagttcagataaatgtcgtcatcggtgggtttatgatcttcttaacctttcaaagcttatttcaccatcaagaggcagtgggtaagtcatttccaaagacgactgctacacttctttccttttccattgttaagccaagatggatccccacacaggtctttttcattcaggggtttgggaagcccttctttgggtttaattttcttagggtggtcaccacagaagaatcacgtgtgcagcctcaagtgattactatctgcttgagacagattgtgctcagagctcctggtctggaaagccaaagagaattacatgaaaccgtgttaacaggtttcattaccccagcagcagtctcttaagaaaccacccaagcagagggagatgttccacccaatgattggatggacacagagaagcattaagcccactgcacacagtaatcccacctcccccccaaaacgttaaatggccacacgaggcagatactgtcccagagaactccatttccttttccttctttttctcctcctagttttattgagatatgattgatacacagccccgtgtaagttaaggtgtacagcgtaaagatttgacttaatgtacgtcataaaacagttaccccagtaagttcagtgaacacccattatctcatatagatacaaaattaaagaaaaaccatttttcttccttgtgatgagcactcttaggattgactctgttaacgactttcattttttaaaaggcacctgatttaaggcgcttcagctcctaattctgatgtctctccatacccacatcccttttactcctacacactctgatcatctgtgaagcaaagattttttttaaaaattgtacaatgtagtgaaaagtgcccctggacatcccatgggtgataatgttactgttgctggtcccatccctctctagttcctccctttgacgtggaaacagtaattcttctctaaaaaaaaaaagacccaaagatgtcagtgtgagggcaggatccacggattgcataatgtatacgttcctgctgcttctagaattccaagggaactgaggctgagactcaggggcctgggtatttgccttttttccaagggcattcttggagagatgactcaacctgtgtgaagatatttattcctgcgattcgtgtttaaactccactagttcttgcgttgcagttaggtggattatgaatatttaacgttgcacacgctgaaaatgaaggtcaagtcctgctcactggtgacttcattgctggcttgcgtctctaaaaaggcaggctacctgctgtgagcagagtaaggctgaaaggttatgcattgttaaaaatttccttaatgactttatctgttccgaatggctggtgcacagtgaggggcacctgctgatttcattggtctttgctctctgcttctggtgtcagaagtgctgttccggagggttgggacattgggcggcggggggggggaggcag

SEQ ID NO: 60297 - DNA, 1455 bp, Bovine  19866880770250
  misc_feature (1)..(1): n is a, c, g, or t
nggtgagagcgtgtctatgaggcaccgccttggtgcctggcatataacaggtgctcgagaaatgggagattccgccccactccccttctgcacaaggcctaagcacagtgggtggggccagtccttcccctccccaaggaaacccgtatgtgaccccagagatgtgtctactgcagtgttcttgatggggacatatctcctccaaggaggcaaacacaggtaccgggggcggaggtggtaaataaaaaataaaaccccagatatacatactgtacctaaacagataaaagctcaggtatacacacagtacctaaacagatatactgtatatctatgatattaaaatttcactgggcgaagggtagagaagatgattagggaaaaaatgcaaaaaaaaaaaaaaaaaagagactccacatcagggagtaatgaaaaattggttgagaagccctggtctgatattacctccaatcaaaacacagacagcctctctcacacccagctcagccgagcctcttaacatctgtctcttaaatttcctctcccatgtctcttccaaatcaataatacgatatttttgaaacttctgtcaaatccacattcatgcctcctcagctcccttcccagcctctccactccttcactgatctaatctgcctcctctcctgggatgtgagccgtgcaacaggctgcagagaaggcaggcagtggagagctgagagactccagtcccagtttcccatgacagacaggacagagttcatccccacctccagcagcagcagggcaggaaggagctgagtgccccggcctcccctacccctgccacttgccactacctggatgaggccgccagtccaggctggcctgcatcttccatgggagctaaaggcacaccctcttagtagggggcagtgggcagggaatgaagcttaccactgggtgtgggcttcactggtttgttggaatattgtagacactgcagttaggcttgcccaaggtggatttctacctgtcctagaggcttaaaggctgcctactcacctcacttgtagctttgaatggccatgtcatatactctgcatgggaagaaggctgataaggaggaggaggaggagacagcttaacctgatgctgcccttctgttcttcctaaaatacacagtagttatgatgtcgcgccttcttcttgcaaccacgaggaaaactcaaaagaatctcgacattctagagaggtccaccttgacaggatacaacagctgaactggcggcagcagccacctacgtctagacttcattttgtgtagaagaatggtgctctctgttgatcccctaaagcatcctaataacacaaggtcaagggtgagatacataatggtctcccatctgctttctctgcagtctctataccagtgtatctctactacaaaagacagcaccatatgtctctcatcat

SEQ ID NO: 60298 - DNA, 1806 bp, Bovine  19866880781772
  misc_feature (1)..(1): n is a, c, g, or t
nagaagggagactgaatcccagaatgatgtgaagtccattggagagaaaggggaatgggaaagaaaggcagaattactacccagcacaggtcacctgcacgtccaggaggtggtgggggttcagggcagttatctttcacaggatgggttctgcaagtaaaagattggccttcagtgacaagcgcttcctccgcttctcccacctcctctgagatgtaactcagggggcactttccatttataatttatcacattttccacttaggttttcctgtacttttctccccaggcatgaccccttgttaattcctggcaatgatcagattgacaacatggactccaatgtgaagaaatatgactctactgggatgtttcactggtgtgcgcccaaggagatagagaaagtcatcctggtgagtgacaggttgcagaatctgtgccatccgcttctgtcccaaattatatttgctgtgaatgaagttttcctagctgggtggtggggtgtttgttcctggccctaattatttttggtaattaacattcaggacatatgttgaagcagctagaactcgtatcagagcatgacccaagagtggaattttcgatctgtgaatatgtattggctcattaccttagggtgtgaaagccatcgtgggagcagtatgtaccatatcctgcaggcgtggttgtcaggccagagcatgcctatgccattagctgtgtggccttggatcagtcccttgaagaatttgtacttcgtctcttatgtggaggaagatgggatgagaatgaccttaactcatagaattgtagtgaagattaaaacccaacataggactccataaacttacctatttttattatatattaaatgccatgaagaaatctgaatgctacctgtatcgtcatttgtttataatagtgtcttgtatctttctagataatatatttgcatatttgtgatccttcttagctcataaggtaggcaggcaaatcccacttgctgatgatgacaaggatgaccatgatccacctcagaaaggctggagctcatagccccgtttcctggttgactcatctcagtagcaggggtgggcttcttctggtctgtctcaggaatgctagaacagataataatccatgctattctttagacttgtccgattaacagcttaaggttttacgcctacatcggctttcctaccagtttattgtcttgctaatccatgcaaaatggattaataatcaggaaggtcagatggaaaggctcttcctcccttgtgctttctaatcctcagattgctgaggcctgctcctttatgtcagccaggaaaatcctatcattgctgatgttatggccactgttcctaagaaaggaaggttccagttcctcagaatgcctttgtgctctaatccactaggttttcccctgtgttttatctgaatatgtgtgtgacttctcaatttaattataatcgagcattaagaaccaatacagctctgttctggaggttgtctgggaggtgtgaaagttgcagacaaaagcatagaaagtcagaattctcaggaagcaatccttttccaaggagtacaaatggttctcattacaaagctgctgctcttgtttatattctgatgttgtatctgccccacttttgctctggggatgtaaactcatcctggtgttacccaccttggggcatgtcagaagctgggttgacattttgggatgtaagctttcaatggcttgcctagataatcctgagaagtgcatggctgacattcaaagcaccctaccagccccaa

SEQ ID NO: 60299 - DNA, 750 bp, Bovine  19866880785578
  misc_feature (1)..(1): n is a, c, g, or t
nacatcttcctggttcagcagcatttagaaaaaaagcatgatatttcatctgacattcttgaaggtccagtgggggagtaaaaaggggtgggatggaagtccttactctactgggtaaaagacagcatctgaacagcctcagctgaaagaactgcatcatcactttcctccccaaccatatgctttctccctctctatctgatttatgactcccaattaccacagatcctttggctagggtgctttccaaatgtcttcctactgctgaatgtttgggtgctgatatctcccgagggaaaagaagagacaaagaataatggtgtccatacttctgttccccaccgctgccatgccatgcaatgtttctggttttgttttaatcgtctggaacaggaaacccaagctgattctgtttccttacctggtctttaaagcaagacaagttgggattacattcaccagaaaagcaggctgattgagtgaaaaaaaaatactcaaaagccatatatttagcaatgctcttgtatattcacaaccatactattctccagtggttcccctccaaaaggctaacagttaattaggaagaaggatacaaattggaggacctgttaatcaggtcataatgagtgtggaatgtcctctttttctagtccttcaaacatgacagcttccagaatcctcttcaatcagaaatgcccatgagtttcagggggaaaaacatagctcatggtaggatgctagtcctaa

SEQ ID NO: 60300 - DNA, 1045 bp, Bovine  19866880791418
  misc_feature (1)..(1): n is a, c, g, or t
ntgacggcgtttttctcttcttttgcaggttgtcttagtctttgctctcgcattggtgcacttgtaatatacttcatagattcgtcaaagtgagtattcagtatgttttcttgccctcttttctaaaacaatcacaaacttttacattgatctttaacaccagcctttgcaagagcctccttgagtgtgggagacttttggaggaaggcagggctgtctgtgttaattttctgaatgggaaagcaagctctcatgagaaagactactttgattatactgtcctaggagggtgagagaggaatctggggtcatcaaactttttcgctggctgttactgcttttaaaatagctgtttcctggtgtggtatttgcactgaaggtagaaagaagtcaagaggtctctgatgtgaatttgcaacctctgagagggtcatggtgtccaactggtgagggtgtgagccatgcttgccatggcagtttagaatccttttcttattagggttgccaatgctttgctcttattggaggtcaacttagaaagcatgatgctgtcctttgcactggcagttgaatagtcaactgaagcatcgctggctggtgcttcttgactcatgaaggtaaggagatgggacagaggagtttgtgataactcccagagtggaggcccacggctatctgagaattcctagagtgcacactcatgcagacgccgggggtgccagctgaggggactggtgctctgggtggggtctgtctgtgtcacacacagaaaaggttttgtttgaggcagaagagggcactgagcaaagctgctcagtggtggccagttctgccctggttcccgcaggtgtcgcccccactcccacttgtacatcatttgttgcaactgatctgtcacaggcttgaaattgacagcatctgggaaactggagctgagctggtttgactcccttctgtggggacatgaacctgacacctgacggtggccttaggctctttgcattgtccaccgtgacgagtgtttttgattccctgaactctcagc

SEQ ID NO: 60301 - DNA, 1134 bp, Bovine  19866880794176
  misc_feature (1)..(1): n is a, c, g, or t
ntgttctggaaaccagaacaaacagattccagccacagtgccatctctcactacacatgcaactttggggaagccatcatgatgaagaaagaaggtcatctcagagcaaacaccttaacatttctgctcaaggataagaatttacagtgagaaagctcagagaacttctatctccattggcccactgggacttggcttcaggtcatagacaaagatctctttttctagagtctgctgggaacattttaaaaatccattgatagtgaaagcatcaggagtgacatttttccaagatgtcataaaccatcctttccttcaagagttttaagccatttgcactcaaataagaaaaaaaccctgtgccgcctcctttccatgttgagagatggtgaggttgagtgtttctctccttgaattctactgggggaaacaggtggactttcgagaccctcagtccttctgtaagtcctacccagaggaaccgcaatttggttcaaaagcctgtggctcgactgaatgagagggtggcagttggcagttctgtcttagttcactgtctgccaagtgaccatgagttatacccctcagagatgctctgagacagaacttagacccacggtctgcagtgacactgagatactgaaatgcacagacggttaactgagggttcaacgagacaatggatgtctaagctcttttaaaactgtaaaatatgacacgaatgtctgagattatgatgatgacaaactcagaaccagttttatatggaaagaagactgcttccctacatccctagatcctagaagaccaccatcaacagatcatgggatattgaagttcttcctattttaaggttggtattcaattatggaattaactatcctctggaatatgctgacagtcatgtaagtgtacatgcacgcaacaggttctttcccgaaagcaagtttgttttgttttgtttttttgaaagcaagttttaatggatggagatctattggcatctagttgtgggtaaagagaaagtgctaagaaatgaagaaaagtaatattataaaggcagctaggaggatcttagaaaaccagcaaaattgtaaagcaaggtgaagaacgcctattgcaattctacaagga

SEQ ID NO: 60302 - DNA, 1041 bp, Bovine  19866880826444
  misc_feature (1)..(1): n is a, c, g, or t
ntgtgtctggttctaaaaatgaaagaaagaaataagcatttgcccattcttcaatatcacgggtgatgacaatgcacatttattgagtgcttgttataaaccagactgccttgagtattttgcatattttattttatttaacccccacaagcacaacagtcctaggcaacatggatatctatttcagttttatagatgaataagatgagattagagagactaagtaaattgctcaagataattcagttaggtcataaacagtggaatagagctcatattctgaatcttaggtcatcctgtatttattcccttgagatcctcagaatagaagggcaggtataaactttttcttggcagaaatataggagatgtgattatatttgataagatttgatgctcagtcttttgttctgttaatgacccaagcagggggttagtgatattctagaagccagggatggcagattaagttgccttaagagtcataaggcgtgggcccagaagtaaagatgggtgtgccatgcagaagggttaataagcacctccagtcaggatcattttgctgcaacatctgttgctaacccactgctgtgagagggaatgtcaaccctgatgctgcctggagtaacctttaaaacagaaaacatttgcctgttgcagtgaggactggtgttcttttggttggctgacataaatcctcgtttctatgtttccccactggtgtatttgcatttgtgtgaaggcatagtgagtagggatgacacatatggatggagggtcagctcagtgtggtatcaactagtctcattaataaccactgaactgtaatatcattatgagatggaacttcagatccttccagaaaaatatttttctacacagcaggggaaccctgagtcccagagtgggaaaacaggactgaaaccattcagggtgagtgtttggaggaattccctggcagtccagtggttaggactcagcattatcacttttgagggcccaagctaggtgaacaaagagcccacaagcttcacaatgtag

SEQ ID NO: 60303 - DNA, 2121 bp, Bovine  19866880838924
  misc_feature (1)..(1): n is a, c, g, or t
naaggcttttgagattgagtgagtatcttagaggaaaggggaagcatttttttttttaaaccagtttggccattaaataggatctcagagtctgggaaaaggtttaagagagctggaagaaacaccgacgtcagatgcatatgtgactatactgtatgtcaagatactaaactaggaccttgaaagttatgattactgaattgggaggaaactggcatgctggggaaagggagtcttttccttcccacctgccccccaatttggttccttctccacctgaagggagcacttcccctgcttctacttttttccattccctctgctagttcctgccaggagaagaggggcatctaattgggttgggtcatgtgtccactggaccccgtgctgtgaatgtgaacattttttgtgccttaaagtagtgcacacagtcacccagcgatgctgttaggatgcaggttctgaccacgtaggtctgggtggcatgagagtctgcatttctacatggtccctgtgtgatgcccacgctggggtatgggtgggacgacacagtgaagatcaactccctaaaggcagaaaccaaaaacctagcttgcctcttccttctccaagaagacaagctcactgtttcctctcatcctttgtcatctcagctccctgagcaggccgttcaggaggcaggaaagagtttaggctctttcttcgggccttggcacattgctctgtccagcaggcatgaccgagcaaatggagaccaagatttaaattggggggcaaggcaaaggaggtggagtggagaggccaaaaccaagctacaggctgtatcaaccagggtatgtcaagaatagaagccactctgctacaggtaagatgaaaactagaggctgacactacctagagaagggctggaggagcaaagtcaaagaggccagcattatccatttcacttgcaacaccaagggggaagttctcctgaacttcagcagaacctcgggaccctcagggaaactcacaccccagtctccatttcaagtagcaaagtcagtggttgccaaagtttctgctgagagttgctttgaaccttgcatctgttcaaggtctggctataactgcctcccaagaactaaggcttctttttctctcctaccatctagatagacccagagtcctctctcattggtagactccagcccataaccatgcaggtaaagggattctaggaactatcgttcctggcttcactgtgatgttgaggagacctcaggaggaggcagtggtgatgctgagttgacaaagataatgtggcacataggcctaggctgcaggatggagctttatcaaaccaccaagacggtgcttcatcgcccagtggctatagttctcatgggctgtgcatcgtctacctttactcttggggtgatggcattcaggtccccatcaggcacccaatgccacccatccagcagaccacgtgtgacaatgattttccagctcatggcaaacccacacagaggtgttacttggcagaacacacttcccatccaatcccgtcaaggccatgatgagtgaggttgtttgctgcaggggttcagcagtgctgcttctctgagactcctagacaacatctttacttgttaccatctgtccaggatcccagagcaaatgacaagaaagactggggcagagcagagatggcagatgtgtcatttaaagccaccgcgcctcctacagagaacgcttcccgggctgacaagtgtcacctcttgctaaatggctttgagtgtccatatagtcctcactctccagagaccaccaatcccctgatcatcctgtaacaatgcaaagcttaacacccccgtgcagctctaacaatggcaaagcttaacccaggtcaatggcaaaaatatgtgtccggcagaaacattgggaactgtttggccagcatcatttcagtgctctgacattttgctggtgaccttggtcatgaagccactgtttgggaaggctgagggggtggtgtttcaaaagctggatcattctcgggaaggcagtctattgtgagtgtgggtgttcaggtctcaagcccgcttcctgggcggcaagaagaggcaggagatgccc

SEQ ID NO: 60304 - DNA, 1113 bp, Bovine  19866880900958
  misc_feature (1)..(1): n is a, c, g, or t
nactactcgtttcattccttaggagttctgttctgccatgaggcacttctcttattttgctaaaccattggatggtttggagaaagaattgctgtggaatcatagtcttagaagatttaaaataaggcaaaatgtttctccagggaaatatattttgtgggaaaaaaaaaagcaacaactctgtgtatttatggctttcttcaaccctgatttataagtctaaaataatcagctagagccactggcgagagtaggcttcctggctgatgcagagagaggcacattcagtgaaggccttgtgtccttacatgttgctttggcagggtgttaatgggattacccacgcttcatttggacaaggcttggcccagaatacatatctggatcatacctgaataccaaaggagagattcctccatcataaacatccctgagcccctgcattgatgttaaaaccttggatgcctttgttatggcccttaattctgttaatcgccctaggtaaagattagctgctcttgtcaatttaattcagcttcaaacaaagcaacaaggtcactattttttccccttctctccctctctcccattctctctctccctctctctctctttgccagcacacaggattgagttgtcatgtagctctaataggcagcgtggggaatcgttagtccacctcaacgccctgactgatgggcacttcacttcaatcatctgcctgagcagtagtggcccagtactattgacactgtgtcagctgcaagagaagatgccttaatcggcctcgacaccctctgcattgatttgacaagttgctgtaatgaccttcttgtttttctgaaggattactgtttactcaggaggtgctgctgactaaatgtactgcatcgtcatggaaacgccgctggtggaggctgcctccccaccaggactgggtggagggtgacattgataggagactctgaatatttcaatgaactggtctgtcccaatagtactaattccagcccattaatcagacctgcttctgaagagccaactggaattagggaccagccttggtcaggtcccctgtaaaagacagtttgctacaaaacccattttttcccc

SEQ ID NO: 60305 - DNA, 1730 bp, Bovine  19866880911656
  misc_feature (1)..(1): n is a, c, g, or t
nccagaaggaatttcaactgagtaatgagtccctttgaggacaagcttggtgcctcctggctaaagagaccccggtctcctggtgaccagcgtgccaatgtgatcttgatcttgccctccttgggacttccctgctggagtatgagccatggtttggctgcacaaaaacccccataagatggcacctctttagtcttagggaccagaatgtaatcaatcacctaattaatataaagaatgaataaactgggcttacacattagggatcagaatagaaaataagagttcagtaacacatggactccttccaggacaaacctattatgtctcttggaaagtgggtggggaagagagttgtggatgggaacaggtctcagtagttggtccttgtgataacttggaggggtcattctgacatcactccccacacagaatgtggcccttcaggtggggtgtaaggggggcaggattcaggtgtcactgccataggggctctgaaagtcactcaaccacatctcttctgatacaactgacttactttctgcctccatgtttgttaaatgtcccgccgaatttattccgattcaggatgagagcagcaatttcgggcacgtagcgggcaaacattgcctacatgcatgaaacaaagaaacaagagccaaaaaaaaaatggcatgcagagaggattctaccgcagtggaggcagcaaaacctcttggcatacttactttcttccactaaccgcactataggagcccccgtatttcttgcggtttcctattaactctatgatttcagggacgtagctggcaaacatggcctgaggagaagataggagacagaagagagactaaaaagacaggccaaagaaagggggtgaccttttcagaagggggaggggggaaatactaagatctgaaaacacaaaaaaggactagaactgcaaaggtaacgtattcatgggctggattggttttaaaaaaaaaaaaaaaaaaagagcaagcttctgaagttacataggacaaaaaacaaacattaaccaacctagacaactaaaaaaaaaccaaaaaaaatcagttaagaaaaatgtaaaggagacaggaataaatagacattagctctacttcctgaagagaaataaggggaggcatgctagagaaataacacacacacacacacacacacacaatcaatcattcataaacttacacacaattttaagagaaaacctttctttctaattaaaattcaaatgagaatccatgcctttatgagtgattaaagacaataaacaccaagagaagatttaaaaatatacgaacttttccattaaaaaaagaatcactaaaaagcacacaaggtaaatttaggaaatcacatgggaggaaagaatagtgaggagaaacacaaatctgccatgttttgtccaacaaacattgtgcttgtggctggataacgcggtcgtgtgatctgcagggacctcacgggtaccataggaacgctgagcacatacacaccacacatacatttacatacatttctcaaatgtatacgccatatgcatacaaaacagagtgtgtatgcatgagataaatgcatgtgtggtgtacatatatgaaaagctgtgtgtgagtttaggtttaccttacacacagcaaaaatctaaacatcgaatgggctactctgaaagacaaaatgcagtcaccgccgatgagtggccagaaatcccc

SEQ ID NO: 60306 - DNA, 3636 bp, Bovine  19866880952921
  misc_feature (1)..(1): n is a, c, g, or t
nagatgaactctgtttctctttcttcccatgtgtttgggcatatttcttaatatgaagtatctcagttttcaccatgtgacctcaccctgttttgctgctgttttatgttgcatgaagcacgaccaaatcctcatcaatagatgttttttccccccaactttttgggttaatatttgcagtgttgttttctcaaagacagtattgttgaaaacatactattgagatgcctctttgttcgtcttctctagagttgttttgttctgtggttgtaatcactgccatgtgtttttgtctgtaattgtgtgtgtgtgtgtgtgtgtgtgtgtatctatctatctgaaactctttccaaaatcagattcttctgtgatgttcttgagtagaggtggcttcctgtcagtttggtattattgatatgatccaactgcaagaagttactgcaacactttgcatcttcaaaggtccacagtggggcacctctgctgttggcttttggcctttgaccccttttatcttgtggtgaggcatgtcgtgatataggcatgacttgttctgaagtgtatcagaaagtgacacggtttgctcccagaaccaaatatgcatcatggtccttcccaaacgaactctctctcccatcgcatatggctactgttttccttatgtccaaaatagattttaaaatgacatttctaaaattactgagatggattcaggcaaaacaagtccttgcccctgtcactggcagaccacagaggtggtcatttgagtgtgaccaactgggagcaatctttattatgctgtctctgtgtaagtgaattgggctcaaacatattgaagcatggaatactcaccgtgcccttacatatattttataggaaaagtgcgtgtgtctagttgtgtgggactctagcagaatatattttaaacccaagaagaaatggaaagttccagaaagtcaataagatttgtgatttggggtttctttaggctgttcctgaacatagcccataaactgcagggcgaccactggtcaaagtcccacccaatagcaacctctgtgaccttgtgtggtcagaaagaccaccccccagtggcatgattcatctgggcacagtgtgaaataaagtgctcgatgtccttatctttttgctctagttcatgaagtcccattagcttgctagacacagatataattgccatgttatcaagtacaaactgttttctcatgtgagtgatatttttgtaattgctcagggaatggtacgctacacctatcaaaactgaggggagggaggagagaaataaacacctgtcatatttatccataatggataaaaagttcactttaaaaaaatgtgtttcagttgaatgactaatccttggttgtctccaaaaatagcgaccaagtaaagtttatgatgattgaagaagggataactagatgtttcccagttgttatgcgtaagtggtggagaaagggaacaaatcattttgctgtcaagccccaaatccccaggagtgtggtcactcctttgataggcccaactggtgagaattgcagcttggtctttggaagaacatctacaactacgtttctctttattagagaaggaaagagacacttctgtaactgaggccactgcttatggttttcactcattcaagagagttgaaatgtgcctattgcaggcagggctttaagctgattactatgagaaacttcggagaagataatggcacctcactcccgtactcttgcctggagaatcccatggacggaggagcttggtaggctacagtccatggggtcgctaacagtcagacacaactgaacgatttcactttcatttttcactttcatgcattggagaaggaaatggcaacccactccagtgttcttgcctggagaatcccagggacgggtgagcctggcgggctgccgtctatagggttgcacagagtcggacacgactgaagcgacttagcagcggcagcagcagcatgagaaacttgcttatagaagtaaataaaataggattatggttttcagtcttttatttaatgatggtttccctacagaaaataaatatttgctccatagggtgtataaggaaccaaaaaataagtctagatacaaaactaggaaaaagagggggagagtaagaacccttggggaagggatcacaccagccctttgcctccagctgttactgaatgttttcagttcaaattaacaaggtcatagaaaaaaagaggatcatttatagttccttgaattaagaaaaaatccacccctgccaagaagatgtccctattggaattctgctaattgatatttaggcttttttttcttagagattttcttgattcttcacatgacacatcttgaagtttatctctgataagctagtgaattagacaaaattggagcaaaagcctgttttcaagtgaggcacagggagggagacttttggcagccataaaagccaaacaaacttaacatcttttgagatcaaagatctttggaaagatttacatattcccattagaaggtcaatagcatattctaagggtagcaagcatttggcaggaaaaaaagttacttctgtctaggatccttatctttttatagtttcaaagagaagaggatttaatggatttaaactttctagatttggaatgtggatagaagactcactgtctaaaatatcaaaaagagtaatagacttccttcaagagactttgaaactttgtacccttacacaggaagtattatatgcaatggtcccctgaaatcaggggcacgtgcttctttaccaaacccttaaatctatgagtggaatccagcacaactaacttctttgtgtatctagatttctttccttcattattctcgagagctgagctcagtcttttgattcccactcagaaggctgccttagcctgagcagggtactgcaaatgatgcagccttgaatctcacacagagatgatgtgaagcctcccctcctgtccaaacgagaacaagagggcatcctagaatcacacagtcagcgatgccctaggaggtgcttacagtgccttacacaatcagccatgaggtttaaagaacagggagatactccactgtgcagccaaaagccggtccagatgagcccatctccagatacggcatggggataaaaacgctttggatatctcagtcagtacagaggtcttccagtaccagtaagatgcctcctaggtagcttattggagaaggcgatggcacccaactccagtactcttgtctagaaaatcccacggacggaggagcctggtgggctgcagtccatggggtcacgaagagtcagacatgactgagtgacttcactttcacttttcactttcatgcattggagaaggaaatggcaacccactccagtgttcttgcctggagaatcccagggacaggggagcctgatgggcctgccgtctcaggggttgcacagagtcggacacgactgaagcgacttagcagcagcagcagcaggtagtttattagcaccaaagatcaaacggagagcagtgaggctctgagagattgtctacctcttggttaaggtgctggcattaccttgcttactaataatagt

SEQ ID NO: 60307 - DNA, 1483 bp, Bovine  19866880977964
  misc_feature (1)..(1): n is a, c, g, or t
ntggctgggctccaggttgtcacacagcccagcaaaccccaacaagttaatttgtaatcttagggggaaaatgatggtcgctctgcgtctgtcaccgagcactctccctgccagtttaaacagctgattagttagcaccactggaatcgatccgcatcagttccacctgcatgcacccaccaggaaccactttattgtaaatcaatcattctgcaaacatctcacaaagggatcaggctttgctaacaagccgccccttcctgttccctcttggaagcgcccagcaaaggtgaccaacatttattcaaaaattatctctttaggttcttttgagcctgagcagggagcagaaaggcagaaaaggattgaggcttcctaatacaagcgcatgctcaaggttgtgggtttgtctctctggaatcagggccaatgtttgtccacgccctccctttaagaaaaataaaaatgtctgggcaaaagttttgagtcgacttttcacaaaagaagaaatatggatggctggaaggacatgaaaaaacgctcaacatcacttgtcatctcagaaatgtaaattagcaccgcagtgatacctacaccaccaccagaaaggctaaaattaaaaagacagacacctgatgtcagggaggataaagagcaaactgaactttcaaacatggtaggtgagagcgtaagatgagataactacttggaaaaaaggtttgccgtttcttataacactaaacatatatataccccatcaccaacaattttacccctacttattgacccaaaataaatgaaagcatatgtgttcttgaagactcgtacacagatattcacagccacgttatgcacaacagccaaaatctggaaacagcccagataatcataaccaggtgaatggataaacaaactgtggtatatctacacatagggaataatactcagcaattaaaaaaggaatgaattactgatacacactgcatggatgaatctcaaaaagattatcctgagggaagaaatttacccaaaagaattatctactcttatgattccatatatatgacactctagagtgaaccaaactattctatctatagggggggatagattgtaatattggatacctctagggaggtggcacagagaaggcaatggcaccccactccagtactcttgcctggaaaatcccatggatggaggagcctagaaggctgcagtccatggggtcgctgagggtcagacacaactgagcgacttcactttcacttttcactttcacttttcacttttcactttcacttttcactttcaggcattggagaaggaaatggcaacccactccagtgttctttcctggagagtcccagggacaggggagcctgatgggctgccatctatggggttgcacagagtcggacacgactgaagcgacttagcagcagcagcagtagcagtagcagctagggaggtggggtcatag

SEQ ID NO: 60308 - DNA, 2133 bp, Bovine  19866880980018
  misc_feature (1)..(1): n is a, c, g, or t
nttaatttatactatattgcaaagtgactcagttatacatatgtatatgttctttttcatattattttccatttttttaaaatcacaggatactgactataggtcccagtaatatacaataggactttgttatttatccatattatatataattgcttgctctgctaatcccaaattcccagtccatcccttcccaacccttctcctccttggaaaccacatgtctgttctctgtgtctgtgagtctatttgtagataaagtcctttgtgttgtattttggattccacatataagtgatatcgtatgtatttgtctttctctttctgacttcatttagtatgataatctctaggtttatgctgcagataatgctgcaaatagcattatttcctcctttctgtggccgagtactgttcaggtgtatgtatgtaccgtatcttcctgattcattcgtctgttggtggttgttcatgccgtttccatcctttagctgttgtgaagaggactgctgtgaacatagggctgcatgtatttttctgaattaattatcctttgtctggctatgtgcctaggagtgggattgctagatggtatggcaactctatttttagttttttgaggaaccatcatattttttccatagtggttgtaccaatttacatttctaccaactgtgtaggagggttccagtttctctttgtggagaggtttctaactgaagttttgatttctttaacagatgtatggttgtctggattttctgtttcttcttgtgtcattgttttaaaattttctatttcatttagtttttaaacttatagccatactattgttcattattgtttagttataagtcatgtccgactattgtgtgaccccacagactttggccccaccaggttcctctgtccatgggatttcccaggcaagaatactgaagtgggttcccattcccttctccagcggatcttcccaacccagagatcgaactgtgtttcctgcttggcggcgagttctttaccactgagccactgggaggccccagtgttcactatagcccttcattatcttcttaatgttggtaggatctgtagttacatctctcatttttagaggactctgggtgttaaaaagttcattttgcatccattgtttcattttccactcaatgaatttctttcaaatcaggaacagatcattttcttcactctttagtgtatttgttatgcttttgacacaagctgaaaacaaattcccctcaccacaacctttatgtcttctcacctatccatctgcttgctactcaaccattaggattcagaataaatgtgaacccccttctgatatgcacatcataatatattccatgcacacacacacccagctacacgtatgcctaccaccacacacatactcacatagatagctacttaatgcctttcctttgcagcactttactcaaagtactaatttcttaaaattgtgatagaacctttatattgtttctttctcttagtagatgataagcaccatcaaggctggacttgtattattcctgttggaatacttagtacctattgcaatgcttggcacataacagatctttgagacatcctgattgggtgaacacaccaatctacactgaggagaaataagttgttctctttgaaaattctatctaataatattagttttgctagaaggcagtgttgaaaaataggtagagatcaggttatggggagccttggctaacaacttacagaatctagatatttctttgttcttatttttcatattttcctcctgtcccttctatgtctttgttacactcagtgccctgggggatagaggggccaacccctggtcacaagggaaagatgctgagaagtcaagacagagagtggagtgagggggttgggggttgggtgtaacaagagtgtctcctcctgtctgcctctacacagccaagtgtttcttctctgcctcagtcctatgcataggattagcagaggatttgagtatttgggttatgttggtagtgggaggtgggatgggaggacatcttcccaaacagcgatgccaggcacacagtcagcactcactgctgaaaatgaacgaatttgtaagaaccc

SEQ ID NO: 60309 - DNA, 1338 bp, Bovine  19866880994624
  misc_feature (1)..(1): n is a, c, g, or t
ntttcttcccctagaatagtgaaggggaaaactaaactgttttcatcagaagtttcattcaaaagcatgaaaaactgcaaaatgacagctgtgcagattcagtggatgtgacgtttttgaatttcttcaacttgacaagtaaacaccttaaatcggtaatgctatatgcataatacatggcctgtattttgacatccatcaacaaatgctgacttgagaaaatacgggtttgtacatcaaggaatagcacccataaagcagggagaaatgcaggtcacacggtattaggaaaactgtatttcattacagaacctgcaacaaaccaaagcatccttttattttatcttatttaaagattccattttcagctgtgaaaagactcaattcctttgcatgaaaccttcatttagaaatgacatgcttgcctcttaggcttcttgcattttgctttcatattccattttccccttcagtcaccaagcctggttccattagcatctgcaactgacaaactatggtggatggccaaagacatctctccattaaaggtctttttctctcctacacgtgaccccaagaacgaggtgcttttgttggaaagaaaacttcagcaatgataaagtcacttattatttgctacttttatagccacacgtttttacaagcaaggggcaaagacaaaagaaatagattgtatttactttttttttaacccttcctggagagttgtgttaaagaggaacagaatgtattagcattgtttctttcttagagattctcatacaggaaaattgtggcttgaaatagcaggattgacccagattcctgaagtgaccttgaaaagaatagaaaatcaggcactttccttccaaagggatgagtgaattcggcctttggtatcatttgttggcagctaccctattcatcacagcagctgttgataaaggggcaagtctaaattgtatccagttctctgattgtcttgctcctcaatcccttgtttgctgcagtggataacatctttggttgaactttaaagccctctacataaagcagtgctctggtcctgcatgtgaaagtccttgcacatggagtatcctccagggaccctgatctacaactagaggatagtgaaactgggaaatgctccttccgttagttgaactaacactcaggaacttaattttagaaacacgctcattttgccagaagagatgatgaggaatgttggcattggatggatagaatgaaaagttctcaatcagaaaagattcaagttaagtaaacacagccgcagcccaagctcttaccaagacagcctcctggttctttaaatgt

SEQ ID NO: 60310 - DNA, 786 bp, Bovine  19866881004046
  misc_feature (1)..(1): n is a, c, g, or t
nctctgcccaacccatccctggggtcaagtgaactgtgctccttagtaagaagaaaaccttcactgatgtagtattctcaggtccggagagtgtgggagtgggtctggcctgtttgggagtaaatatgggctatgaaatcccagaaggaatttgacagaggacccccatgactttcccttcttcttcaatttcttgcttaccttggctgacaagagatcgtgctttcaaatatcagtgacaaggctgatatttttatttgactgaggaaagtcatccttgtgcccttttaatacctctttgatcagaccatgaggatgtcagggatgtattaaacctccgaccgagggcccagagctggttgcccagtgttctaatgagtggcattgagggatattctcgaaaatgcaagcagggagggcagacgtggtgtgtcacgtcagcaaaccctctcccagctccttttcaaataaaagtttatgaaaagaagcactaactcaaattgcagaatcctgtgtttgaagtaaattgtcttgcaacaaacatttccgtctatgaatgtctaaacctttcagaagattaaaggaaattagtgctggcgtgtttcattaatttggcaccgtggtggaggaaatgtggtcctcatttcacttgggtggattatgaaatgtgtcagtttttccattctctctctccagggcatttttttactgcaaggcctgtcatgatgacatcacggatcccaaaaggataaaaaaatgcggctgcaaacggcgtaagtagtgttt

SEQ ID NO: 60311 - DNA, 772 bp, Bovine  19866881025606
  misc_feature (1)..(1): n is a, c, g, or t
ntccattaagagaggcaccaacagatcttctgttcaggacaatctaaggtattaagactcacatcctactttatatatctcctgtgcctttactgtttccctttgtgggatgggctggcagagttgagacccaccctgcccatgtgaagccatcctggaactccagacaggaaacagcatgaaaataacatgtttccttgactcatagctgatgagtctgcattctttatgtaagagccctattggtcaaaagagtgaaaaatcgctctttcgttaacttcaccttcaaaactagaacagttatctttagcaagggtaacacagagactcatcactgaatgaatccagtatctctctgagtgtgtctgaagtttggaagctaagatgaagctgactaaatgactcttctgagagccacacacttctgtggttcccacatctctcctctcagtatctaacctgtcttttctgacttccttgctgccacctcacagatgtgtttataattccctgtcactcccaaactctcctagctctgcctgatgaccccacaaatccccagtgttcaatatctggtgctctggggagggaagcagatggtggaagttgttcattctgccaccctgggaggcaggtggaggggcagctagggttacagcagcaggtgggggttcagggctgagcctgaaggagacacagcagatcacccaggacccagggcagaacagctcaccggaaccagcccttgcggcagcaggggcaacagctgggg

SEQ ID NO: 60312 - DNA, 1429 bp, Bovine  19866881033127
  misc_feature (1)..(1): n is a, c, g, or t
ntgatggagagattttctcccttctgctgctattttttttcatcaaaataaaaatgtatggataaggtggcagatggaagggttacatctttatagtaaccagttaagaaccaattcacatgtatgtatgtatgcacacctgtgtgttttatgtgcgtgaaaattacacgtgggcacatggtacttgtaaatacactgttatatgcatgctctgtatgtctggctgagaattatatgtgtgggtcgtttttgtgtgtatctcacacacaagtgtgttgtgtgtgcacgtggtgtgtgtgttggtgtgaatatgttgacatcgttacaccacatcagaactcaaagtcaagcgattcctgattaactgccaaaggttccgttcccttactgtattttggtctctgacataatttttagtctgttttcattttgctccagcctcttcacatttctcaggatttcaacagaaatgtggtagaggggatacctcttcatatggatggtacttaatactgtgcttcttactggctcacttttctttattgatttgaaatgtaaacaaagctctgaggctgaactatgcacctccacaaatccagaggacctgactgaaggagctcaggaaggatggagatgtagtacgtttagtcttgaggttggcagcccaattttgatgagctcaaagatgagaggtggctcaggacactcagggaagcgggggtctctggttccccaagtatcctctggaagcatgagaaagggcatatcagctcttgccagtgtggcggaatccaaaggtcagcttctagttgctgggtggtggcggttgtcctgtgcaacgcggcaacttctgggcctcagcctttcagcatctggagaaaattctctataaaggctgtttctgtcccagtgaatataatgtctattttcatctaagcatattggctatcctgtgcatggctcacatagttaacacaggtatagaatttttttacatttccctctttttgtttccttggtatgtctccttccctcctagcatatgcatgaatgtcatataccctcttgcctttatgggggctttaattcctttatcaaaacataactatcctctctcagaaacctgtacacatcattttttttacactgtttctaagaaacaactagttctctgccaactaattcacattaggatggcagaagttgacaatgaaatgagattcataacttcagacaaaatattttacttaaaaaatacacatactaaaaaatagaccaactgaataaatctctaacagaatttcaggctgtatgggtaagcagggaagccctatatgccagggacaatgaatgaaagccaaaatggaagaaaaaaaaaaaaagaaagaaagaaatggggagaggtttttacatttgagcaactaacagg

SEQ ID NO: 60313 - DNA, 1121 bp, Bovine  19866881037867
  misc_feature (1)..(1): n is a, c, g, or t
naccgtattcttcaacatggattaaaaatgacttagaaacttttaaagacaaggcagatgttccttggtttggatgacttgggataacatggagaactgctggggtcacagaatctctgcaagtttgcaatcgagagaggatgacatcatttcatggcctcagaatgggccttgggctggctgtcatcacctctgtttcctgccagggtcccctgagaaagcccactgtggaccactcttcaccttggccatgctttctttctccttggcccccaggccccaagttctgctttccagtattggtctggtccctggaaacactgaggttggatgaaacctccctgagacccttcttggggcctaaattattctttcggctgttgacactgagctgttccctttagtgtgctgaattacacaacacttggaattgtgctaacatggtcatcagagccaggacaggtctgtgggcatatagctcttgaggctgcagtcctggaacagcacccactacaggcctgggttgggagtgtctcaaaagtctttgaaaatccacaaggggcttccttaaacataactgattccaaggaatcctcaagaatgtggaaggatgaggctacaggatgttaatttctctctacagcaccaggacagcaagaatttttataaaaagaaatgaatagggctgtcagatgttataaagaacatagtctttctcttgagtgaaggaacgaaaggcagatacagacacacacatatacacgtgaacacacacacacacacacacacaccatcagtgggtgcatttactgcaggaaactctccagcacattggggattgaatttcttctctctgcactctctccatggcaaacttcaactgcagaccttgcctatagagaacctggatagcaactgcccttctagaaacaggctggatattcctgaacgtgggctgtaatgtggagggagggagtgtgttctgaggcatgtgcaaccctgcccttctattctggtcggcactgataaaagtcctttttaaggcctgccctgttcctgtgggcctgaaagtgagaaggtttatagacaccccagtgagaaagggctgtttgatgaatgca

SEQ ID NO: 60314 - DNA, 2122 bp, Bovine  19866881095036
  misc_feature (1)..(1): n is a, c, g, or t
ntgtggaggaaacagtttgcttggaaagaacgctttgatggggaggcgctccgaggttggaattcgggaacccgctggtggtgactcggcaggcggtggtctctgtgtacatctgcaatgcattcacttgtttgtatctcttcaaactctaaatgtcttgggactagatggggaacaacacatttaatggtgtatgcagtgtttttaattaaaatatctggctttgcccataataagtgaagcaggctcgctgcgaatcaggctgacgtgtagtctgcatgggggtttcttttggggagccctgacagtgccctgtccccttgggaatcttctcctaccaaatgggacaatctgatttttcttaagtagccagctctgccatcactgtaagctcttaaaactttagctctggaaacaatatgtcaggggaaatctattttaaagaggtcctttatctttaaaatgtcccccacccccacactgggatgggtgttctaattatgcaggttaggttatgaccttggggctgcctgggggttgggattcagcatcttttcttggctgcaccagtgtggccatggtcagataggactgaggaaaactctaagtgtcctggaaaggacagctttggatacccttgcagaggccagcaaacaccccaggacttgctgacatcccatatggccttgtcttaccatctatttagtaaggggaggtggggaaagacctgtatttaaagccagtttggcccctaacagctgaggacacatacccacatatgttccctcactgggctggttttcccacttgtaagatgaaggcaaggggccagatatcccagagttccaccttgcttgtgaaatagatgattcagcatttctgaatgtttcccttatgaagataaggatgccaggtaccacactgcctgatgtaggagacagagccaacggttagttaatcaaaatttgatttggaccaagtcagctcttgaaacccatccagcccattttcccataatacataaaagggagctctgctggacctccaaacacccaaggaaagaatttccactcactttcttgcaacctgcatttcatacccagagctgggacatgctcaccactaattagctcatgtctccctagctttgacatagctcgagtctcctaactctatggtcaacagaactgaagactaaatatcagagtaaatggtctaccatttatattttagctgtgaaagaataatactttcctcataccaaaactcatctgatgatggaataccagctggaccaataaattcatctttgtaacatggagaaaatatagattttattatcactaataacgttagtttgggtagtcattgctttaaatgctattatcacaaatgtatgtaagtgtaactgtgtaatgacaaacagattgtaatctgtttgtgatcactagcaccttataattactgttacaaaataagcgagggacagaggactcctcattcaactcctgttctcccatctgtacgggtaaagcaaggaaccagactgtttgtggcctctaaagagtgatgatgatattgtgaagacgtgggtgggcccagagatggaaagaatatttgcagagtctttctggttcatcatggaaggttctgtgtgacattatacatagtgtgaacatgtcgcctctacaataatccctcctcctcaatttctaatacccagtgcttcaaacagtacttggtactaaggaggtgttcaataaatatttgaatagataaatttaataccattcaaattatctgtacacaatttaaacagaatccataaagtgaggaatttcagttgttaaacactcatactttaaccttcgttaagatgacaggcatctgaaatgttttaaaaatatacacagattaaatatttgcaaagaaacagaaggcaacagcctctattcctcaacactgatgttgtttttatgctcaacactttcctcccacaaaaacaaagcaatcaggacgtctggttggagagagttcagtggactgaaggcacattatcatccagccttaagagctgtaaacatcgtacagggggaaaggacattccccagaaagcgcattc

SEQ ID NO: 60315 - DNA, 1416 bp, Bovine  19866881109457
  misc_feature (1)..(1): n is a, c, g, or t
ntggaagtggatgtactgggttctaaaaatactgtggacagtgactgcagccacatgaaattaaaagacatctactccttgggaaaaaagcaacgacaaacctagacagaatattaaaaagcagagacattactttgccgacagaggtccacatagtcagagccactggtttttccagtagtcatgtctggatgtgagagttgaaccataaaaaagtctgagtaccgaagaattgatacatttaaactgtggtgctggagaagatttttgagagtctcttggacagcaaggagatcaaaccagtcaatcctaaaggaaatcaaccttgaatattcactggaggaactgatgctgaagctcccatactttggccacagatgcaaagagccgactcattggaaaagaccctgatgctgggaaagattgaatgcaggaggagaagggggtgacagaaaatgagatgattggatagcatcagtgatcactggacatgagtttgagcaaattccaggagatagtgaaagacagggaagactagcatgctgcagtccatggaatcgcaaagagtcagacccaacttagtaaatgaacaatgacaacaaaaatgtacgcatacacaaacacacataaacaaattgcaaagaatacagaaacaaagggatagtccacagatgagtcacaaatgctggatctctaccaatatttattaagcaactacattcccagcaacgtgtgtctgtccattttcaaattaggtagtaatttcaaaatgactgtacatacagagaagccctagaaaataatagggctccttctcaatgtaagctaagaacacacttattataaactatgtgtctgctggaaaacagacaaattaagtacaacagtgggttttctagagagggtggaggagaaattgattaatatagtagatatagaggggctgggttctccttggtttgctgtgctgttcaaagaagaatctgggatgtaagtgataagtcagttgcctcctctctgctcctctgaggatccatgttgggtgccagttctgtgaacttaagtgtcctcagttgccacaggaggatcatctgtcttatatcctggatttcactgaccatgcccatctcattctgtgcaacttaaaaatacagaagagttcaatgtgttcctctaaggtctaaatttattacaattgaaacaagaaactgaaataaaggaaagcaatagtaacaataagacagaaaaatttccctaaactgtctccttcctgagagttgaggtttaatgacattaaaatcttaggtcattgcatcataaaattcaaaaggttgatttctgcatatttttaccaatggcattaaaactgatgtcttgacaaacaagacaaaaatcttccattcaaggcctaaagtt

SEQ ID NO: 60316 - DNA, 1824 bp, Bovine  19866881136972
  misc_feature (1)..(1): n is a, c, g, or t
ncactggagtgggttgccatttccttctccaatgcatgaaagtgaaaagggaaagtgaagtcgctcagtcgtgtccaactcttagtgaccccatggactgcagcctactaggctcctccatccatgggattttccaggcgagagtactggagtgggttgccattgccttctccaaagaaagcctagggattatcaaacaagagaaacgacaggaagagctgactgttgggctcatttgcatctgaatgtgttattatttaaaaactggagaagtgctgagtggatgggttagggaaatatggctgccattctggaaagggtgctggcacagtatacatatcctgcagtattcccttggcatgtataaagggaacatactggtgttttggtcacaatgctgtcttttactgaatcttctgtacggagatagggggaaagtttcaatggcatcttcattggaatccactatgatccacaaaccatagcgtcttgatgggagtagggagagaggtgttactattgtaaagaagttttggatgaactttcattttgtcctgtattctaagtacatggcccaggaaagatggaatgagaactcatttggtgtttatttaaaaaaataggaaagagacagataggcaggagagagatttcttgagaagcttatgttctgaagaagaatgtgtgagcctcttacaagggtcttttagttgccttttttcccccaccttgggaagttacagggcactcagtggttcttctcgccttgtgtgccccttgtggttgtcacagaagtgggctgcactgtggcatctgtctgccactgatcttcgaggtgggttccgtttggattgtcagatgccctttcatccatcatgaccctgagtgtgtcccttctgaaagcgagacatactgggttcaagaggggccttccctggagcagatttgtgcaacaaaaaaagaaaccattattactgagtctgtacaacctggcaaactctttgattctacctacttttaacatatcaaatctttaaagtttaaaaaaactcagaaagactgaaagagcttttcaaaatttcagttcagttgagtttcagttcattcggtcatattcccttctttaccatctaacttaccatccaagcttcagtccttctgtccagtctgatatagttcttgagtgcctatgaataagagttagttcatatctgaaaaagctcgtaatgttcattggaaggacagacgtgcagagctgtggaccacgtgctcctgtagatatgtggcaggtggagggtacgtgggaaaggcgtaagtacttactatatgctgggcatagtgcaaagaataaactgataaacaaacgaaactgacttcagtctctacagagagtggagtccgtagaaatggtttattttcattaacaactgttactcgtaataagagctttgtagtggatatacagacctagaacttttggaggaacacaatactcagtttagggaagcattagggagggtttccttgagaaggtgaccctgaagctgagacctgacgatgcatcacaactaaccaggaagaagtgtgggaaaagtgttcaggttagagggaacagcatatatgatggcacggaggacagatgcgtggtttgttgaagaaccagacttttagttttcccagagtgttgtggggggaggtttggagggagagagagaagaacaaggaagcagatgaggaaactggcaacaagggtgagtagggcaagatcatgaagaactttgtatgccaacttaaggagtggagactggccataaaggcttggag

SEQ ID NO: 60317 - DNA, 1699 bp, Bovine  19866881201158
  misc_feature (1)..(1): n is a, c, g, or t
ncaaaagtaatccacttctgctcaggctaaaagcaatattaattatggaatagagcttgtgtgcactcttctgctctctttctctccttccctccctccttctgcccctctctctgctcctcacttgctcccttccttctttcctttcttcccttctctctatcttgactgcagcttcctctaggaaaaggcaagtgaagccaatttttcagtagacttctgttggttcctcttcttggcctcttcatctttcctctccttttttttgtctccgattcatctgccaatcctagtgcttatttccccatcatcctcactctccagcacctcagtgaaacagggatgatttcagatttgcactttccctaaatgttgcctgccatgggaacacctgccatcttcatggtgcgttcttcttctcattgccactggccagtctcctccctttgatgattgatacaaaaatcaggatgaattcctcctcctccctaccttttcctagcatttcgcctcttcctgcctctccacaaccacctttctaggatggagacagggcagttcttcatgtggttgagaacacaagtcccagaagactcacccagccccatgtccttttccatcacaatcccctctccctgttcagtgtttcctgtctcccatttgctcagtcttccttgggtgctgctgatttacctgcttgtttacagtttgtgaggagaaataaaacgtgccaactgccaagcccttgtttttccggtgccacttgtcatgcccgcatccattctctattgactcaccattaggtgatcgccttatctcatgctaatggttttatccactgaaaatacagagaagcccaggcacttgcttttgcctaaatttagagaagcaaataaataaataaagagaagtctgaaaaatctgaaacctttggagccaaattccctgtccctgtttgctatgtaaagtatggctcatttctttgatcttgagtaataataattctgaggagttatactgttttcatatacttcaaagctgtgtcaaagttttgctgcttaagggtacttctttattctgttggctcttgggtaccaagatgacaggtcttctgtacgaggtggaagcttttttaagtcgtagccttcagcaaaacatcaaattaccaaatccggggtaacatacttctacacaaatgcctttcctgtagatatattataccctatatattaaatactttagtgttacacgctacattttatgtgcaatagaaagtgatggtttgaggtagccttggggggactttttttccacaagcagaaaaagcaagtatataccgtatcaagtatggtttttacaggactttctgcccgaaggcctttgtaaataagtaatgatcaacagattggctgtgggtttttgaaaagcatgcctgtgtcagtttgcatgatgggggagaattttcaaagtgggtcttgctttcattgcctgtcggagaggggctgagggaggcagtcatcccgggccggggctgtctgctctgcggtacatcagaattgctaaacgtgggtcaggcggtgagctgaaacttgccgggctacagaactcaggtttctggtgttgctgcctttgggctgctgctatggctgtggctgctgtcgctgggagctctttaccccgccagcccatgacgacctgg

SEQ ID NO: 60318 - DNA, 965 bp, Bovine  19866881216421
  misc_feature (1)..(1): n is a, c, g, or t
ntaactttaaaaatctcgattacgagaaggtagcatctgagaattacccgcttgtgttctgtgtagggattattcatctcttacctcatcagatacagttgtcacaaagcatgcactcaataaatatttattgaactaaattatctatcctcatattgaacaaatttattttcacttcaagtgggctccacaatctcttagcaacctgattctatgttccctgcagtttctataaggatgcgttctgggtttgggatatcgatgtctttgtcccacctcatccataaagtcttccctgacaagtctagtctgcctactctcctttttctgaccccctgttgtacttattccaggttccagtcactttggcccacgtgtgatatcttatcttgcatggaaaatgtgtttcataaacacatcatccttcccaggagcctataagttcctcaagggcaaaggccatatttggtatttattttgtacgtcccatggcacacaatgcaatacagaacccatagcagactctgaaaaaggaccattaaattgatttgaattttaaggacagttctccactgccagtgaagactttctttcagagaagtattgaaaggcaggattggctatattcatagttcatttcaccaagctgagcccataagtctctacagttgatgtgctagttaggaaacaaagggtcaaaaagcagctgcttactttcagcaaagaagaggtcgtatttcagtcgtggattgcaggatttcacgtgtcagtcactcttgactcttggccaaaccctttggtgtcatcaggaataaaaagcaacccagagatatgtcaaatatcaatttccaattactttcttgcaacacatttctgccacttgggaaaactcccaagggatctgttgcctcttatcagcttagattgggtttatctttcagtccaacaggtaacactcggcaatg

SEQ ID NO: 60319 - DNA, 858 bp, Bovine  19866881232704
  misc_feature (1)..(1): n is a, c, g, or t
ngagactgttggaggatatttttgttttatttaagctatcgtatgctttttaagcagagtaggctggatctttctgaagagtatctgagaaaattctgaaccttgttatagaccaagaaagataaagttaccacacaaaaatactttttttccacataagagatttagtcagcagggagtttgtaattaggtagtttagttgcttttacaactttttaatcattttccagtatatacttctggcaatagttatcctttaagtgaggcatatgtttggagagactggaaggatttttgaagttaaacttttcattgcacacaagaaaaacacagatgggccacctaagtctgaaatatatcctaaaggcaggatgatagcacctgtaagaaattctttggtcatcaaggaaagtcccaaggcatcagaagagttgagggaagggaaattgttttaaaaaaggacacacacagatatccatttccagaaaggcagtgtgaggagacctgtgagctgctccccagtgaaacaagcacaaatggtgaagattatgaaagaaaattaacatctctggatactgacttaagggaatacagcaaataaagaaatctttatttgagaaagcccagtgaaactaagacaatgagattcggtggtacttgaatcatgacccattccttccctcccctccttggcttagtttgaagaaaactccagtgagcatgtgtgccaagaaggtgtggatccctgatcctcatctaccagtcaagagatacagcatcttattaagagagtcagcctgccttcaagccaaattgtagaggttaaattccggtaagcacagccataatggaggggtt

SEQ ID NO: 60320 - DNA, 1491 bp, Bovine  19866881274693
  misc_feature (1)..(1): n is a, c, g, or t
ntttagaaagtctactaaaggaacttggagagagaatggagggttttgctttgttttgagaagtaattggccaaactagaaaattctttaaaatgtgagcgacaaatcattcaggaaaaatattcttcctaggagcctgtgctctgctgacatttcatttgaatgtcaactctgaggacgaggaagtagggtccttccctttgggggcttaatccgtttgccaccgcccatgggctttgtgattatatttgtgccacgcagcaccagtgttttcttgctataatacttgtgccgccaggaataattgtgtatcttttaatttgcaggtgtcctggggaagtgccgctatgtttactacgggaaaaactcagagggcaacaggttcatccgtgacgaccagctctgaaaggcaagttctctgtgccttagccagtgacatgagagtgagaaaaaaaaaggaaaaataaaggaaaagctaaatgaaaagataatggcctacaacccttctctgtaggaaagctatgacttcagcttttggtaccttctgctgacttggccaggcctgtcaggatcatccttctgccttagactgagtggtcacagagagattgacatgattgcccttaagcaggtctcatccactagggtgacagacagtggtggcgaagcaccagggctgacaggatgaacaccatgatagattgcctggcccctccactgctcacaggggagcagaggtcacacctggggcctccctgagcatgctcagtggttgtcgtcaagtgcgagagactgtgtcttcagcttgcctattgagcagagatccttctgataccattgtgctgtgggttaatttttagtgacagagtcagtttagaggaagcctcctttctgttatttcccttaaatcttaatctttggtattctgcatagtcccctcccaccccatcctcatcatcctttagcatatttatcacgggcaattcatttcagtttgcagttttttggagaacagaagaggtgagttcttagccatgttgtatttttatgatgagctttgtgctcttacaatttgttgtttggagtaaattgctgtcactaaaccttgactttgaaagcatggattttaccatgttttgttcatttctaaatcctcttcttcccctgaatactaggcagtgtcaggcatctttcccaacactgggttctatccggggactcttatttatttatttttaaccacataccctcccagctacgtctatggccatatgtgtatttggagctggcttactcctttgggtgctatataaaggtagtgaagtgataaaagatagagcaataggtcaggaagttaaaaaggaaagtggagactgtagaaaacactcacgagaccaaacagtttaataaaaggcacaaaccctttgaatttaatttctcagaatctctcagaaatgaaatcccacagcttgtgagatgggctttgtatat

SEQ ID NO: 60321 - DNA, 1196 bp, Bovine  19866881364978
  misc_feature (1)..(1): n is a, c, g, or t
naagaacatcccctgcttaacagatagaaagggctccattaaagttactcgaatatggaagagaggtgggaatacagtctgatggaaagactgttcgacaggggagccagatatccattccagttctagccctgccaccagggacttactgtgtgatcctgggcacatggcttggcctcctgggcttcatgccctcattagtaaaatgagggcatttgacactttataatggactgaggatgcctttgagctagaaagattccaaagcattttgctcctccattcagcaccatacatcagatcagcctctccaaacactccctaccaccctcaggcttcccactgccaggtcatcagcaggacaactcaagactctcttggactcatgacctgatcctctgccctagagtcctctggcttagctatagcccatctgactcagctaacccaagctatgggccccactttctcagcagttcaacctggcatccttcttgctgaagccctgtgacactcctccaagatgtttttcctcctttcatctgcaacgagctccactcattgataattcttttatggtggcattctagactggaggatgaacaagggtacatgaatatgctcagaggggacaagtatggtttcatccagagtgctgcattcagatgggcattggagggtgaggcatacacgctcagagagagacacagctgtgaaattgattttcacagcccagtttgggggagggacctagaggagctttgaagtccaagttccgcattgaagatacaaaattcatttctcctccccacctacattttcatcagccccgtcgcaggctgctgcactagctttctgctaacagctgatgacagagaaagggctctggttggcacaaggccactgtgcattttgcttttatcagatgctgacaaaatttccccatcaaggaagataaattcgaggtgatattaataaacctccaaatgcagagatcagatctggctggcactcttaatgatcccatcagcggcaagccatttccagcctggggaacccagaagtttatgattctgtgtaaggcaacctgaaggctggcgtctctttgcttggctcctggtggaacctggagcccagctggggctccaactggaaggtggggctcctccaggccccctagtgaggcaggagctgag

SEQ ID NO: 60322 - DNA, 1071 bp, Bovine  19866881497631
  misc_feature (1)..(1): n is a, c, g, or t
ntacgcgcctccctgacagaggaataataatggtcatacatcactgctccgcatgtccaatcatctaaatcttccctcgctgcagcctccgagactcaattactttattgacatgcaatcttcataaggggagaaatattgtgcatgtaaggtcacttggttatgaagacatattatcatattatctgcatgagggttgcagggctaaggcctgacagagctaattataatggtacatgatagaaagctcagtacacattattcgcttggctgcactaaaggtgaggtaagtccatgacatcatggtttggtgaaaaaaataatgtggtttggaggctgtaacttctttttaacttcccatatttttacattcgtattgcagtggacaatgaaagaattggttagtagattcctcagacagcaaggaagagagctggcatacctatgccgtgtgtatctgcatgtgggtgtgtgtgcgcgtgtgtgtatgagatccacgtagttattccctctgcaacaccaagtttcagtccatttcccagcaagtgaaatgagagtgactccagggaaaaaggtaaacggatacaaatgggtcaatttggtaacagagtaaaacttgccctcgccctcaattaaccccttctcagatcctcctagtctccttctctcgtctctctgacagaaccttatcttgctaagatttagtgctcctgcacgtgttttctttgttcagatacaccaggctatttaagcgttcaccatcagatgcatgctggaagtgttgtgtattgctgagatccatggctaggcagtcattctcgtctctgtatcctcagcctatatatgttccccattcatcccatgtgtatcgcctattgaggggccagaaagaggagcttgagtggaaattctgcaaaaaaacaaaaaaaaaaaggagctcggggagaggaattggggccaagcccttggactttccagccttgccatagttcacagggacctggaaggaaaatcagggtggacgaacctacaatgagtcatgaaatcagcatcaagtcagcctccatggag

SEQ ID NO: 60323 - DNA, 1302 bp, Bovine  19866881670059
  misc_feature (1)..(1): n is a, c, g, or t
nccctcccttcctggaagatccagggagtgggcacttgaaatgctaaggaggagataggcagctatggctgaagacagacatcgtccatagacaaagcactgggggacataagcaactgatttaaatttctcctgggaaataaatcagggaagaaaaccaaaaactaaaccaaaaaacagaggcagtcttttgggagaagggagagctgaaataagcataaagcttactagatttttgtttttctgattattaaaatttgagccccagaaataatctcaggggagctttacatacatgattcagcaaactttttcttaaaggaccagatagtaaaattttaggctttgtggaccaggaggtaaaatcaaggatgtgacgtagatgcattaccacttaaaacagtaccttttaaaaatgtgaaagccagccttggtttgtggtatgtacaaaagcaagcagtggaccagtcttgccccatgagctacagtttgctgacccctgcattaaagtcttcaatgtgtttcttctcggaaatgtatcttctcttaagagaaagaaacaaaaagagcaagaaagccattagctatgagtgaatttaatgttgcaaatatataaacttaaaattaataaagttcctagaatctgactcttattcttcacaacttaagagcttataaagtctgggatgtataatgggtcagttagcctcaagggtctcagggcaaaagttggttttccccaactctatggtttcaagtaatatttgtaaagtggacttagaaatactgagactgttaggttcccaagtcaaatcctgccttcataatctcctgtgcataacagtttatgagaccctagtctcagaaaacacttagaaataaaaagaattaccttggtcttgaaaacattctagaaatgaaggcatatgtaaaacaattatcctccagttaaaaataaattttaaaagaagaagaaaaaagaaagaaatgaaggcacagtatttttaattaggggaaagaagaaaaatattgtgatttttcttctcataaagatgtccctgaagttcatttttggaagatcatgtatgattctaacatctgaaacaagtagatacaatgaacatataaatagcttgatggtgggcatattgaatagttaccaatttcattcagaaaatttgttaaggagaatttaagtcatttcagcctttatatgtctaagatctacttgaaggtcattttatttatagtgaacacaattctcaccagaggaaagcaggaaacctttgttaggagtcagta

SEQ ID NO: 60324 - DNA, 890 bp, Bovine  19866881675323
  misc_feature (1)..(1): n is a, c, g, or t
natgtattaaatacaatggggacctccttgaaatattactatgctgaattctcttcctaacaggcagatcagttttggatttcacccaagaggcttagtcaccaaagaaccaaaagtatttcattaaatgtgttttctcctaaaagagaagaaaggttattagtagttattattatctcatagtctcaaaggttgttggtctttgtttccagtttcaatagcacttgaatcccacagaggaggaggctgaagggctgcagtccatagcatcacagaggtggacacaattgaagtgactgagcacttatgcttctgaacatactatataatttacttatttattaggcttcttttttccctgttcttcccccaccgcaatgtcagaggaggggatgctgcctactttattcactgttgtttcctaatcatatagaaaatgcacctggcatataatagctgctttataaccctgttcaattcgtgagcaaattaaagcatattttagagcatattttttttgaaaagcaactacaactgaagcaaagcatctctaactagtcttctcttttctgtctctgcccccttttttgtttaactgaagtatagttggtttacaatgtattcgtttctggcgcacagcaaagtgacttattggtgcacatgtgctaagtcacttcagttgtgtcagactctttgcaaccccatggactgtagcccgccaggctcctctgtccatgagattctccaggcaagaatactggagtgggttgcatgccctcctccagggatcttcccaacccagggatggaacctgcatctctcatgtcttctgcattggcaggtgggttctttaccactagtgccatacgggaagccatatatataaattt

SEQ ID NO: 60325 - DNA, 851 bp, Bovine  19866881725039
  misc_feature (1)..(1): n is a, c, g, or t
ntttacctttatgatgacatctagtaatttctctaggctttgtgagatttgcattgcaacaaggagcttcctctcatgaagcctgtctcatcctttctccttccctcttgccattattaatcaggggatacagttaatgactctgacaaatcataaaagatttctcctaacttctttaagtgtgactacccaggtcagagcctgaaagtacacccagccgtgaaccacatgctatttataggcttaaaacccaggcagaatttgtatcacacacgatgaaaatgccagcctctcacaggacccaggatctgaaacaaatcacttcttccctaaacctccaaaggataaccacatggttcctccgatatgtgtttaatcagaatcccctcctcccctgcaatcaaggaacacacaattactgagctaatcatttaaatgatgctagtgagaaacaaagccattttccttgttaaaaatgtgtttgctgtcctatacatttatctgttttcttggcagtgctctgcattaatttattgctcaataaagcacagacaccagcagacttgctgagccatgcctagtggaaagcccactatttcatcctacaaagacagcctgcgagccaaaggcagaaaaaaagcacactgggcctcacaagccctggctggttaatcctggctccatttactctcccagagactcgaaagggaggcaggtgtacagcactggggagaatgcaggtgactaaacagttatcgatcgtcagaggaaatggagtaagtttggtctgttggccaagtgccattgggtttcctttctgtggaggtaaacctcactgtcacaagtatctc

SEQ ID NO: 60326 - DNA, 1428 bp, Bovine  19866881734817
  misc_feature (1)..(1): n is a, c, g, or t
ntgtctacgctggggacccagggccctggacacagcaagaggaagcatgggccaaggagagacaagcagagtggtcataacctgatcgtaggtgtcggatctataaatcattagccataaagggacacatacgcatggtcctctatcaggatcaagccaggtgagcaattttgttaacatatccagccatatggatatccagccatatccaacagttatgaactgttctgaaagacagaagaagaggccagagaggccgtcgtttctatagcagtgggcgtgcttgaaagctttttcctttttctttgcttttcctaaaagccgctaaaatgaggcatatgattctcaagttagaatgcactgtttgccccagttcctttgtatctatgcccgtggctgatttcccagaatattccagtgtaaaaaggtagggacaagggctgagtcttgtgaaataatactagctgccaggaggatgctaggccatcgcatcctcaccccagcctctgagtgccctgactcagcattctcttctgccatctctggatctagggtgagaatgaaatgccaagactctgtcaagctcccttgttgacagcttgggtgattatagtcggttaagatagtgccactaggaattcttttcataacttcataccaagagagttttattgaaattacagccatttcaaaagccttttaaaacattggttgctaatctaatgtttcaccctcactggccagcaaaaatctgtgggcttactttaagactcccaaaactggcttcaaaagaaataaaggagtgttgtaacggagatatacctttaagtgagcttgtacaagcaaagccaattaaaggctgggaagaggaaaccctgcagcagattctagatctcctaatctgtggaagggacagtgtcccttcatctccactcaaatcaatggatgcacaaggctttctttaggtgcaacacccatgcctaatacttgttatatgcgtcatctcctcaccaccaaagcttttcaggccaccaaaggaaccccagagaacactgccagagttaatcttccaacccctctttattctctgaagtccacgcctggtgcctccaggtcccaatagcccgttggttcatcacttgctacaggcagcagaggtatgtttcaggttctggggttctccctacactgtgccgtctctttagcaattactcactgtcagcttctctcgattacctttttgcatttttcaatgaactttccaaaatctttggcctaggactaattaagcttctaatttttccttcttgttctctatccgttttgccctttagcagaaaagaaatggtttacagatgaaccggataatgcctatcccagaaacattcaaatcaagcccatgagtacccacaggctaaccagatcaac

SEQ ID NO: 60327 - DNA, 870 bp, Bovine  19866881871971
  misc_feature (1)..(1): n is a, c, g, or t
ntcttcactggaaacagaaatcacagtgatcataatataccccagctgggaaggttgatttttcacattcactgggttgttagcattagagaaacacagtttcactctaatcagagaaagcataaaatataaaaggtgtcattactgacccaccattagtaacacatgcagaatctgggatcaagaaggtgttacttcccccagagccaaggctgatgtttccagttggatggtacctttgatgatggagccatcagcccacggattggtgtacaaccatttacttaagggattgaactaggctggttgaaaaattggataatgaagggcagataaataagaccatgagaagtgtggatgagcgagccccacggcttggttctgttttctctctgaagatctgtgagtatttgatgaataaggacccagagcacatcacctgctcatctttgctaggtgctcttctaaagcagcaggagtttgatgtgacagccaaaggagaaattgctgcctcaggaaatgcttcgcctttgactgattgctgaatggctggcaaaataattttggcacctttacctaagtcattttgctcccattcctccatttctctgctggaaagtatgtattcacattacagttaaaaatatgttgacaacacaaatgtggagaacagcatgtactatttcaggaaagaagttgtaggctgggatggttccattttatagaatagaaatgatgtcgtcgtgctctgagaggaggcctgaactctcctttcagctcaacttaaaatcaaataatatttctcactgacttcttaagatattgagtgcttctgttctggtattttcctctagttaatatttagcaaag

SEQ ID NO: 60328 - DNA, 1505 bp, Bovine  19866880339319
  misc_feature (1)..(1): n is a, c, g, or t
nttttgaagtattagtaaaagtcccactagggcagagaaacggtaactctgacccttaacggtctttgtcaagagacatttttggaccttagaatagcaatccatactgtcctgcttcctcacatttttttttaatcaatatgtggatggtgtagtaggaagagccctggacagggagtcagagagacctaaattctcatccgggctctaacttctctggacctcctcaatttttagatctatgatataaaattcaagatctctaaaaggggatcacttccaagattctctctggctctaacactgacttttttattaaaaaaaatttttccccgatgtgttactacatgctgggcaatattatcagagctttgtattcacttcactttctcaaaaaccttatgaggaaactgaggcctagagaagataaatcatttgcccaagatcatgtagtaaatggtaaagtcaggagttgagccctgcaggttgactgacttccaagtgcatgctctgaacctcagcgccatactgctcttgctgtccttgggcttcaggctgcagccactgtcttaggctctacagcaggtgtaaaaatggatgtgacaggtcttgtgtagcttatgatcttgaagaatgaaataggcctggattatgacagccaaggagactatttgaccccttttcttccaaaacacatttggagtttgagaagcttagcatcaatcccatcacataaactgaccttagaggctaaataaaattctctcactctgacccaagttcagatggtagagtggcttcaatgagtgcaccatagaggatcacatcttccctcctaccccactgagcagctgtggctagaggacttggtggatggtccctgaatcccccagaacctcaatagaaacttttcctgccatttctgccacaggagaccactgactccagctctgggccgttccacagaggcacaaggaaaaaaattacggagatgaagtgaaagcaggaaggaggtcttgtatcagaacgaccacattttaagaaatgacagcaacagcaactctctcttgagaaaaacatgatagacaaaaggaaggagcttcattctacaagtggatcaaactttgacattaacagaaaataattcttatgaaattattctctgggctgacatataccaaatgacagtgtattctgatcactaagttgccaggaatccttagaagaatagatgaacgagtcttcttcccaatatgccaatattggcccaatggggagtaagtttctaataccttaagtctgaggataactgaaggtcaaaacatacagcagcaagatgctattgtttcaactatttaaaacaaaaacatttataaaatatttttataagacacacttccttgccttggtcaaccctggagtcaggatccacttgaccatcagctagtggaaaaagcagttgtagctgtcatctaactagttttcctgtctctatgatcttcaat

SEQ ID NO: 60329 - DNA, 1289 bp, Bovine  19866880522651
  misc_feature (1)..(1): n is a, c, g, or t
natcaccatagcacataaagcagtggcttccatgcaatctccatctcacctaacccacctcaaggtgtcttttccgcattcatcttgagcaagaagcaagtggttctagaccaacaaagtaaatggtgggagacaggaaggctctgatcggaaacctgttccccacagtctccaatattcccctttggcagaatgatgtccccactatctcccctagtcttgtttccttctgctcacagcctgcttcctacttagataaatgaaatgcacattctcgtgttgtgtggggtcctgagacttaaaaaaatcaatttaaatgatttcttcctgtgatgggtcctggtcaagtgaaggagacatacaaatacataattacacagagaggtaaagtatgatttcttagagatatttataagctgtgctgagagctagtggggaagtgagaaaaatggggacagttccccagagaaaaggacctatgagctggcattttacatacaagtaggaagttccctgtgcggcaggagaggcacaaagggaactttctaaaccaaaggaacagtgggagttgtggtaccacaaggtcaaagagctttatttaccccttctctctttttctccaatacttcagacatctcaggaaaatttccttcctctcttgctctccattctattctgtgcccaaaacagaacccaaccatggaagttgcagcaaaacgctgtggtttccagtccttcttgcgcgggggacagagaacaccaaggctttaaactgaactttcaaagagcctgggttatggaaatgacccctgatcaccctggaatcccgttaggtctatagtactgcctcctcagatgaaacccagtcctcttcaagcacaagcattcaaagcaaacaagttcttactttgttagtttttctttttggctcagttactatattgcagagagtcgttttctattttcatcaccagagcagccttttttccaacagtctttttgagcctggggaccaaagcaccatttatagctttgcttctacggggaacagtgctttcacgttccaaacaacagacttacaaataaattgttgaactcacactgcttttaagcaatgagcttcctgtaatgttttgcacacttcagtgctagaggctggtgtgtgtgtgtgtttaaaaatttctaaatatgggtgccaggtgttacattttcagactgaccaagtgtaactttttttttcccctcttaaagcaacagaatcattttttagctaacacatatccatttaa

SEQ ID NO: 60330 - DNA, 654 bp, Bovine  19866880524203
  misc_feature (1)..(1): n is a, c, g, or t
ncatttaggctattgatcatgaatgaaatagtatggtaagagggagcaccagggaaaatgatgggattttacatttcttgttgttcacacaatgtccagttttgttaaaatatatgtttaatctgtaggagtacagagtgatttttggccagagttaacacggtaggtgctgaatgtgtgagtgtagatactatatatgtgaatctacctttgggtgggcaactgggcttgtgccaggacttggatgagacggttgctacatgccaccttggaattccaaagtaacctcaatgccaatatcagcttcttcttttattcctctaccttttcttcttcccctgattctttctcatttttctcttctttccaccatctttcctgttgtgccactgctttagagatcactaaaaagcaatattaggaaatggaatttagagagagaacagagaacgaagtcttttattttgcttagtctgaaaaagataaattgcttaaatctgtaccccaaagaaggcaggataaaaatagcttcctacatttcttctccaaaatgttaaataacccaaattccctcccctcatttttctttagaagaaaaacttctggttgtagtatatttttatacaaaagttctactgtgtggaaaaacagcag

SEQ ID NO: 60331 - DNA, 601 bp, Bovine  19866880535541
  misc_feature (1)..(1): n is a, c, g, or t
ntagcactatagatcctcctggaagaaaaggttcaaaggtcagaggaaaggaaggagagtggcctggattggaatgaagaatttctgttgggaagtagttgtagatgtgactgagcaagtgggttaaccacattacagagggtcttagaagcctggctgagaaagctggatcttatgttctaggattatggagccactgaagttttttgtgagcaggacacggatagcattccagtgttattttaaaagactaatctggtatacacaatgatttggagggggagtcatgggttggggagctttgaggagctacttaagaagatgaatcactggaccagatataagatgatttaaacctcagtctggttcctacagtgctagaaaggaaggcaaaggagacatatgatggacagctggcatcacctataaaaggtgaagtggggaacagactcaactattactccagcttatctatcacactcaagtgttatcacttttggtagaaatagggattaaggaagttccatctctttggaggaaggggtgggggaacaaaattgaagtttatttccagctgccttgaaaggatggcttggagatc

SEQ ID NO: 60332 - DNA, 1450 bp, Bovine  19866880540218
  misc_feature (1)..(1): n is a, c, g, or t
ngaaggcagatgtcctggatactctgtgcttgctccacaggcactgtccctcctcctccacccagctctgcgccacgggagactgtccagagcgaactgcatcaaggggcctctgattaggttcagcaggagattagggggatgggccaagagcgaggtcaggtgtttatttattcttctgctccttctctgtggggccagagtagcagtggctacggtccttaactgaaggcatagcagatgccatgggtcccccacccaggttccttcagccctcaccactgctgatgtccagtggtggctccttcctgtgtaaacacctgccactctctgcctgagggctttttctggacgtggaaacatgcctactctatgttcagggcaggctgaaggttctggacagttgatggtctcagggagcagccattaaccactgttgtatgggaattggtgggtaaacatccccatatcttctcccctgggttgggacaactctgagccgtgttcttcatcatctcctatgtccctatggagactgagccacatttgcactcagtggcaatctctgccaatcagtgcacactgccttggcctccttccctgccctgtctcacttacccatccctttccaggacctcctgggattgcttccagattaactacttgtgctgaaatcctactcttgagaatggctttgggggaaccccagcccaaagtagaagccaccattcttgtcaagcaactgtcttctgtagccatcattaccctgtgggttccaggaacctcttccttcctcccgatgcccctttgggccacgcataatcatggatacccatcgtttctactcccagagtgagtcactgcttttgtacacacagctgcaaaataggttgcaatgtcgtctttatgccgggtgtctaaacaatggatattcttttagataggaagaaaatgagaataagagaagtgaacatgtagcagacttcagaagaatacttcaaattctagaatctttggagccatattgtgagataattaaatgattgacagcaacgctagtcaggccagcagggattataatgcaattaccaccataatgtcaataaaggtatcagggtcatctatggggtgcttttcagggtgattgctatttgaagaagagctggttctgtcctgtctgtgctctttggaggcagagttcttggaattcctccgtagtcctatctgatgacatgctaacctcatacttcttagttacagcaaagctgctccacactcagctgcctgatgtgcttcatttcatgtctcaggcattgctgggatgttattgatactcacttgtaggaaaagaattttttaaacatgaataaaaaatttggagggactgctaggcagggattgatttcttgtgtgcccggttgagaattcccatgtgaggtattttagagga

SEQ ID NO: 60333 - DNA, 3613 bp, Bovine  19866880646306
  misc_feature (1)..(1): n is a, c, g, or t
ncaggaaaagtgctcagggagccagacttggggatgaggattaaagtggcccatctcagggagacagcgctccctaccttggtcttgtcatataaagcgtggttatccagcatcatcttccgctcgtgtgtggcatagcgccggatgtctctctcaaactgctggataagaaagagatcattaaaataaatcactatcaagtctagaatgtcttcagtattatctgtttaaagatatttaaatccctataatgaaacatcttagggcttccctggtggctcagtggtaaagaatctacctgtcaatgctggaaatgtgggtttgatccctaggttggaaagatcccctggagaaggaaacggcaacccactccagtattcttgcctggaaaaccccatggagacaggagcctggcaggccacagtccatggggtcgtaaaagagtcggacacaacttaacaactaaacaacaacaacaatgaaatatctatctccactaaacactctccaagtgaatttccgccccaccagggcaacattccaccatgacaaagctccatgctcacacgtaagcattggattgtaagctccatgaaaacaggaacctgatttgttctgttcacaaccatacttccttcctaatgatgcctggcacacagatggtgtacagtaaatgttgctcagtgaataaacaggtattatgaggattgtgtccagaataattcctgatccagagtaaacactacataaataatagtttggtgttgttttctatttggaatacaactactgtaaaagaggatgaggagtcaggagaccaggttccagcctggattttgtccctatctggctctgtatctttcggcaagtcacccaacctctctgaatcttggttggtcaaataggagggtggaggaagtgtgtgagtaaggtcctctggctgtaacatcctctcatgtgaacttctataaaactgatggtctgggccagctgcttcagagtagcatctcctatgatcagcatgggctctgaggctccagggagaaaaacttgaagccttagatggatgacaggaaaaccttgggaaaagaacgacaatgaatggagttgttgagattaattttcctgagagaagcatagatctagaaatgtcctttacatgtaggattagggagcaaacttggaatcactgaacatgaacttgggcaaactttgggagatggtgagggacatggaggatggcatgctacaatccattgggtcgcaaagaatcagacacgactgggcaactgaacaacaacaccatggaataattgtactaaagtgaaagaggagagtgaaaaatttgtcttaaaactcaacgtgcagaaaactaagatcatggcatctggtccctttcacttcatggcaaatagatggggaaatagtggaaacagtgacagactttattttttggactccaaaatcactgcagatggtgactgtagccatgaaattaaaagatgcttactccttggaagcaaagttattaccaacctagacagcatattaaaaagcagagacattactttgccaacaaaggtccatctagtcaaggctatggtttttccagtggtcatgtttggatgtgagagttggactataaagagagctgagcacccaagaattgatgcttttaaactgtggcgttgggagaagaatcttgagagtcccttggacagcaaggagatccaaccagtccatcctaaaggagatcagtcctgaatgttcagtggaaggactgatgatgaagctgaaactccaatactttgtttacctgatgcgaagaactgactcatttgaaaagaccctgatgctgggaaagattaagggcaggaggagaaggggatgacagaggatgagatggttggatgccatcactgactcaatggacatgagtctgagtaaactctgggagttggtgatgaacaaggaggcctggtgtgctgcagttcatggggtcacaaagaatcagacatgactgaacgactaaaatgaactgaactgaacctctgcaaataaatttatttggaaaggaagaatatattatatttactacattttattgtgttattataggggaagcccctataatgtggctcagtggtaaagaatccacctgcaattcaggagacacaggagatgctggttcggtccttgggtcaggatgagctgctgaaggaggaaaagtaaacccacttcaatattcttgccaagaaaatcccaaggacagagaagcctggcaggctacagtccatggggtcacaaagagtcggacacaactgagcaattgaacatattattttattagtacattacattacagtatactatgttacatacatatctcactatagcaattcattcacctgtaacattcttgatgatgaatcctggacttgaattttaagaacttgataaaaagaaatttttctaaggggaaactgatttgtcttgcctaattagactttaggattttcagcagtgctttgtggactttaatgtgaatatgaataacctggagatcttctaaactataatttcctgacttagtaggtctgtaggaggcccgagagtctgcatttctcacaagctcccaggcgatgctactggtctgagtggaccgcagaggaaattttacagactatcttcttgcaaactggctctgtagtttcttctggcagagtttagcgtatggtacaacttctttgtggtatttttaatcaagtgtgggtcaaaggctccagccaatggttttcaaccatagctgcacttttgagtcacctggaggtgcttttaaaaaacaccagtgcctaggttctgctgagaactagatttaatgaagcactgccctaggcaatgaagtaaaacagatgcataaacttctcttatgttttacacagcagatctatgacaagtctgcccttgagaagtttttcaaaatgataagatggtacaatgcatattatgaaggacttaacatttaaattattaaaaggaaaaataaaaggcaaaccttgttttgctataaaatatgatagattacctgcttcttaagatgaaaaccaaactgtagccctgctattatgtgcatctgtctctgcagacacttctaaggaaattgttattaagaagagaattcttgattacttgcctggataatgaggtaggtcatcattatttgtgtagcatggtgagttttcagatattaagctgtagattggattatgttcctatcctttattcccttccttgttatagaattcaagacttccaggcagtgccttccacaagagtaaggagagcatattttcttgtctcattgatgttgggcagggccaatgaaatgtcaggacacggagacttgaaatgttcttaagtggttttggttggcttcttgtactcctgtcattccacaagatcacacccaggaagcttgaggttctgatcgacccctaaaagatcttggagtacagctcagacatctgcatttgttagatattacaaacaggtaattcactgacctctggttttgaaggactagaaagtaaaacagataatgtaaatgcatttt

SEQ ID NO: 60334 - DNA, 2115 bp, Bovine  19866880752879
  misc_feature (1)..(1): n is a, c, g, or t
nattcaggacatagtgaggaccatagtcaggtgtcttgaggacaagaatcagggcccagtgaggacccgtcaggccctaatgaggatgacaggtcccagtgaggcaaagagtccggccatagtgaggaacagagtcaggtttcagagaagaccagagtcagtccatagagaggaccagagtcagggcacagtgaggcacaatgtcagtttccagtgaggacaagagtcaggccccagtgaggcatggaatcagccatagtatggcaaagggtcaggccatagaggacagagtcaggccttgatctagatgagagtcaggctgtggtgaggatgagagttaggccaaagtgaggactagagtcatgcccttgtgaagaccaaagtcaagacatagtgaggaccgtagtcaggccatagtggtgactagagtcagagcccagtaaggaccagagtttggtcccagtgaggcaaagagtcaggctgttgtgaggcagagagtcaggcagactctttgttgtgaggcaaagagtcaagagttaggttgcagtgagagaaagagtcaggccgttgtgaggcaaagagaggaccagattcggtctatagtgaggaccagagtcaggctagagtgacttataatattcttggaatattatcctattttatgttcagcatcttctcagtataatgtctatgaaattcatccttattattggattagtttgttataattgctcttatcgtcacacatgtttatcttttctcttgttggacatatggttaatgcaaggttttagctatggagaataaagctgctaagaacattcttacataaaactacccaatggttaagtcttaagttgcacgtctcttataaagctgctgtgaacagtgaactagcaaatactgaatgattactccaagaagaaacacaaggtaagtttctgagagtgtctggtcccaaaattttagtcaactgatcagtacataaccatgttttatgtgcatttcttcttaaagacaccttatttaatatgtactattgatccattaatattgaactcacagtcaacagcactataactcaagccaaatgaagcttcagttcagttcagtcactcagtcatgtctgactctttccaaccccatggaaagcagcactccaggcttccctgtccatcagcaactcccggtgtttgctcaaactcatgtccatcaacttggtgatgccatccaactatcttatcctctgtcttcctcttctcctcctgccttcaatctttcctagtatcagggtcttttcaaatgagtcagttatttgcatcaggtggccaaagtgttggagtttcagcttcagcatcagtccttccaatgaatattcaggactgatttcctttaggatggactgggctggatttccttgcagtccaagggactctcaagagtcttctgcaacaccacagttcaaaaccatcaattcttcggcgctcaggtttctttatagtccaactctcacatccatacaagactactggaaaaaccatagctttgactagacggacctttgtcggcattaatgaagcttacctaacacatattttctccaaagaatacatcacaattttcttgtacttaggaacactagacagcacctaagtactacattcgtgggccattttaaacaaaatcaccaatgaaaagcacaaaaatgtgaaaaattcggcactaaatggaccacaaaaaggacactggttgacagtgtgagagttgaaagaagaaggcagagcattgcctcactccgtcgtagctaggaatgtgagcactgagtgactcaaattttgcctgcttttcatatggtcacaaataatctgcaaagtcactatgagtattgatctgagggctccagtaaatgttagcgagtagataaattcacaaatatgtactccacaaataataaggatagactggatgtgtaaaacagggttctcatctcttcccaatgcctagaattggggcaaaaaaaagaaaaagaagtggtgctggaaaaatattatgtatttttaaagaaagcaacttggctaataagattatcattactatagacatctacattttagt

SEQ ID NO: 60335 - DNA, 1241 bp, Bovine  19866880753758
  misc_feature (1)..(1): n is a, c, g, or t
ntgaaggggcgtcagcctagggagagtggaggagcagaccctggggggatttcctggagcagaaccgccatcctgatcatagatagcagaactcccgactttgaagtgagaaagcaacttctggcttgtttagggcaggggtctggctatcaatatattgcttatcagctctagatccacccttgttatgttttgtgctagatccgaaccctgaaaacgttttttgtcagtagagggcactagagggacatgacaagaggaagggatttcctcgttctgggggggtctcatctttcttgctcctataaagtggtcaccagcagtgctcaggagacccactggcacccaaccttcagagttttgaccaaactccaaagggcaattccccacttgtcagccttttcctgcagtatctcaacaaacttctccagctgtcagggggccacagccacatcatttcctattaagtcacagcctgggagggttgtgggggcggagggacctctttcaaatatattccttccctaataattgctccctatatctaccatccctgttttctttaaagttctctctgcctcttttagtagtcatccccttttgcgagttaataatccttatattaaatttttgaattacttctgaaattaccgatgtggtttcagtctcccaactggatcctgatggccacagccaattaacatgggttcattactagcagttcaacctaatcttaactgactgagccatgcaatcatcgccatggagcaagtgagtaataaagatgggataagctttctgcttttcaaaaatcttctctccaaaaattatttgcaacaacacatgacagataaaaggttgaagtcttaatctttcatggttcctgcaaaatgtttaaaaaatgactatctaattagaaaaatgagcataaacagaaagaaaaaagaaagtccataaataaggaggggaaaagcccataaataggaaatgcacacagaaaaataaatacaaatgaccaaaatatattttcaaagtcttaaaattatttgaaaaagaaatacaattataatataaatgcaaattgaaaaaaatgtaaattatttttctcttatcaaatctacaaagactttaaaacctagaatataaaaatgttaatgttaatcttgagatacaaagagtaaaaaatatatatatatataattgaagggcaattgaaaataagagtcagaagccctaaaaga

SEQ ID NO: 60336 - DNA, 3296 bp, Bovine  19866880780948
  misc_feature (1)..(1): n is a, c, g, or t
ncctgggaacatgctccccatgacaccataattcttgtgctcataaaacatcctcagaggataagaagaaacatgtaagtgaatgcttatttctttggaagggcccccatgagagaagaaatctttcaactgcagactatcaggcaccaagggcgttaagaacaggatggaaggagggagagctcagaactgtcagcgaagcaggcgaccctaaggccgtgtggacccagcacgaggacagcacgctcaacttcagaccatcaccatgttttcagtccctagggtcctggggcttcatctctcctttcctcagactaagtccctccccgtggggatctgcctgtgctgctcccaccaacacctgaggccaatcagtgttcagagaagaggctgtgtcagagcagggtgtgagagcacaagggaggggagaggacgggggcaacaaggagtcacagaacttaaatagtgcgcacaggcttttcataagaactttatttctcaaaaaggggtgaagaatccaaagtattaaaataattctctaattttttgtttcggagagaaaggacaggatgacaaaataactcataaaaatttcaagcacaatggcggtaggtacttcatcctccaacttgcacctcccatccacagctttggctccaaccgcatcacaagtaggactgagctctggatccggagaggctatcaagcagctagaaagctttttatattcactccacaaataaatacagaaggccaacctgcccagtacaaatgattcagtccatctctgtgactgtttcggatgaaaatgctaataagaactgcccctctccagattccaaatctctcatttttaaagaccaagaatgtgaaagaaatgaaatgtggaaagacttgtcaggtacgactggctcttgtaacaaccacatgccaagagagactctacctcattgaggtgataaaaggtaaaaagcgactgtgatttttccattgccttttatgtgggaaaaccgcacctttctatttttatcatcaaaaggaattgcactatgtgaagcaaagtccctctctgcagcaactatgcaaaatccctatctagagcaattattttctaacttaaagagaaaagaaaaaaagagaaggcggggggggggcggggggactggaacgtgagtgcttagcccagactgatctcgccacacagcccagaagcatggaggtgcactttccaacaggcaggtcctaccaggaggtgggagacaagaccgggctcacccccaagatgcttgagatgagcttcactgtgaagacccctcggaatacacccggctctcctctgaaggctctcagttagtgtttcgctgaggaatagggaggttctcatgaaggtactttaaacttccgtgctctgagaagtccgagaccacgtggtcctgccctcgcagcagccacttggtagtcagtagtccttctagtcccactgccccccgggcgtggattcgagatgtacttattcccacttcagctcctgcaggaaagcaaagattgaggaagcagctttgcccagactgcttcctgtctacccaccagaccatctcttccttctcctcacttggcatcctctccctttcctccgctgacctaccctccctaggttggcctgacttccactctcccccgtaaacatgttctctgctcactgtaaatcatggtcaggccccttcttctaatgaaacagactccacgggtttctctttcatattttatttgcagtgcattttgacaactccacaaagtgctgtctctgacatctgtcttgtgtctggattgcataccattatctgatatctgggcattgtttgaagtgtacaacaatgtacagaggttttatctccctaagtatccttcaaaccctagatagtaagggacatgctctagatattccccagaatgctcagctggtaggtgctcataagacagtgactgaatacatgaaaggacactgttcctttcccttcctcctgctccagcctcagatgtggggcatcgaggctttttctgggtctggcgtggtggtctgcactgtatgcagtggaggcagagctcccctgctcatcccaactttactgagcaggcactgggctaggccctggggataagctatgtgaataactgatgcaattcatggagcttgtattcttgtaggcaaggcagccagagaacacctcagcaaataattgcatgtggtgatggggtgcagtggagggtgctgggatagagactggcagggtggcagcacctgggacagggtggtcagggggagcctccctgaggacctgtctttggctgaaacccgaacaatgagaagcagccagctagtggacagcagtggggtggtgctgcaggcagcaaagaggtgcctggggcactggctggcaaggagactaaccactggcttcaaactctggtttaacagcatagagaccacatgactatgggcataccgcctaaccatctcttgcttcagttttttcttttggaaaagcaggaaaataatagaatccattatgtagaactgagataatgcatgtgatgtacttatgcatggtgttggaaatctagtaaatgctcagtaaatatcatctgtcactattattcatgcatttcacaggaatttactcaaccagagtctgagcttttgctctgagtgactgatgggaagacaaggcagtggtctttgctcctcccccattttggaccttcacttgaatgctgggaacctcagcccttacaagtgtgttatttcttctttaaaaacatgggaaaaaaaataaaaataaaaacatgggaattaaaaataaagagcccaaggactaagaataactaagcaaaattccctttaacgtttcataattcagtgagaattattcctctaggcagttctctattcaaacattcagaggagttaaaatgttttaagtagctgaaataattgtcagatgtgccataaatgccttactggagctttgtataagggtacccctgacaatcagagactgtctgaaaaatccttatactaccgggggaatggagattttactagtaatgacagaaagggggagggtgccctttccaaaaccttgtatttcaaagtctgttttagaagtcaaccttgcacctctgggcttacctgtttatttctgatgcttatacttcagcccagcataggcagtagtaatgccttcttttttcctatccttggggggatccctatctctaaggcaacctggatgtgt

SEQ ID NO: 60337 - DNA, 1991 bp, Bovine  19866880786231
  misc_feature (1)..(1): n is a, c, g, or t
ngcatcttcaaaggtccctggtggtccctgatttaccgtggtgttgaatataaattataccaatgattagaaagaagtcagatcacttagagtaagaccaaacccctcaccagaacctgcaaagccctatgagcaaggcacccagtgaccccacccctgaccctctcttactcttttccccttcattactcttccaagccacactggcctcatgcccaggtactgttccacccctgagcctttgtacatgcaattccagttaccttaaatgctcttggccaagtggtgtgcttgctgtctctttgtccctatcacttttaatatcaccgtctctgcctctttacctgccttttctcatttcttagtgcttataattattaacatagtataaactttacttgttttattttttcaaactagaatataagcaccatgaaatggaaacatttgttttgttcactgctgtaactctagcctcaggcaggactagtgaatagtgtaaagcattgaataaataattgttgactgactaatagaacaatgaatgaaataacaactacagaactcccaaaccaaaataggccaatccgttaaatatctagaggtaagcacatgaagagaggagtacaggaaccattgagctttgaagcatatggagggaagcatagcctcctattgagcttgagtttgaatgtgacaaggaaaaagatttggtggagaaagaggggaatagaattccagctgaaggaaatctcatgttgaaaaatatcagcatccaaaattcattgattcattcaactaggactatagcaatgaacaaaccagaaaaaagtcgtggcacttagggagcatacagtctagtggtcgtaatgtcaggcagtatgatctcggacacacacatctgcttattggaatggtgagatgagaagcgcttaaatttctaaagggctgagagggctaggtagacagtgaggctttcatctggcaatcagaaggaaactaccttcattcttaatcaggaagagccctgggaatatcaattatggaggaattctgcaggtgcatgaaggatggattctgataggaaaaagaattagggagataccagaaagggctattatagagaagtggtggtgattggaacagagggatgggtgttgccatagaagaggttgagtctaagggacctggaaggaagcagctgagaaaggatcttaaagcccctgaatgtgagaacaatctaagtatgtgtcaccaagaactccctgatggagaggaaggaagatggcagagagggggcagagactctaggagctggagaaatggcaaagtcagattaggaccagtcccctgagcttcagtgattgtcccatcactgcgctgtgtaaacacaggaagggaccacagcactccactgatgtttactctccagtgcttgtctgtattggctgttttgttctctatacgacaagccaagcttggtctggatgtaacccatcagaaattggaaacaatttgaatctaatgcatcacactgaatctgcagagcaaaacttctgggttttttttttttttttttgcctaaaatccaccacatctgccaacaccccaaatctttcttaattaatagagtgaaattttaagataaaacatcttggtatcataaagtagagaagctgggatttctctgtattgcagaattttgactaaggacaaattacgtaattttaatctttaataggatgccagctctggatgtcatgataactgcttctattagagttaaaaagaatcagcttttttgcctctgacgtagctaattggcttgaaatcagcctgttttgtcaaagcttgtgtttccttcagttttgtctctgttaactgaagaattgacatttctacctggcttttagctcaaacagagaaggtttctcattcgtcctgtgacaggaagggaataagagggcaggggcagtcttgagttccttagg

SEQ ID NO: 60338 - DNA, 827 bp, Bovine  19866880812695
  misc_feature (1)..(1): n is a, c, g, or t
nagggagaaggtgcccaaacaggctgccttaagacttggaaacttaccttcctgtgggttgtctcttatccggatttcaaaataacttcatagacaccgttttttaaaatgctttggtcagtctgtatttgggtcaccgtggcaaagcctaggtgtggcaattcctgcctataagacttcggaggtaggaggtgaaggtttggaaaaggtagacaacttgcatcagcacagccagacagctgttcccagcgagcagccttctctgccgtcccaccatgccttccaaccaataccacggtttctcaagcggccgcaacctttgcttgggtgacccagtgctcttctggcgtaatgaactccaaaaagggattgctcatcagggaatcagaaataagcggatttgtggggccagcacaactgttcttgagtcccgtcctttttccagtgagtatcaaggtaacaattttcttgcttcaaagttgcaaaaagtaaatcgcttttttttatttgcttgcagacaagatacatttttcaaggctggggaggggggaatggatttctgtatcagagagagagggaaaatctgaagagagatctgaacacacattgcctcaagatagaaaaagttacagcccgggcaagctttaggggaatgagctgctgaactcctcggcaagtctgtccttcagtcaatgaaaaagacatagggtttgaggttccttccgaaacggggcaggctaatttagcccctcccacgatcccgagggtctgttatatctctgttccttgagtacctctttcactgagaccgaccacagcaagcagag

SEQ ID NO: 60339 - DNA, 833 bp, Bovine  19866880823741
  misc_feature (1)..(1): n is a, c, g, or t
naaactgagattaagcatttagaaactaaaacagcaattttacaaggttaagtttgtctgttgaatccaacaataaaaatttgaacttgtttgtatgctttctttttaaaattttattttccggtaagtgatatactatgagatactaacaataggaataatctgacaactttcataaaaacagtttgtaaaatatatgtatttattataaacattataatttcataaaataatataaacacaatatatctacatctacatatatgcctggggagaaagtactttaacttctgattcacccctagaaatctatcctaaaagtaataatcagatgttcatgggagcactgtttacaaaatcacaacattaaaaataattaaaagcctaccaataaataaataatggtatttctattcaatggaatattcttcaatttataaaacaacactgtaaacccacgcttagtaatagggaagacacattaagtgaaaaaaaaaaatcaaaacagtagccatatcaggatttactttgttcaactgttaatagatggtagagaacagatgaataaacagacacatggagccctaaacactcttagtagtcaagaatacatacatagaatgtgtttatagtgatcactggttatccttggggtcagtgtttcttaaaatgtccttggattactatggcctccacactggcatacttccttatcatagcacaagcaaatagcctaacatttggatgtaacaagaataattccaagaccacactattatgaaactttaagaaaaagcagcatgaatccatgaaactttggaattctcaaagca

SEQ ID NO: 60340 - DNA, 1752 bp, Bovine  19866880882897
  misc_feature (1)..(1): n is a, c, g, or t
nactctgtcctttctatatatcttgaaatccagaatttctctggtttaaattttccagtctctcattgaaacagggaaagggtggttgtctgatttcattgaggaggatatcactcagtaaccatgttctgtccctgcctcatccctacctccctgttatctcctattactgagtcagggttctacagagatcctcttctagtttctgaaggcttttaggtttggccttctaaccctctgtgaaaccttgcttccatctattttctgtattcatgtattatgttatctctccatttcaatgaagatggagttttgtatctgtttcttattagagtggttttaggatatatagaaagaagatatgcctttacattgccatcctaaaatcaagtctagtagtagctcttgatgagcctatatcctcagtgaatctgaaaaaaacaacccaattcaaagaacttttacaaaaaacatgcaggatttcccagctgtgaaacaccactgtagacttaaatatatattcaagtggatggcttccctgatagctcagttggtaaagaatccaccagtttgattcctgggtagggaagatccactggaaaagggacaggctacccacttcagtattcttgggcttcccttgtggctcagctggtaaagaatccacctgcaatgcaggagacctgggttcgatccctgggttgggaagatcccctggagaagggaaagactatccactcctgtattctggcctagagaatgctgtggacagtccatggggttgcaagagtcagacatgactgagcaactttcactttcatacatgaaactaaaagttgctttcttgggctcatagctatcttaaaggtctgttctcaatatagaatgacctcaagttcatagaatgaccaaaagttccctgatttgggagtttgcagagctaatgacacttttccctacctgagtttgaaatcaattaaaaagagtcagatgaagatcacaattccagctttatcactaataaacgctaggcaggtggttatgacttgagtgtgcagcagggagcttcctaatgtacaactgcactcttccattatgagttcagtacccccagttttaaccacaattcctcctgcttgtgggcagtttaaaacttgccctcccccaaaggctctgaaatgagtcagaacaacacattaattaaatcaactcttaggtaacactgaacacaaggctgaaaatccattctctattctattttccatccataaagtatttctagccatcccagcttatatagctcatcaggcattctgcagtgaggttaaataacagtattaacatatttcagtaatgtcaactgcaaaagatttgctccaaaaattgaatacatcctctccccattatgaagttcctagggaaaaattaaagtccgaacaggaaatccttttgtaagttacagtctaaagaaaggttattgcttattcttcagtaataaactcctccccgttttttttaatctggttagtctcagccagtcttggctggaatcagggaaccctggcatcttcagcctaagctggctgtacttagaatgcatgtggggctttcagagccacagaagttacattaattgtataccaagccctgcatgaacgtcactgtttaaaaaaaaaatccaaagagttagtatgacatgcaaaattatcacagcactggccccacattcatttttaaaatatctatagaagg

SEQ ID NO: 60341 - DNA, 960 bp, Bovine  19866880989836
  misc_feature (1)..(1): n is a, c, g, or t
ncagaatgattactttagtaactcattccagtatttattaaggtctgtggtgataggtagaaaactgtgagggaaggcagtcagcaggaagttggattctcgagaagtgataaggaggttcagtgcctgatgttcaggtgtgacttactttcagctttttaatcaagttttttgttttgttgtggtgaggattctttttggggttatttatttgtttgtttttgtttttgtttggtttcttagaaatcttgttcaatgttacaagaagaatcaggaaagaattgattaggggcagatgtccacagggatacaaagaaggatctgactccaacattatttttccttcagaaagctatccagtttcttttatccttgttacagctatctgaattcttgctgccatgtttgagagaaaatttatagggagattagttatgattttttattacttataccagttactttatattgtcttagctaatcagacttttatagcagtgtggtttctttaaaagcacacatatttttctgcttatgaaagcaatacatttttgctgcctaagtttggaaaacatagataagaataaagaaaaataagtcacccataatatcatcatgagataaaatgagattaatatttttatttatttacctttttgtatgcatttagaaatgcatgtgaaacaacatatcatgaccatttccccatattattaaaaattctaaaaatattaaatcttcctgcctgtttttgaacatttgcttctgatttttcctattataaataatgctgatgaatagcctgctgattaatttctttgtgtctatctctgattagttccttagattaaatttcctgaatgtgaaattgctgaatcgaagatgtgaatatttttaaggtttttaatacattttgccaacatgtcttcagggaaagattttgtataaattcttgaccag

SEQ ID NO: 60342 - DNA, 598 bp, Bovine  19866880993151
  misc_feature (1)..(1): n is a, c, g, or t
ngtgtgtgtgtgtgtgtgtgtctgtgtctgttggctgtgagggagggaggggtggcggaggaggatattgccagcaattttctgccccaccctcttgatgctgccttaaatagctccttgtcatcagagctctgatgtttcaggctcttagtgggagaggagggctgggaggattggtctgttggtacctctgtcctgggcactgttagagtggttggttaggaaagggttagttcttcaggggttgcagagagctcatttctctgctggagggcgctgagtggcactatctctggtgactatctctggtgcagggtattggcagctgaaaagagatgctttctacccctagggtgaagagctgggagggtattatcatcgtctgttacacacccactgtctgttacacacccaccctcggttggacctttcttcctgttacctcctgctttcttttattctagttggagagtttctatgaacttttctgaaagtacttggaatgttggaaggtgaggtaggagtttttggaaagcagatgcttcttggtgtcagaacaaagaactgtatgggtttccgcttctcacttctccaaaat

SEQ ID NO: 60343 - DNA, 2597 bp, Bovine  19866880997207
  misc_feature (1)..(1): n is a, c, g, or t
naaaattccctattcccctccctcttttcttacagagcttataacaaccgacacatattgagtcttctatttgttatctcctctactatccactggaatataatttccatgaggtcagagtagagattgttcagtcatatcctgagcagcagaaacagcatctggcatgtagcaggtgttggataaatatctgttgaatgagtgaatgcctaaacaaaccattacctcattcaaaacacgcaatggcccatttgacagatgaaaagtcctagcgctcaaggtcccatccatgctcacacagggagtaaagacgaagctggccttggcctcaggctctccttcagtccgctcaccggcacattcctctgctggccagagattttcataccatcgggatttcccctgacctttagcccaagaggaaatgatattgcaactggaagaatacccagagggctgggagctggcagcgaagtccccagcagctgcagggagcgtgtgattggattcggagttggccagaaaggcagcggacagcagaatgaaggcacgcaaaaatatccgcgtgcgcctgggccgccgcccgcgtcagtcaccagagggaaagaggtggtctgcgagtcaggagttgggattctggaacagccgagcagtctatcggggttgtccggggccagggcattaggttccatgtttaggacccttcttcgggcagcactggaagcctgtgacctctgggacacaggaaacatcattgagcttgtgaccaggaaactgtcttgagccctcggcttcccttatgggctggcaaccccaggctgatcattttgtgtctcagttttctcctctgtaaaatggggttacacttctgccatggagttttttaagcaaagtcaaaggggagatggggaaacttctttgtaagctgaacttttctaaacaaatgcaagaagaaataattttgcaccagtagcttgttctgtagaggttttgatgtggtttcatagtctcctggacacaggatttgtccttaaatctgctttggggtatcctgacccacccaactgctcaaccactgaatgcgggagacactgggggcccctctcagcccctcatgtctaagccatcagcctctcctgttgctctgcctccaactcttaatgtattcctgatatccctgtggatccagcctccctgcctgcctaacacggtcaacaccttgacaccacatgcccattcccaaactagtgtcttttccagatcctccttctgctgggatgcgctggcccggatctccatgtggccggctccttgtcttccaagtctcaacccaaatgtcatctccctgaagggccttctctaaccactttctaaggctgctccagtccactttatcacatgctgcattcggtcttcagagcattttctgaacctgcaatcatatcctttattttcttacctaccatgtatcgtccagccgcccatttggaactgatgcaccacctgtcttgttcactgctggattcctgctccctggggctgtatctggttcacagtcggtctaatagtggacaatgatagatcatcttcctggtgggtcaggtgggaacctggtttccagatgatgctagcaaatgagattgtgcatcactgctcttgactgaggcagtgtctgcagagtctgatttataaagtaaacagggaaatttctaaaaggagactcatcccaaagaggaagccaggttacctaagtttaagccgaggcagcagccactgtcacatcacacagtcaggagcagcgctggtgatgtttccctgcatcccacaccaggggctttagaagcagagagcatactttgtgtactgggctttctcagggaggcgagggtgaagaaagctgtcgatagtattcatctgttcactttgtatatttcactccaagtaccctgaactgattgaggaaaggctactttattaataatctgtgtactatgtgcatggttgtaagaaagcaagttcttttttagcttcagcattgagaacagcaccaacctccccctcccaccctcctcctccgcacgtggtaggagcctggatatcctttgttaaacaaatctttggggacttcccctggtggtcttgtggttaagaatttgccttgtaatgcatgagtcagggcactaagatccccacatgccacgcagcaactaagcctaagcactccggagcccttgcaccacacctagacagtccatgcaccacaatgaaagatcccacacgactcgaataagaccagaagtatctgaatgaataaatatttaaaagaaaaaaaaaacaaaaaaaccccccacatacctttactgatccactggtgattctgattgttacccaggagaccaggtttgtcccctcattcatggtgctgatgcaaaggccagtatgtcctcatgtgtctcttctttgttcctttaggtgggcttggagagcagccatctgggagctggctgaatgctacagccacgaatgccagcaacgaggaaaccagagagggtaatgtgagaccccaccaggcctgggggtattttttctttcagttg

SEQ ID NO: 60344 - DNA, 878 bp, Bovine  19866881031888
  misc_feature (1)..(1): n is a, c, g, or t
ncccattcgtataatgatcgatatacacagtcaacatgtggtagaagcttttagaggtcaaggtgggctggctgcttcatggctgtgctgggctgtctctccagcagaggtattagtataatctgggtgtcaataaagagcatcttttctgaaattggactggctgatttaaggagtaacatttaccactccttggccacatgccactgtgagtgttcatggcctttctcttctctctgctaaacaaaattgttgtctattactcagccttcccagttaccctaccttttaaggagaattttctcctggttagctcagttcctgggcctttttcatgtagggaaaacgagtggaggctgtgctggagaactaagagatgggtcagtcagagtttgtgtgagtgtgtatgtgggcttgtatttgcgtctgaaaggcccaatacttgtggtgagaagaagaaacagaggctaaagaaaaagagagggaaagtgtgtacgagctgggggttggagggagatgaagaggagtatctatagaagggtgaccactggctgtgtatgggatactaagtggtagagaaggaggaggggttttaaagatgttttccaatgtattaagaattgcattccctcccactggcattcaagagatcaataacattttgaattttgtttgggctggattgtaattatgattatgtgattgtgattatgactcccaagtgaagccagggctacatagagacagttacgttcatgctactccggcatgttctatctgggagatggaggctagctatggagcagaagaatgtgagaagcagacttgggaggagtatctaggaaaatgctctgcggtttgggtgcaggggcttaggg

SEQ ID NO: 60345 - DNA, 1139 bp, Bovine  19866881044834
  misc_feature (1)..(1): n is a, c, g, or t
naaaaaccagcccagatgtattatagaagacaaaactcacgtgaatttttaacataaaaattggtgacttcttgtttgagaggcccactgtagacactaagctatttgctgaccgctgagcatcaagattcaaccatctctacaattattacaagagtcagaagaaaggttaaagtgccatcgcatgcatccatcaaagcacccgggacttcacaccagcaacctctcaagggccgcctaccctccctgagttgggtcccagcatgaatgggaaagttgagaagcatgtcattgttttccaaagtggtctggggcctgctattgctgggtaacttagctctgcctggggaaacaaacaaacaaaaaaaaaactatcacactgagtgtttcctacatatcttctcttggtcataagcctgtccatctttctcccatcccctctctaaagattaccaggatcactgataaaaccccagctcgaccatcagcacctccgatcccttatagcccaggcctccattagagaatacattgcagacactctttccatggaaggaagtcaagtaatagggcacatctcttgggagagggtgtcccctgtgtccacaaacaagggtggaaactttttctattgttgtggctgtttttgtgataaaaacaataatatccatgtgacagtgaactgggaaatttttttttttctgtaaagactcactactgaccacagaagaggatcagagagggggaaaaaaaaaatctctctctctctctctctctctctctctctctctctgtctcaatggaagaccacacagaagtaaaaagcaatttaattgggtttagtttgttttttcgtgtgtaaaacacatacacacattcaaaaaaagtgaactcaactgatttcaaacagagaggatgagattttaataacaccttaaatatcttacaattagttatgtcattgacagaaaataaaagatgggagaggagatcaaagaaaaagatacaataggaggagagaaaaagaaatggacagaggggggtatgggaggaaaaggacgggaagacagcaagacacagggacagacagacatgagtagccacacacaaaaagaaggaacagctaaaggattcacaga

SEQ ID NO: 60346 - DNA, 1123 bp, Bovine  19866881081789
  misc_feature (1)..(1): n is a, c, g, or t
ncctttcccaaaatgcctctcaaaattaaagtaagttaataggttagttatgggaaaaaattgcctttaaatctctagtcttgttattgaaggaacaaagaaaagaaatccaatatttaggttcaatctcaaattcactattcagactcttgaaagcatttttaaggcaaatatattattcaatcagtctctttcatgttcattatgaatttctgtataaaactgcttaacacggggaggtatttttaagaaatctagacactttatctgccttgggataggcagaaatactgtttttcatgtacttgtgtcctaattatatttcagtttcaaaaatatgtgttgcctacatcagcaaaaatgagtcttcgaaaagcaactgggagaattctttttttggatgagtagctttgatgctgcaacagtgttctggtcgattctgttcctgttaggaaatggagttggatttcactgtcctttacaacatggaatcattttgcttctgctctaacctgaaagctctagcagatgacctcccaagaaggaccacgcatggatgaaggacaaagtgctggtgacaaaggcctccatacttacaaatgagtgtcggtctgcccctagcaacccctctctttcctccctcctgaccccatgatgctacctgcctgacccccagcaacccctctctttcctccctcctgaccccatgatgctacctgcctgaccgctggcttctaggctccatacagactccttacctggctggatgttttctctgatgatggttacatgctggtctctgtctggccgggtgtgttcatgccagaacccaaccacatggcccagctcgtgggccacaatgccaaacttgtcacagttttttccaatggatatggcctgtgggcctccacctcggcgcccaacataggaacaacagctggacaattgcagaaatacccaggtcagcagatcagggaatgaagcttgaaaacaatctcattgtccaacttccctcccaaggcaggaattccctccaaaaatggctcttgacctttttggtggcctggagaatccttagaaagatacagcctctcctccaggaaaaaagtcataccttccccca

SEQ ID NO: 60347 - DNA, 1392 bp, Bovine  19866881155864
  misc_feature (1)..(1): n is a, c, g, or t
nctcccctcctgaacaaaccttcatataccgcgaaagaagcccttgcccaggatgttgctgctgctccggaattccacccagaggcggctgtccgtggaggtgaggggctctgggactttgtcgccacaaaacctacctgggaaagggaaagaactgtcaggctgctggcagatggcaaggaggggctcagcacaagcagagagagagagagggcggtgctgcttcagatgaggttcaaggggagcagtcctcactggaggactcatcctgtagcactgaaggatgaaaagctggaatggaaacagtgactgctggtgtgcctccttccggagagtctcagacgccaatcaacgaatacccagcatgtggcctctcccctgccagggggtcacgatgagtgctaaggggtaggaggacatctcagcaaggccaggggtggggtggtggtctgagcgagtgatgagggtcccccattgtatttctactacatacatagccttctatttgaggggcatgccttataccttccttgccccaggaagggttgccagaggacacaagatgacgtgatcagatcttcttggcttttgaattccacgagtctggtcacaacaccaaaaatttagggaagtactcagtaaataagagcacattgccttccccttgttgtcttagaaagattcctgggatggagaagcaaggggctagggggcagagaattggagagggcaccatgggacctccgaaaggacctggtgccccaggtggacaagggtgatcgatgccccagggaggtttaaggagttgggaggagcagagatctgtaaccccgggagcagttcctggcagagccttgagggcaacaagaccctggatcccccatgtcccacctgggctcagaacaggagtgtctatatggtttcttaggacattagggcaggagacaggcaggcagagttcttcaggaaaagcaggacaggatggcagcaacaggactcctgggaaggggatagaaggaaccttccccatggcccagagggcctggacagtcattgactgtctcccatagaacgtcttctagggagatacagactcggcactgatctacatgggcctggagaagttgagacaggataaggcacaacagccacttagatgccagaggactggagactagagggggatgaggccgaaccaggaatgccagtcgggatagcaatgcagatgcccctgggacaccaggccctggcacaaagtgtgccccctactggcactctggtggggggacacaaattgaattcaattaagttcccactatctgatgcaaaggggctcataattgctattgaacttgtgttactgaatatacaaataaatgtgtattacttaag

SEQ ID NO: 60348 - DNA, 1405 bp, Bovine  19866881155869
  misc_feature (1)..(1): n is a, c, g, or t
nttgggggcaccatcaaatagccaccctgaagagcagccctagagattaaatgaaatccctgctcacagcacaaccctttttcaacagacaagaaaacagccctgagagaagagcgctgtgcatggcctaaaaaggctttgactgcattcagggccagctgagatggggaacactgggggatataaacagtgtgtcagacataaagcagttcaggttttacacaatcacggcaacaaagtgagattgattcgggtctgaattaagctctttatattgtttctacttaaaaaggaaatgtattgactacagtcctcctcacagatttatcttccctgacatcaggcacattcataacctattttaaattccaaggaacaatgctggggtttaggaaaatgaataccagtgtgttgcaccagaatgttttggaggctgggaagaagcttctctggcttttaattgctcaggaaacaggcgtgttgtagatggttttcttatcagccctaacttccagttagaagaccgcttgtccaggatgcaggaacttttagagcgggtctgtctttggaagattcgctttggagtaatcttagagaccatgtgtggtatcacttcagcttttctcctctctcgtaaccatctcctcctttcagatgtcaccacaattcatcaagctcaggcctgaattacctgaacttgggatgtctcatctcccgcctccaggcttcaccaaggactgtgggcactgatctccccaaggccagcctgaccatgtcccacccagggctccccacagcctttaggacagcaggaccatctgaccatcacccagagagggacacctgagagatagggggctccattaataatcacattggagtaagaggcagagccaccctagaagcaaattggaaggtgaggtcatcaactgtagaacaaatccagtctctttaccataagcttgaattcaagactctccaccctctggccccagcttacctttccagtctttctgcattttgcaggtccaattccaatggacctgtagttacacagcacatcctgggctttactatccctgtgcatttgttcccagcatttcctcctcctgcctccacccgaccccagcgctggccagagcaccacctacagaggtctaactcctactctccctgcaaggcttttgtgtgttagtcactcagtcatgtctgactctttgtgacccccatggactgtagcccgccagactctcctgtccatgggattttccaggcaagaatactagaatgggttgccatttccttctccaagggatcttccccacccagggattgaatctgggtctcctgcgttatagacagattctttaccatcagagccaccagggaagccctactctccctg

SEQ ID NO: 60349 - DNA, 994 bp, Bovine  19866881197650
  misc_feature (1)..(1): n is a, c, g, or t
ntctgtgtttaaaatctaggacaacacgctctgactataaaaatatcatgatacatttatatcttcactaaaactgaagaaatatgtgactggaaaggaccttggaaaacatctctgtgagtccaagcagtagagagagcacagggaaaatgagaggagactgaagttctagttctggttctaataattatgaatgatgacaatttgactaggtcattttgcacttcaaactgtttcctcatccttataatcagcaagctcctattgactgaacaaagctgttatgaaaatcgaaagaatgtaaaataccctgtagttaaaagggttatacagtgaggagttaatataccttcaccatccagacagaaaggaagccataccacttttaaacactttttggaaggaaatgccccgatttttgtgtgtgtttctttcaattaggaagatatttacatgtttaccaccacacacaaaaatttttttaattatacaaggcataataattaacacatatttacttacagtgattttcttaccactaatcccccaaccaaaaaaatctacattcattttaattacatcagttactattctaatagtcagtcatttttctctagttatttccttttatttttgacagtgtgcttttgacccttttaatgacttcctctctgtccttacatgcttcagcatttctgatgacccagtaatcatgcccaagatcacaattctacatcttttctcttttcacttcccttttaatgtagaaaataagcctaatgatggaggcaccattagattatactaaaaaatactagatagaaaatcttctaggtgcagtcatcagtctaaggaatgaataaagttacaattattgcccctaaatggagatgtcagagttgctcccttgctgaaaatcagaaatcaagattatcagtaacccagagaaattcagaaacaaaaggcagtgtttcccttgggattatcacactgt

SEQ ID NO: 60350 - DNA, 671 bp, Bovine  19866881231070
  misc_feature (1)..(1): n is a, c, g, or t
ncgtgatcctcacttctgaacatgttcatcaacctctttaaatattaaaaaatagatcatgaagccttaattctttttcttagaatcctttgccccggaagatacatgatgaagatctacaattaagtgagaaatgtatgttgcatgaatctgagttttagctatcacagtaacatcttcagatacttaaagaacagctacaaataggtgcaatatgtaagccatgtgacacaggctacaggaaccaatgacaagacaaggaaaactcaagcagaatttgacagagcccagtccaacccagcatcatccgaggagaggctgttcttggcccatcttagttccctagagaggagatggccacatcaggctgaaagctccatgcaatttatgatggcacttaaatagtacctgcttcctcaggctccaattcatgtgcactaagcaactttatgacaataatttggcttcccaatgacttaaatgtccaaagcctatttaagaactctttcagaaaaatgggtcacagactgtaatcatcagtttaataagtaggctgtctctcatggtttctcctttgaagatgttattcattgggagctattgttcagaaatcattctgttggatttctggatatgatgcaaggactgggtttgtgtattgattttagtgt

SEQ ID NO: 60351 - DNA, 1948 bp, Bovine  19866881269345
  misc_feature (1)..(1): n is a, c, g, or t
nggcattatgagctaaaagctgtggtatgttagctttaaaaaagagtatttatgttggaataattttaaaataatgtttacatagccgtaagtcctgtgtggttggtattgaacacaggatcgcacacgagaagatttttggtgagagttgaaattgctcccaagcaccagaattcttggggatgaatcaacatcatttgaaacaaaatatttgcaaaacatttaaaggtgatatttttgaaaatcagaatatggccccagaggactatgtttagttaaaaagattgctgggagttaaaataaaaagacataaaaaaataagaatacaagaaaggtagaaaaaaatgcatgggaatattttttccttaaaatagaaaaaaatcaaagtattattattaataatatatgtctgtatatatgtatgtatgtaaaggatcaactgtcagagccttaaccagtgcagtgtgataaatgctgacccacagacttgactgaataggccctcctggaccggccttgtgttttatggttctacttttaccaagcctctcttggcctttcttggccctggagggaggttcaacctacattcttatattgtgatctttcacagcccctgtcttggaagatctttgtttcagcacatggaacagcttgtcatgtggttcgggtcttacccgcctcacagggtggattccatttctctgattttttgtttgggggcttttgttttgtcccatctgatcttcaaagttgacaccaaaatcaggatgcagaaggtggctgttaagggtctctcgctgaggacttgaaaattctgtagtttcagcctttagaagtctgaataagattgatgaattccctggaaaagtgagaaggagtcagaaacagagtcagctctgcctctgtctttgctgctctcgtgaaacaatggtacttgtttttctctctctagtatgattttcaaaaacacacaagcttcaaccattatcaacctgtggccagttggaaacaatgagacgcttatgaaaacctttctttaggccttctgtgagtgacgtattcccagaaaagacaagctctgattcagctggggctggccagacagctcccctggaagctcagactcacgggacataaacacaatgtgggttctgcaaagaactgaacagatggcttcacgagagaaagtccactcagcagaaagacccaggcccctgccttggctcttccaaatgctcagtgacctttctgtacacatcccacgggacgttacccctgcctgctttgtccttggggctgttgcaaagctccaagcaggttgacttcaactcagagaattctcttgatgacctggtgaaacatttggggtccaggtcttcagcctgatcgaattctagtgtcatctggtctagcaaatgctagaacctggatcccagggcggggtgaagatctggaattaacttcagcctgtggaatttctccaatcagagaaggaggctgtgcattgattcaccataagatggttttcctctaaagttaagttttatgttactcatgaaatgctcaacctggttacatcatttgtaaaatcttgttaactagcaaatcaccctggggtttgccgtcaatctggtccatttgataaatctcagataattcgtggtattgtcattgttcagtgtgtgaacaagtattccctaggctttggcagatggttttcaagtttcctttgtagactgaacttctgaaaaataatcccaaatgcctagaagatttctttaaaaaaaaaaaaagaaaaaccgtttagaggattatctataaatatactgtattttttatcttgtgtaattgtacgtttcatgaaatgtcagtttcaaaaagaaagtggaaaggagctaacatatgtctagaaagaattgtttcattaaagaatgggatttatcgg

SEQ ID NO: 60352 - DNA, 1355 bp, Bovine  19866881435931
  misc_feature (1)..(1): n is a, c, g, or t
ntgaaaacagagaattattgtttttccaaaatgacctataccttaaatatctcattaaaataaacaattcagtcaggatcctcaccttcagccagtctaatataacttcgaaagcctttgataccatctgtgtttgagaacataatatattaatagtttggtaaaggaagtccttggggattccctagtggctcagtggtaaagaatctgtctgccaatgcaggagacatgggtttgatccctgggtcggaaaaatccccaggggaagaaaatagcaacccactcaagtattcttgcctggaaaatcccatggacagagagaggagcctggcaggctatagtccatggggtctgcagagtcagatacagcgactaaacaacaacaaaggaaatcctcactacctaaaaaatggggaatgacagaattggaaaatccaaaagatcagtaactaaagcttttgtcattaggctgtagtaggccacccagatacccaaaaaggatactgagtgtctcatatcaccagttagaaccaggagtggctttccgacaatatacccaggattcccacttctagacccagtaagagacgcagctgtgctctgttggaaagcctgcagaaagagtgaaggaaagtcagtatggagaaagtcatgctcactcacttttccggtgtggcctcatgcccttccttaaggcaatgctgcaggttagctgcactgaacaatctggcttccttccacagtgtagcattttgcaaaaattgctcctccagcatcttttactttttttaattcactaaaataaatccttattcatatccatctgaacactccttctactaaagattgcaactaaagatctatcaaagatctctcaatcctgttttccaaaattactattaactcagggctatgttcagtgtagctagaatcagaggagtttaaatgtaatttagaactatattttaattaactatagatgttccacagatgaatactctgagtgacatgggatttagtgaatcacttgagggtagagttgagaagaaactggactctgctatgttcaaaaggaaagaaagtagaagaaagtcaaaaggtggtgatcaagactagaaacttaagccggacatgaataaaatgctgaatgcccagaaacatgaaaaaagctagttaaagaatttgtgtgggatgttagctaagtttatgattcaaaatgacgatttaaaaaaagtgtttggctttgtgcgtgaagtcctgctttgctgggggaatatgttaatgaataaaccttgctgaatccttatcactcgaagttaaattacagaatattaaatgttagacttcggtgacag

SEQ ID NO: 60353 - DNA, 1326 bp, Bovine  19866881441242
  misc_feature (1)..(1): n is a, c, g, or t
ntgcattgtgtatttgcaagttgctaagatagcagattttaaaagtcttcatcacaagaaaaaaattgtaactatgtgtggtgatgaatgctaatttattgtggtaattgtttcacagtatatacatgtatcaaatcattatgctgtacacctaaaactaatataatttatatatcaattatatctaaatttaaaaaataactggataagggagactaaaagtgttatcttaaaaatgccaaatacaaatactatgaaaagataaaagttgacttcatattatatctacacatgaaaaaagaaattgaatagagctctttgaaagagttcatgggagaggtgaatttatgataagaattgaaagggacgaaacataaattttgattgcatgcagagaaagtgagtaggagcacaggcagaagtgaacatggaatggaaatctggtttactttgctttcaccatgtctgaggatgagttaagatagtagctggagatggaagtcataaaaaggtaaaggtaaccttagatttctgagcataggttttaaaatgatgctttccaataattcttacttttgtttgttgcttagaacagagagaatagaggaaaagaagttgacaagtctatttcagactttcaggtgatactgattttgtcaacaaaagaaagtgtggtcagtaaaaactaaacagactgcacatgagcaaagaaagaagaatgataaataatcttaatattctggacacgaaatgacagaggacagtaacgatggcaacgactgaaacacgctgggaggtaggtgatgggctcagcttttggcatgttaaatttcagataatgcacaaaaattcacgtggggttggtctggtacttaatggaagatgaagcacctctggtaatgctgatcaacatacattagtcccgaatctgacgtcagcactcctacctgggcaacaacattctgacacgtgtttccagccaacacaggagagccagcctgtgagacaggtgttacaggcacctggagctggaacgggaaagaggcagaagaaagcatttcctcttctagcttatatattatgctgaaatgagtatttttcctttctgacaatcaccttcctttctccttccactgccagtctaccacttcaggtcaaaagtcattgttattcaacacttcccaaatgtattttggggaacattacttgtattagatataaaacaaaggctcctcggtcaaataagttttagaaatactgtatctgacacatccctcttagagatgagaaggctttctaggtattaaaaactttaagaactccatc

SEQ ID NO: 60354 - DNA, 2537 bp, Bovine  19866881493494
  misc_feature (1)..(1): n is a, c, g, or t
nagagaagccgcagtggggcaggtgtacacctgtggtgctgggaactgtcccccagcttttcctgctgcctctgcgagacccactggtgtgccatcattcagaactgcttcatgttccccctggtctttgatccttctccagaaggcctgtttctcctttgcctggtgaacgcccgctcctttcagatgtcctcacatctcaaagaggtgctttcttcccgtgtttgcctatcagcagtagccggggccctgttttctctaccggattatgagctctgacaagagagaatttgtgtttcagctcttttaaaattaaaatttaatttgtatcaaagtcatatgtatgactttaaaagtcaaatgacactgcaaggctcaggaagaaggctgtgtcacccatcctgatgacccactccccagggctggtcatggaacacggttttctgttgctgcaggaacaaatgaccaccaacgtagtggctttaaagcaacacaaatttaaattacagctctctggcttagaaatccgaaaagggtctcactgggtgaaaggcaagatggtgccagggctgcattctcttccttgcatcttccactttctggaagccgcctgcattccttggctcatggccacctttcaacatcttcaaagccagcaatggccagttgagtacttccgtccatcactgaccttctaacatagtcacaccttcctgactgccttccccttcccttttccacttttgaggaccctgtggttactttgggctcacctggataatccaggataatctccctgtttgaagttcatttgattagcagcctttcttccacttgcaacgttaattcccttttgtcatgtaatgataccatgtttgtgggttgggggattaggatatgggcgtcttcatcttggaggggccgttactctgccttccgtagtcacttccaggccttttggctgtttatgctgatagtactgttgtcctgctgtggattagaggagccctcactcccctcttctctcttctccccacatgcttggtttccttcatgtcctcccagtgtggtctatcacagtttttgttacactgatagtcaatacttacattattttgactgtgtggatagagttcctggctgagccttacagttgtactgtaatgaaatttcttgtacatttttttgagttaataattgcttttttcctattgatttagtttcctttgtggttatcccagagtttctgagaggcttttgaaaacctctctgtcttatacacgtgttcctttttcttttactgcaattttttttcccttggaggtctcactcccagaggcctcagttcctcccctttattccgagctgactgacttctaggcctagggcatggctcgtcctggggattccctcactttactctggttggagcctctgttttctgttgatttattcctcaagagtttctgagagagggtctgtacaagtcagtcacctcatacttgcttgtctgaactgttcttactctgcattcacatttgattggtgttttgatttgtttagaattttaggttgaaagccattttcccttagaattttgaaggcatggctccactgtctcctaggttccaatattaatgtcaaaatttgaatgctattttgattcttgatcatttatggataacctttttttttgttgttgttgttgttgaaagttttaggatcctttccctttccctatatttggattgttcttgctttgaaaagtattatgctaggtccttgttgtgttcttttgatctgaagactcacactgttcattttggggacattttcttatatttttctctgttaatttccttttgtcctttttcgtgttttgtctttggaactcccattacttagatgttggacatcctgggtcaagtttgtaactttaaaatcttttattgttttccattttactttgaagattcatttttctttttttttttttctaaatagcatcttgttcttgcttcatgggtgcagtgaattcacttatatatgttgtattttgtttgtttttgctgtttttctgcttctcctgtgctgtctttgtttctgtgaagtccctttttccgcttcttttggttattatatttcccattggaaccatctttccatgcatgctgatcactgatggtttatattttaagagtggacaccaagatgctgattggggatctgtgggacaaggaagggggcttgtgaacctcattggagggtcattcagtagagagcctccccttttttcactggagacacctagatattggtgtctgtagatcttttctcggggaacgttgggtgttcctggagaggagtgtgcctggggggggtgtaacaggctgtgtgttgttccttccaggagccttgatggggaaggaggcagggtaccctggttggtatgcagacgttcactctgtctgtctgttttccgaaagttgctccgtgctttccctacctccctcagctgtatctctccctaagctgtg

SEQ ID NO: 60355 - DNA, 1092 bp, Bovine  19866881510244
  misc_feature (1)..(1): n is a, c, g, or t
nattgggtgtcctgtacgttttccttctccctggttggatgagcggagttgagttgaaaagacaggccacagcatgctttgtaaggaaacttggaattctctgccattagatatttatgaatgatttaactaaaaaatgacttcttgctcattgcatcttcctagtcattacttggcatgatccttccctgtttgctgactttcccaccagcctgtggccaggattctgccttgatcactggaaaatcctttctcttagcttgttggtgaaacagagtcagcacttagtatagacttgttgaatgaatgggtatgatcagaagtggcacaaacccgaaggcagggttatttaaggtagggcatgtctgcatttctggcagaggaggaagtagctacagctgtgtggcatgatcctcagggtgctcagtagctgcaatttcctggtcttccttggacacctggggctagaattttagaaaggagaagttctgtattcaatctactaatgcatgttttatccatttgactactgattgtaggctgaggataagcagttatggttttgttcgggtcattttgaagcataattatgaaacttcaaggctaaatggggctttagagatgatcaacctaattgtttattaagcagatgaggaaacaggctcagagagagaaaatgacttgcccaagatagttactaccaggctgaacccaggtctactgattctcaatcttatgtcttcccaacaaagctgtttatgcacaattgccatttctatgcaatttgctcttactatgtagtggactaattacagtatgtatttagttattcagaatatttgcctttgataagtgttgcatccattaataacaactcccaataaatcattaagttactttgtctaaagactatgctctaaatatattgtctatttccgtaatagaaggagacccattcttgacagaaagaggaaccagagatcatgttaggggagtgagtaagaatggggaaaaccttcctagattttcaagagagctcatagtttaatcggagatccacagaaagaagcagcaagccttacgtttgctata

SEQ ID NO: 60356 - DNA, 650 bp, Bovine  19866881596766
  misc_feature (1)..(1): n is a, c, g, or t
nctcttctctgaaactgattggcctcagcggtgtcaggtgttggtgggagcaacacaggcagatccccacggggagggacttagtctgaggaaaggagagatgaagccccaggaccctagggactgaaaacatggtgatggtctgaagttgagcgtgctgtcctcgtgctgggtccacacggccttagggtcgcctgctatgctgacagttctgatctctccctccttccatcctgttcttaacgcccttggtgcctgatagtctgcagttgaaagatttcttctctcatgggggcccttccaaagaaataagcattcacttacatgtttcttcttatcctctgaggatgttttatgagcacaagaattatggtgtcatggggagcatgttcccaggctggctccagatgctacctctcatccagacccttacatggtcggccacgttaccctgcctgccctgccccctgagtggggagttctggcatagcttgcctgaaaaggcaataaacatagctgcctgaaactgtatggcaagtaccacaatcagctcccaaccagacaacaaatgcccctggaatcaaaaatagaaagtgacccaagaaggccaagcccttggggaggactccactgaagaggcaggcctggaa

SEQ ID NO: 60357 - DNA, 814 bp, Bovine  19866881675689
  misc_feature (1)..(1): n is a, c, g, or t
naaataattctaggttcgactgaatgaagtctgtgaacgtatttgttaatttgcttttagatgcagtgtctacaacgttttctcaaaaggatatggagcaacatgaaataaaatcagacatgtgacaagtcagttcaaaaataacagagctcataaaccacacataggaagaggagggataaatataccaagaatttggggaaactaggtttctgcaattgaacattatatctacatgtgaacttcctggtagccaagctttaccatattttcaaggtttgctgcactaagcatatttgctatgatatatactatgatacatacttaatgtatatattatagtaaaagtatgtacattaagatgctttacattgtttactgagatgtaggtaaatctcaaaagcagtggctatgaactgaagagaggaatcaggtgtactggtagcttttttcaaacttcagtgcttccccagattcaagtaaacagcagcaacacactcagggcttagaaactgaataccatggcttcctagttggcatgtgatcactagaatctcaatattgtctattatgacccttacctccctggcatttgttcttcttagaagaaaagagagatcagattaaaatgggagccagcatatattgcattttcttttacaaggtttttacatttctaaactggactgtctgcaagaggaccattcaatgaattttcttagtcaagaaatggcccacgttaacctttgttgtggtggctgttcagtcaataagttgtgtccagctccccctcccccccaccaaatttagttta

SEQ ID NO: 60358 - DNA, 685 bp, Bovine  19866881720059
  misc_feature (1)..(1): n is a, c, g, or t
nattcatttttgtctctttgaaattaacactcctttgatagtatatctgaaaataattcagtggaaagcctaccttgtctagttctggactacagatggcatatgatatttgaggttcaatagtagcaaaaatatttaagaaggtactttcttttaaattctgtccattataatcttctttaggagacacataagtcttactccaagtatacccaagcaaaacaggtggaatatttacttgaaatgttccactaatctgaaagagtatatgaacagaatggattctgcatgataaaaataaacatcagtcaaagatagctcagttcagtctactctattgcaggaaataggcttgcatgggttcatgctgattcgactaatagggacttgcaaagaatgataaagttttccatgatgatctgctcacaagcaaccttgacaccctgggtccctctgtaatatgtagtatgtggaaaaggcagaagtaagaaagggatgaaatgaggaaggaagttaacataccagagtgatagaaactcttagagaataaaatttaagctcagagaaaaatgctaaaagaccatgttacattttgcactgggtctggaaagagaaaaaaaatggaacagaaggagagatgaccccaaagtccactggaggagggaccgtgtgtgtatgtgtgtgt

SEQ ID NO: 60359 - DNA, 688 bp, Bovine  19866881796061
  misc_feature (1)..(1): n is a, c, g, or t
ntgtgtgtatgcttgcgtatgcgcgcatgcacacctgtgaacatggagacctgactcctgcctgctgaaaggaggaggatgataaaccatgttagaagagtaatatctgaccttagttgagcaatatgtgcctttattttaaaatcttcgcatgaccccagggaagtagatgctcttactgtccctctttagaagatgtggtaaccgagactccaagcggttaagtaatttctccaaggtcacagttaataagtggatgagaccagtacagcttccaaggattgtctgatggaatgaataagtatgccaagttcttatttgaataaacaaacagcagatctgtctcatgagaaatatctttcgtaaatccagttcccctttcctgccctggtgaagtagtattaaagtcaaaggaaacgctgtgatctgtgttagctttgtgcccctattattgagtgtttctgccacatgagacaggtttaggttgcccgcccgcattatgatcagcactccaaggggtgactgatatcaagatggcctccctagaatcttttctcactttcaggtttctgtatttcagcctgaagaaataatttattctgatactaataagagcatggtagaagatctaaagaacaggtatgatctctatatgctagattatcagttttctccctaatctcccatt

SEQ ID NO: 60360 - DNA, 933 bp, Bovine  19866881882651
  misc_feature (1)..(1): n is a, c, g, or t
nttaaggattccagacctgagaagaaaagtcatgtcccaggatctgtcaaataggatctccaagtgagagccctcgttgtgagacccagacacccatgacagggctctgtcatgcttgacagtttattagccatttagatgaaggcagagaaagggtgtttgtcacgtctacagtccatgcaaagctaaatgccacagatgtcagaatcaacaggtaaaatagccaaaatagctaaaaagaagaactgaaactgacatgaaatttatcaaggattcacgtaaagtgctctttttctgttcagaaagtcaatcgcacacctatagaattaataagaataacaatagaggtactaaataaccatcatttttccattcaataggtattgtgtgccaggatctctctaatccttgctgcagccctttgagattggtgctattattatctctatctttttagctgaagaagctgggaccaggaagtttaagtacagtttcctaaagtcacacatatgttaatttgactgaaaaataccatattcttacaccaataagataaggactagggagacgtggcttatctgtgcctgtgtcaaagacttttcgcatttgtaaaaataagtgaatatatatttgtgggggctagaaaggaaaatgcacaagcacaggtggtgagccaaactcaatgttttgtgcagcctggatgggaggggagtttgggggagaatggatacatgtgtctgtatggctgagtccctttgctgtccacctgaaattatcacaacattgttaattggttatatcccaatagaaaataaaaagttaaaaaaagtatatgtaaaacataaaaattccttcacaaactagtttcactaacttgaaagaaatatagtcagtgtgattcaggcttgtaaatgtcaaaacgtttacccagaa

SEQ ID NO: 60361 - DNA, 1366 bp, Bovine  19866880223011
  misc_feature (1)..(1): n is a, c, g, or t
ntgaaggataattgctttacagaattttgctgttttctgtcaaacttcaaccatgaatcagccataggtatacatacatcccctctcttttgaaactctctctcatctccctccccattccacccctctaggttgatacagagctgaagtttgagtttcctgagccatacagcaaattcccgttagccatctatttaacatatggtaacgtaagtttccgtgttactctttccatacatctcaccctcttctcccctctccccacgtccatagagaacagacttatggtttatgctttcacacattggtaatttgggctgtgctcacctgggctgttccaatgatctgggccagacttggctactcttggctggagttcattccagttctgtgactggctgccaggtcagctgaggttgatggacttttggctggggtgctctagttttcctctacacagtattttattttccaggacttgttcatatgatgatggtggaaggggtcccaaaagagtgagtggaagtgtgcagagcttctcaatgcctatgcttgaaactgcagagttgtatctgtacccatcaaccaaagcaagtcacaggccagtctagatttaggagtaaaataataaattttatttcctgatggatttaaagaaattgtgggggaatttgtagctgttaatacaatctaccacacaaacacctaaagatctaatttaaaggagaaatgacaagcgaatacaggctctagcaggagcaagatatctgaacaacctctggaggaaatgcaacctgggagttaggagtgtggttgagaaattacatagaactgaattccagtcctgactgtgttgttcactggctggttcctcattaataacagctatctcatgggtttgtgaggattacatgtatgtaaaactcttagcatgatgcctggcatgtgctaaggaataataaatgggacctgaaatagttgttatcactataggatacttcagtgacataaggcctgggttggaaacaggactaaacagaactggagatggagagccaggcaaaagagagattggctcaggttggcagagagaaatgagaattattacagtattatgtagtagaatagggcaggacaaaatgcagagtcagacagactagggtctcatcagaggcttagacacacaggtcagcacaataccagctgatgcttacggagcacttacaatatgccgggcacaattctaagtgttttatagttatttacacatttaattttcaaaatacctctatcaagctgctttccccattttatctttggggaaattgaggcacaaagagatatttttagattttagccttgcata

SEQ ID NO: 60362 - DNA, 1281 bp, Bovine  19866880415728
  misc_feature (1)..(1): n is a, c, g, or t
ntgtggccataacctagagaaataaaaaacctgaagtatcaagggccctcttcagagtacatttccagtgtcactgtctaacagctgggctataagcagtcccatatcattcatgaggaaatgtcattgaaatgtgaataatttgaagctccattgaaatcccctatgtaatttcacatagatgagcggctttctagcttgatgtcacatggagttcttcagatggaggtgggtgttggaaaaacactcagaacagcatgctataaatagaagattgcctcacacattctaataacaataaccatccctgaactatttagccatcacctgctatatttcacactcctcatatttcccgactcatttgcaagagtcaaacctcagccgtgaatcactctgtgttgctagctcaatcctttcttccagaactaacctacatattcagcagaaaatctcaagtcccacagtaaatcattcctcacacaggtaaattggaccatctcccttttcaatcctctgtgggtcatgtatccctggggaagctgttcctcaacaagcacctctcaagctccgttcacagtctttctatggtgcattaatgttctctccaaccttggttgccaagacccagttttgtcactttctgtagctcatttcatagtaatttcatgagtatgagctcttgctatccatccagactgagattttcttaaggtcctgatcagatcttcccttttcctctctacccagagctctgaaagtggtatctgcttaaaagatttaaatgcatatttatttgtcattcattttcaatttgttgagaattccatttaaaattctacttttaaagcaattcaaacaaaaggaaaaacagtacaactcaaagaagatgcttactatacattagttgacatgtcgttgatgatctacaacttacatatcctaagtccatttatccacttgcagttgatcattctaacttttacagtgctggtgaaaaatacccaaatgagccctcttcgaatggctgtgtggaggatttttaagctttgctaaaatgaagattctgctagacaaaaatcctccttcactcagcatcggaagtcagtttttgtgaacctaattagatattgggatttacacaatgtaaatgtaaaaaatatgtatgggcttcccagctgactcagtggtaaagactgcttctgtcgggaagatctcctggtggaggaaacggcaacacactccagtattcttgcccggggaatcccatggatagaggag

SEQ ID NO: 60363 - DNA, 1384 bp, Bovine  19866880425992
  misc_feature (1)..(1): n is a, c, g, or t
nttgactcattggaaaagactctgatgctgggagggattgggggcaggaggagaaggggacgacagaggatgagatggttggatggcatcaccaactcgatggacaggagtttgaatgaactccgggagttggtgatggacagggaggcctggcatgctgcgattcatggggtcgcaaagagttgaacacaactgagcgactgaactgaaggagcatcatattctagaccaatataaaatacagtgccctgagaactgcaagcagtgctgcccctgagaactctttttaatttctgcttggttgatgatagagctttggttccatggagtttcaccaacaatggccactctgtttcaaatcatatcacagtttcctagtgaggggaaaaggatcagtttaaaatctacctataatctcacgctaggagcttctctattgctgtgaaataacatttaaacagaaggttaatgccttacactaaacctgtagtcctaatgtgcctccaaaaagcgttagttctaattactctttgtagaaaggctgactagaagtggccctatatattctaacattcaattaaagggctgttcttgagaagtagatttttttttttattgttgtgtagaatattgagagaattattagttgcttctgtagtccactctgcagtaatatgcaattattttgcctctcaaagagagagaatttttagtcagcgtgaactaattgtactatatacacaggtagtttttagcaatgtccagtgattcctcctcactgcttttctttgtcaagagtttaatcaacagaaggcccctggagggaggagaggggtatttagatttcctctaaaatctgtaaggtcctagagaaaggattatctcttcaaaccatgagcctctttcttcccccacacgcatactgccctgggattaggcctttctctgtttggaacgaggccttgagacataaggagttgatgaagttatctgaatcagaggttcagatagtttagatagtggggcagtttattcaagaatccattctccctcagttcttcctgtcacccctttattattcccagaacccttgtttctgggtttttaggaagagagaggatctcaaattacttttcagagaccactgctccagatggttcaagtatggataagaaggactcctgatgggaatctaagtccattgctcttgagacacacctcaaaacttggaggccagagtattaagagaagaagaaaaaaaaagttcaatctaagaagtcagtaaaggtatagacaccacatgcaaagaaaaaagaaatccaaaccaaaacacagtagtgttggataaactgaagacaacattgcttttttcgaaattttagaa

SEQ ID NO: 60364 - DNA, 1248 bp, Bovine  19866880516879
  misc_feature (1)..(1): n is a, c, g, or t
nactccagtgttcttgcctggagaatcccagggatgggggagcctggtgggctgccatctatggggtcacacagagtcggacacgactgaagcgacttagcagcagcagcagcagcaggtgtaaaggagggagaaaacctagtgtttaagacttaaggaaatcaaagcctgagaaggtaacaataatccatttgatttcttctattcctttcctttgttgctacccaatttaggccttgaatcactgaaacctcctcctgtcactggctcccatttccagtcatgtgttatttgtgtaacataacctccttccccaaatcatattgctgccaaatggatcttaataaaacaattataacactgctgctgctgctgctaagttgtgtcagtcgtgtccgactctgtgtgaccccatagacggcagcccaccaggctcctccatccctaggattctccaggcaaaaacactgcagtgggttgccattgccttctccagtgcatgaaagtgaaaattgaaagtgaagtcactcagtcctgtctgactccgtgcaaccccgtggactgtagcccaccaggctcctccatccatgggatttcccaggcaagagtactggagtggggtgccattgtaataaatatattacctaaatgctggataacagaaaaaaagtttgaagaaacaatatttccacaaaatattgtatagccaataaaaaagtgttccaaaggatttttaataatatgggacattattgctgttgtattaagtataaaaactaaaaataaattgtatatagtataatctcaaccacataagcacacacacaaagaaatagaactagatagaaacagcaaaaaataaaccacaattacaattattggtggctacagaaatttttgaaacatatttatttataaagaaaaattataatcaaaatgcataacttttatacatctttaagtccacttgtaccttttactaaccaaaaaataatcctaaaactacaaatccaattatttaattcatagtcccatcttattaccctttactgccttactgtgactagtgagcagcagaggccaatccttagactcgaccagcctttaaaggttagatctgatacagccttatcagtatctatatgctgatgccccttccttcgtcacagtttctcccacttctcttcccaagtgatagctcatttttccagtgtgttactcccaagctctccagcctctgtacctttg

SEQ ID NO: 60365 - DNA, 1305 bp, Bovine  19866880605089
  misc_feature (1)..(1): n is a, c, g, or t
nacccttataattattattctcaaatttaaagatgtacaaattgagggacaaagacaatcaataatctgcccaagttaacacagttggtgggggtggcacagttgtggtttgtcaatctgtcctaggaatttgtgttcttgaatagcaagcttgtaagtcatacccactatgttctgactgcctttctaactactaaatttttttataaaacataatttgcaaataaaccttaaaatatgtgaaatgagtcagccctttttgattagaattataaatatctgtggcttattaatgacacgggtcaaatatagaatgcaattcaaagagaaaaaagagctggtttttaatataatgtggaagaaagataaattacagctataaggcattgatatgatgctgtgattaaagaataactgaagaccaaaataagatatgacatgtgggtaagttaaaaaaggaaatatcagagaaagaaactcaacaacaggttgcttatatggaagcattgtttatgggaactattttcattaattgagcaatgggtcaatttgaaatattttcttaaataggtaaattatatctaccaaattaagagaagatttacatcatgattaaaatgtaattctgagaaaagaatttttagaaacagtcactgaataaaagggtaaagaaatatctccctaactcctgacagctgttatattatattggtttactgaaggaagcaatgaaatctatttctttgaagatccttaaaaagagaaggcatacattatcagcagttcagaaaggtttaggtgtctctctgccagaaggcaaccagcggagtaatcacttatggttctataaagcctagtgactgcataataatgctattcttataactatgaggaaagggcaacacagctgctttttcttttctttggtgatcaggatttgctattccaaaaagttgcagaataatttgaatgtaattagatgaaattttccccagcagaaaagcaaaaattaattttgactctagttactgaaagaaaactcagaagctccacactgggctttttaaacatttatggtctccttcacttagaaagcagtcctttatgttcaacttaaaaagcaaactcatttgctggatgaccttaagcctatgagttgaattaacggtaaattaaaaattctgaacatctctacagtttctttgtttggataaaatgcttggagaaattcaattttactgcattctactcaagtttttatgagtttacctttatttcatttcatattatttacataatccttta

SEQ ID NO: 60366 - DNA, 787 bp, Bovine  19866880677322
  misc_feature (1)..(1): n is a, c, g, or t
nattgctggaaaaggaaggtcagtaggataaaagtgaatcatggcacaaaagagaaaatctgtagcagctacctgagctagggtttatctttcagaagggtaattagataaatgcagagccaaaggaactagtatttaaaaatccattttagccatgtcgtcacaggaaaagactgtctagacagtatggtctattagtctggtcagaaaaagttggacttttcaatgtgatagaaaattttcccacataattatactataatatggagtctataaatatcaattctaacacatgaaatagttgagataatccctcaaactttcactggttaaatggtttcagttcaactctttgttagatggtccttgttggattcagttcagttcagtcgctcagtcatgtccaactctttgcaaccccatggaccgcagtactccaggcttccctgtccatcaccaactccaggagtccacccaaacccatgtccattgagtcggttatgccatccaacaatctcatcctctgtcatccccttctcctcctgccctcaatctttcccagcatcagggtcttttcaagtgtcggctctttgcatcaggtggcccgaagtattgggagtttcagcttcaacatcagtctttccaatgaacacccaggactgatctccttttaggggtggactgggttggatctcctcacagtccaagggactctcaagagtcttctccaacaccacagttcaaaagcatcaattcttcggtgctcagctttctttatagtccaact

SEQ ID NO: 60367 - DNA, 1165 bp, Bovine  19866880700838
  misc_feature (1)..(1): n is a, c, g, or t
ncaatgaatgagtctaaaaaaattccaggtcagctggaagacagacacattagctggcaattactaatacagaacatggtaagcagtaccatcgaggtaagaggtaaggctaaaaatattggtaaggctaaaaatattaagtccaaatcttcaggtattaccagttgaaactttttctatataaattagtactttccattgcaaaatcaagaatctcacctcagcctgagaacacaagtgtttgtcatccttccattcaattaaccaggtatttgtccgctatgattttgttacatttctaattaagaacaacagccttcctatcaaatctacctcttcccaggtttaggtatgtttagtcattaagtcgtgttgaactcttacgaccccatggactgtagcccaccagattcccctgtccatgggatttcccaggcaagaatactggagggggctgccacttccttctccaggggatcttcccaacccagggatcaaactggggtctcctgtattgcaggcagactctttatcaactgaaccaccagggaagccccaacctcttcccaagacaattccaaatcaagttagacatcagaatcagcataaatttgttgtccccatacttcctaactcaacacgtaagagaaagatatcttaaacacgccttttgaaatttaagtacttaaaatgggtaacaaagtctagttaaaaagtactgcttaagagaggttgtcctttaatgactaaaaaagaactattctcaactagcatatcaaagctacaagtcttcaaagtcaagatttctgctcgtaccacaagtaatagcaggtccttttctatctgtacccacttacacaccgccacttgggaacagccaattaacctggatgaccaaggtggcctagctacttgggtttccctcctcattctcctttcagctaaagacaagattacgttactcctccccactggaacccttgctgtttctagtatgagttaggagcccatattggtgctgagatatgaaggagcagggagaacaaagaagaagaaaaattaaaggtaaaatgacagaggccctctttcctaacacatcatgtcactcttcatatagttcctattttcttccagtggccctgtccttatatttaaatcaatatct

SEQ ID NO: 60368 - DNA, 2137 bp, Bovine  19866880702148
  misc_feature (1)..(1): n is a, c, g, or t
nttttatacccttaaggttggctttataaaatctcagcagtaaaaggagatagaatgagtcattaagaaaataaaaaacaatctcattggttagtgagggtatatagagacaattttgttagagcttgggtaaggcatgagtttcaaaacttgaggaaatttattctagcataccattgtccaccagaaacatgagctacataatgtaattttagatattctagtagcaacaacggacaacaaaaagaaggtgaaaggtgagattaacttagacagtaagctttatttaatgtaccaaaatatttagatctgtagtcaatatagaaaggtattaatgaagttttttattttcttttgtgttaagtctttgaaattctgtgtgtttacacttaaagcacattttgattcactgattagtcattggaaataattgctctttagattctttaaattatttgtttagacccttatttagctgaagaagtaaatttacattctgaaattgtttcaaacatacttaaaatgttctgttagtttttaaactttataaaaatagagttccacatttcagatcctcaagagcccattgaggttacatattgaatagcacagctctcgaggactttatgggaagaaacaccttttatgaattttttaagcagtgcacccataagttttttagtatcctttataaggatattaaaggatattagaagtcagaagcttattttttagggcaaccaaaaaaacatgagatcagggcattgccattttcttcaaaacaataggaaaaatacttaacgtactggaggttggttttttcctcccttcctaatgatagtcatggtttatgggaatgtattagtggaaagggttagctgagcacttaaatttttactagtagcttgagactggtcatttctacattttgattaagaaagtattttgctacctagaaatatttgaagtctcaattttattcagccaatagccagatcctctagtattttctcattttcagaaattgcctgaacaatttttcttttcataagaatttttctagtttataaagaatgtatcccagtagtatttttcacagtgaggcttaagaatagaaaggtcagtgtatcagtatttaatagttgattggtcctaatttaatgttttctttttttcttcatatcctaataaagtaactaaaacaacaatcatggttagaaaagacatggtacatgaagggctaagaggaagtggacagtaaggagccctattaatgtggggaagatggaagaaagggactttctgacaggtggtagtggtctctgtcagacttcttcaggaaggaggggcctgtcctctcctccatacctccaccactctgctgagtcatttacatacaggatcagctaaacaggtgtgctgctagaggtcttccctgctgccctctgtttttacagctatattaaacttttatacagcaaagtctaacaaaacaaaacataaaggcaaatttgagtaacctgggccattagttaaaatgtactggtcttatcagactttgggttttcatagagaaccagaaactctgttaacttaagtactaggaaaagatatgacagaatgaggtgaggaacaaaatcagattgtgcagttgagttgtttgttccgtttacattcagtgatgtagggacaggcagctctatactgacactgcctcatgtgatgtgtgaagtttttatgaggttgatgagaattgtttttgaactttactgacatctattattacattttgtttcctagtactctgttctaaaactgactaaaatcctaactgttctctggcttaatgttgtttacttcccttattcaacctaaactatttgtttcatctttcaggcgtttgaacacttacaacaattagaattaataaggcccatggaaagaacatcagtaaatgcacagagggagtatcagctgatgaaactacttttggataatacacaaattatgaatgctttgcagaaataccccaactgtcctacagatgttaggcagtgggcgacatcctccctaagctggttatgagtataaccatgggtttcagttatgggagtttcaggcagacttctctaaagaa

SEQ ID NO: 60369 - DNA, 1896 bp, Bovine  19866880709113
  misc_feature (1)..(1): n is a, c, g, or t
natgtactctgcatataagttaaataagcagggtgacaatatgcagccttgagttactccttttcctatttgaaaccagtctgtttgttccatgtccagttctgttgcttcctgacctgcatataggtttctcaagaggcaggtcaggtggtctggtattcccctctttcagaattttccagtttattgtgatccacacagtcaaaggctttggcatagtcagtaaagcagaaatagatgtttttctggaactctcttgcttttttgatgatccagcggatgttggcaatttgatctctggttcttctaccttttctaaaaccagcttgaacatctggaagttcacggttcacatactgctgaagcctggcttagagaattttgagcattactttactagcatgtgagatgagtgcaattgtgcagtacattctttggcattgcctttctttgggattggaatgaaaactgaccttttccagtcctgtcattatagcatatgacagttaggaaaaggtggtgaaagtatgctttagaaaacttgttccagttaggaaagcaagatgatttgaattaaaatgacttttcccccttttttacatttcaggacctgtagatgaatacatgctgccatttgaggaagaaattggccagcatccctctcttgaagacatgcaggaagttgttgtgcataaaaaaaagaggcctgttttaagagattattggcagaaacatgctgtaagttatagttagcttttcactttaatttccaattaaaaaaaatgctcatcagaggaatgatttatatttttgcaccttttctttctggatttcctgaggcagagatcttggtacaaggtattctattctagagtcctagaaacagtgcagttaaggccacatctgtacactcgtgagggagacggtaaagtcagagctgtgggggacacttggctttgtgctcctgtgtcacagtgtctcctatctggaaggtttccaagggaaacaagtggctgactgtgagcctgtggagagttgtataaccttgctgaccaccaccgtcgcatatgatgtcgttttaaaaagtgaagtacctagtattattctatgacagttactgcattttgattggatgattttcaagttcataagagactaggaatgtgaaggctggaacaatattgccctggttattttgttctagatataactagaaacatggataagccaagtagagaatccttaagtgtggcttcctaacccttttcctacttatctgcaaggtagaaatgctgagaaactaagaaaagaataaaaattggtaaacttctcaaagccttagttttgaattcagttcaaaggttagcttaaattacctgctttgtgaataatgatcagagatatttggaattaaacaaatcacctgctgtgatcatctccagtgcttaaaaaaaaaaaatactgttttctctcagtgcttctctccatgtgagatattcgaaagtgaatgttgacaaatatcaaacttggctaattttgagactttctttaacccacaagaatagcaatttctttatgagagttttactctagttcccaatagaaaacaaaaattgctatgatatttaaatgtgtttttcctttttagggaatggcaatgctctgtgaaacgatagaagaatgttgggatcacgatgcagaagccaggttatcagctggatgtgtaggtgaaagaattactcagatgcaaagactaacaaatatcattaccacagaggacattgtaacagtggtcacgatggtgacaaatgttgactttcctcccaaagaatctagtctatgatggttgcaccatgtgtacacactgagaaacaggactctcaactggagctgcta

SEQ ID NO: 60370 - DNA, 2131 bp, Bovine  19866880730921
  misc_feature (1)..(1): n is a, c, g, or t
naaaaaaagtatacagaagaaattatgaaaagcataatttatgttgtaaaagactagaacattcttagtcaccaggggaaaaatttattcggaatataagttcctataagaaaatataacattctgtgagaaatcagactgttgccttagagtaaatttgtcatatatccatataagcagcataagaaaataaaattacgttattcacttgtattatttttttctttattaaaccaaagctgaacacggtcccagctatgttgcttgatctttctattattttgctttccatctgtgacttttttcctcttcagtgtaatagataaccctaattgtggggtcgcatttcttacagaggtcaaaattaatataattgaaaacataacagccttgaaacaattataatatttaacttagtggttcaagagtaactactattggagtcatggaaaagatagaagtggtggtataagaaacaattagcacaggaagaagagccaatagtggcccttgttaagggaaccttttcagaaaaacacaacctgttggtgttctgatacatgctacatgctaaggtggcaaattagtccatggaatattttggaatggtattcagtgaagtgccctttctttgttctagataagggataggcccaacttttccatcccatcatagatcgcttggcttcttagaatttctaactgtacatgaaacaatgaaacaagatgggaatgattttttaaaaaattcattgtatactaatcaaaaatgaatccctaaagtttgattggaaaatgaatttaagatgtttgtcagaagaataattcaaatacattatgtaattcatattattagagttcatttttagcatcatcattgctgtttctcagttgctcagtcctgtctaactctttgcaaggactgtaccatgccaggcttccctgtccttcaccatctcctggagtttgctcaaactcatgtccattgagccagtagtgcattcaaccatctccttttgtcatccccatctcctcctgcactcaagctttatcagcatcagggtcttttccagtgggtctgctctttgcctggggggccatagtgttgaagcttgagcttcagcatcagtccttccagtgatattcaaggttgatttccttttggattgactggtttgatctccttgctgtccactgtctaagggactcaagagtcttctccagcaccacagttctgaaacattgattcttcggcactcggccttctttatggtccaactctcacatctgtacatgactactggaaaagccatagctttgtctacacaaactgttgtcaacaaaataatgtctctgctttttaatactctgtctagttttattatagcttttcttccagggagcaagcatcttttaatttcatggctgtagtcactgtccacagtgattttggagcctaagaaaataaaatctgtcactgttttccacattttttccatcaatctaccatgaagtgatgggaccagatgtcataaccttagtttttttgaatgttgagttttaagccagctttttcactctcctctttcacgtttatcaagaggctcttcagtttctctttgctttctgccataaaagtggtgtcatctgcatgtctgaggttattgatgtttctcctggaaatcttgattacagcttgagcttcccccagtctgacattttgcatgatgtactctgcatacagccttgacatattcctttcccagttttgaaccagtccattttttcatgtccagctctaactgtggcttcttgacctgcatacaggtttctcaggaggctggtcaggtggtctagtattcccatctctttaagcattttccatagtttgttgtgatccacatagtcaaagcctttatcatggtcagtgaagcagaagtagatatttttctggaattcccttgctttttgtatgagccagtggatgttggcaatttgatctttttcagttcagttcagatcagtcgctcagtcgtgtccaactttttgcgaccccatgaatcgcagcacgccaggcctccctgtgcatcaccaactccccggagttcactcaaactcacatccatccagc

SEQ ID NO: 60371 - DNA, 800 bp, Bovine  19866880741230
  misc_feature (1)..(1): n is a, c, g, or t
ntacttgatgcttggagaacatgcaccttttttttgtagcaggggttaaaggaccttaatcagtgaaggcaggttacaagtttaatggatctgatgattacccttagtgtcacaagtctttcagcaccatttttccaatgacatttgctcacttgctcactttgtgtcacattttagcagttctcccagtatttcaaacttcgcgttttattgtatttgttatggtgacccatgatcagtgatctctgatgttactattgccaaaagatatgactccttgaagatgattagtacttttttgcaataaaatacttgtcatatcatagatgatatgacatgatgattagcgctttttagtaatattttgtaattaaagtatgtacattaattttttaagacaatgcacacaagagactgcagtataatgtaaacaactttcgtaagcactgggaaacaaaaaaaattgtgtacctcactttttgtaggctggaactgaacctgcaatatatctgaggtctgcctgtaaagggaaagtgacttctttaaagtaggtaaattactaaaatatgtactaaactgtactatggtgaatgtcatatcttgcaacaaagagagcatatgtgctctggaatccaaccctctcagaagacgagacaaaagcacactgacaagtgattaaggcaggaaggcatgaggaggcgagatgacaaaggcatttgtgtccagctggctacgtaagccaactaactggcctgtcaagtggggaaatgagagaaaagagccattaaggactccattct

SEQ ID NO: 60372 - DNA, 1812 bp, Bovine  19866880784483
  misc_feature (1)..(1): n is a, c, g, or t
ntaaattacacatttttattattcttgtttttacgtctagtgtgtatatatgtgacataaattgatgtttgttctcccagaaaagaccctctaaatattctctcaagttctgattctcagtgaccaagaagaatattacataaaagccagtcatgggagcagggggttaggcatccaaggagtgaagctggaaagtgcaaagatctagggaggaagagatcaacagacaccatggttgccaggaatcagtctcaggaatactgggctatggtgctgaagttaacttgtcctaactaaacactctaaactgaacaagtaattttttgatctgttcctgactatgctacaacttgggtcccccaggaaaatgtcacaagtccaaataagaccaatgagctcaattctggtatagacccattactttcgttctgtttcacagccaaagatatcttccctctctgccgtacctcactgtcacccatgtacacattttatcagtctttatcacctcccaggttagctatatgacacagcggtcaaaatatgagttctggaatcagacgtcctgaatttaggtcctgcctccactactttacaccactgtggccttggacaagttacttttctcatctataaaaggtaactagtgaacatttgtccttatttattcttttttagggagatttctctggtggtcccacatatttttagttttttgatcattatttgtagccctacttatatttggagagtctcttcctttatgaatcttggtgcaaggcagagtctagcctcccaatatggaaagtagaaacgtgggacattcatcatcccctggggtgtagccacatactcaaatctagacagattcaaccactttgagtcacctattttcactcaaagaagcaggaatggtgggaaattattctggggctaggtagtacttctctgataagaaggcccactttctctagcaccagagatgaagggacaatggggacatcagacttggcagcatcagcagtaaattgaggcatctagagcttagtggttgtcagttctgagggacagtttatactaaggtgaaaagtagctgcttaactgaaatatactgactagaaggaaaacaagaaccagagaaagaaaagcaactgatcaaatcagtcctctatctaaaaacctctaatagctttctatccaatagaataacatgcaaatattactttgacctataaatctcttcggaatttgctcaagccaaactttcctaattcaatccatacaacttagtgtcaaaccacaacagattcctctctaggttgcaacattatcatttatattcatgtctttaccatttaaggcttctcaggtgacactagaggtaaaaaacccgactgccaacacaggagacataagagacgtgggtttgatccctgagtcaggaagatcccctggaggagagcatggcaatccactccagtattcttgcctggagaatacccatggacagaacagcctgtggagtgaggtgtggggctacagtccatagggtcacacagagtcggacacaactgaccctccaggggatcttcccaacacaggaatccaacccaagtctcttaagactcctgcattggcagtcaggttctttaccaatagcaccagctgggaagcccttaggacccttcttaaaaatcccttccttggtcagccttttctaactgctctgccaagggagaaccaattgctcccttcctgggtgttcccctagtctttgataagcacctcagttcagttcagttcagtcgctca

SEQ ID NO: 60373 - DNA, 1165 bp, Bovine  19866880793730
  misc_feature (1)..(1): n is a, c, g, or t
nacatgaatttggggtgaaataccaagtcagcttaagacttcactgggtagtctatttcccctacctacttctcctacccctcaaacaagggcactgaataactagggcatgggcaccatcaactcagaacacaagaatctttacctaagatccaatccatcttcataaaccctattctaaaatgtgtgctaaaaaattttaacggaaaacacatgaatatgcctttctatttatctattacttgtttacttccgcttctgtcctctgtaaaacaacgtgatcatgttattgttccttttagtagtcagactactcaatgtcccaaagtaggaaaatagcttagagaatgatttggagatggcagggatgtttactgaattatctgaggtagctaaagcatctgctttctgaagaaagagaagcagaacaggataagcagtaagaacaaagatttagtgtcagagagtccttggttcatattccagctctgatacttgtgggcttcgctgtgtctcaatttctttatctatacaatgggcattatagcactacataaaaaaccctgtgaggtaaaatcagatcagtgctttccatacctggctggtcaccagaagtgcctggggaacttttattagaatcataatatcccaggccccattccatactttcatgggtatggtccaggggtattgttttgtttttctgaaccaattccaaagatgatccttacatactggttacaactggaaatcaggggaagttttacgtattttttaatatttttacataatgtatacattaatacacatctatgtaacttaccagtaatctagtacactataaatgtacaattaatgcttgatacaactatcaatcattttttgaaggagaaataaaactgagcattttgtgacaagagggccactaagtgtcttgcagaagtagtctgcataaacctcaccaaaaatgagatagcatgacactatattgagacagtgaaagaagacgtaaacgaagttccacattgatgacaatgctccttttccacaacgcagttcatgacagaaggaatgcatagtcaggcatgtcttgtattttccacaataaagtctgaccatcccagtcattccatctcaaaacatttttaagtttattcctattttt

SEQ ID NO: 60374 - DNA, 2179 bp, Bovine  19866880798260
  misc_feature (1)..(1): n is a, c, g, or t
nttaagttgtgaaatgagaatgtagtctaaggatcagagacattcttagactactcagaatgtagtctagagtttgataccctagactctagagcctatacccttactctctctgtgcttagtcactcagtcatgtctgactctttgtgacccttcagattgtagctggtcaggctcctctatccatgggatttcccaggcaagaatactggagcaggttgccatttccttctacaggggatcttcccaacccagggattgaactagtgtctctagtgtctcctgcactgcagggagattctttacctgcttttagagaaaagaggcaggatttaaatgataaaggactttgtacgccagtctaaagactttagattttatgctaaaggtgacaagtgaaaggttttaagcaggagtgacatattcagacatttttaaatgaggctaatctggcagctatgtggttggactgggagaggaattagtggcagggaaattagttacagtcagaaaggtactataataaattcaggtaaaagaaatggcagtggcagtgctggcacgagaactcaagtctactgaccaccacaaccactttcttgtccagtatccagaagaacctcccatttttcccccttaagtcaccatgctaatagtttaagaaatccaacctcagaaacaacaacacattcctttcaggtccctttattaaacaaaccatggacactagaagtgttgcatttgtgaaagtgactaacacaatccaattggagagcgacagaaagtctattgctatctgcagtttccttaccttcttgactttttctccttcctctatacattattcctggaactttcatgttcaatagtcgatttgaaatcaatgttttgtctagacatgactattataacctaacagaattaaatctaccacagaggaagtgtaatgtggtcccagctatggcaaaaaatatactctctggtccggtcaaattttggtttaaacaaagatgatgaatgaacagtaataagacagactttttgaaaacagcaagaaaaacagaatattaaaaaggtatgtgagtaagagcaacgtaaagttcaagccatttgatttcaagagagtaacaccagctcaagtgtgtgcggtattccagaaaccaacaaatgaaaagaacagtagaaaagactatctggtcaattctcgagcattctaaatctgatctgttttcatttaaaccaagcagagccctcttgagccacccttgatactaagtaactgagtaggttccacaagtaagcagcctacagtagaggagcaacagagaagataagcaagagtggaaaggagaaagggactcacatgaaagggaaggaagaaatgataagttacaaaatatggaataaaactgaggaacactagtaacctcaatatcaaacgctgccaaccttacctgactgagtggcaccatgacaatggcaacattagggagcatgaaaaaacaaatttgagtcacaggtttacaacatgccaaagatgagaaatgagagtaatgacaaaagtaaaaaagcgatgaaagaattttagcatctaaagagacaatttaaagattactaaaatctcatttggtttagttatgctttacttctcatgaaacaatgagtccaatggacacaaaagatgaaaatgtcagctagtaccagagatatgtctagggaggtgtgttacaaagaaaagtatgagatttatttgcatgttttgtgagagcaacttcagaatttttcctctctatggtgtatagcgctatttaccttaagtacttcactgtaattcttatcctggctggctaacttccttaaaaccagagttcaaaacaaaataagcacttattaattatggtcaaatgttaacctcaaaaaggacaagggtctgcaatagatcatagaatattacttagtagtatagcctaaacgagtctaatggtaaccaaaatccagataacagattcttaagaaaattatgtaattaagaaatcactttaaaagttttttaaaattaaaaatttgctagataaaggaaatattctttcaaaaaaaaaaaaaaaaaaactcaaggtgtaaattcagtttttccattcaggggaagatgtaatagtgaaaatatttcttccatatgaca

SEQ ID NO: 60375 - DNA, 919 bp, Bovine  19866880807640
  misc_feature (1)..(1): n is a, c, g, or t
ncacactgtgttctaattccaaaagattttaatctcctcaggagcaaaaactctggcaggacacccccaatataagcctcatgctcaccacataatagctacctaataattacttcttgaatgaaacagtctctgcctccaccaaaactttcaatgttaacaagctgttatttgccaagtgcacaccaaagaaaaggtaggaaaagtaaattttttgtaacctgtgacactaaatttttactttcatgtaatttgaatttaacaaaatcatctaaataacccatctggttgattaaaatgtaatttttacctgaaaatacgaataggagtttagggtttaaaataactctgtatactatttgaattgttctctctgatggaattctatctacagtttaatcacagtgtttattgatgtttccataaatgtatctgcactgaagcacagtttattttccagaccgcagagctctaatttcagctaccccagagaatacccatcattttcatccaattccttgacttcataggaggtcttcctttcttctcaatgggacaaatgaaccatttcccatcatttaagctcacagaggctgctgtagtggaagccctctgcaccggagagaacaattcattaagcactcaacaatactacactaagtgccaggaggagaaattaaggacctagataaagaccctgttgttgaggaacctccatttttgggtgtaagcagacagcaacttgggagaaactgctgtcagcaaccctgcattctgctccatctctccacctcttgctggcttgctttttctttcccttttctgctttcctaaactttttgtcccctctctctttttcctttctgagaattccttcacgcttgcccttggatttaggcctgatatcgacaatcccaat

SEQ ID NO: 60376 - DNA, 903 bp, Bovine  19866880851108
  misc_feature (1)..(1): n is a, c, g, or t
ntttttaatctttataagtgacatcgtttctagtaccttagtaaaatgagttcttagtcgaatgatttcttagaaacaaaaagtactatcttagttctgtcacagtttttaatatataaatttaaaagcatgttagagatttcctgaatttcctttgctcttatataccttttagaataatactttttcaccggttaaaaaaaggaggggatcccctgctgggtacagtattttgtgaaggtaaatagatttctgatggtcagtcaattctgatctctttcacattcattcttaattttctgttttagtaataattatattaccattcattttaactgactagctctgtgataaatattatcaatctcagtcagtccttaaagtggtcctataaacattgtaacagtgtctccatgttataaatgaggaaacctattagaataaaacaaacaaaaaacctattggcagcaaaatattccatcatggtaaattcatgacactttataattaaagacagtaaagaatttttatcagtcagtaagtactctgataaacagtaaaattgtggctccagtagcttgttgatagggtaatggaaattttctcaaaatttataaggacagaaaaataagctaaaaaaatctagttctttataaggaacgtagatgcagaccagtgtacaacttggaaataaaatatacataaagtcagtcttatcatcatacagcaaaaataacacttagaccttctagatattgaacttcctttgtcttgcatagaattaaatttagcattttgtctcatgaagtttggaggtttcaacaatttgtgatccagtgaatatttactataaaaatttttgtataactgttgataaggaaaacctataaacaaaacagttta

SEQ ID NO: 60377 - DNA, 702 bp, Bovine  19866880864637
  misc_feature (1)..(1): n is a, c, g, or t
nagaaagggagaaaagaggagccggtgagggagtagaagtgcttttttatagagagattagggaaggaccctctgagatggtattatctgaatcaaggatggatttgtacaaaactcaatggagtaaaaagtaaaaagtgtttgtgaactcaggtcacaggacacctaagagagacagttcatcagaattccacatgaactccagcagtgcccttggccgtactatttttttttttaatttaaaaaaaccacattggcctttattcagtgattcatgcatcaggcagcatccagtctagcagacagaagttccaaggagctgcattaaatgtatatttagaaaagacctttgagcgctcatagggtctcattaacagaaagctacactaccctggtgaaactctgctgcagagttctataggcttgctaacaacacgaacgtgtgataatagggaccgctgaacaatcccagtttggatgctgattttgtttatcattgtacctagtcccagtgacgacaggaacaaacaaggcaattatccaactctagggaaaaacaagtcatgaagctcagtccacacagtgcactatagtcattctttttgacaggctgtcacagtatgttaaataaaacctctcatctacacatctgaggatgagaagtagtaacatggcattagaagtttcagcaagaatagaatt

SEQ ID NO: 60378 - DNA, 1833 bp, Bovine  19866881111755
  misc_feature (1)..(1): n is a, c, g, or t
ngattttccggcaagagtactggagtgggttgtcataagccctacctgttttcaaccagctaaggggcccatcttcccagagttgctccccagggaagatctccaagcctgcgatcctgcctttctcttctgtgtgtggttcccaatagcttttcctccattcctaccagattctatgtggacagttttagttgtagaaaagtcgttatgccagtctccacgtcattttcagtgagagctattcaacatgcagttgtcagtgtcctcgtatactaccatcttgatctctcatgtgttaaattttttttaatctgcgtactttccctacagattaggttttagaatccaagattcttgacatttaggtctgatccaagtttgttctggtctacatgaagtgagtttcttaaattctgaactgatagtccagagcaatgtgcaattctcacttccctcttatttctcgtactattcacagatgtgtacctggcttctttttttaattaataaagataaggataatgtgtgacaatataggcaatgaacatgagaagtggcaattatctccattaataactagaaatgtgattatatgaacatctattgcttaatcaagtagcttttagagtgtccattagtaaaaatgtttattattaaatgtcagtggggaagagaaaatagtagaagagactcgacaaggagggcctctggactagaagattgaattttgactaattattcatttcatggactcatggagctttttcttcctcttttaagctcatttttcctgacttgaccagctagtatgaatatggtatgcagatttgacatccagaaagtctctctgtacctcttgatttccatgatatattcatgtaatttcatgccccatatctccatatttattctctcttccaaaagtagtcatttcaccctctaataactgcttaagtttgtcaaaggaaaaacattgtactaattaccttaaactaatacaaggagtttataaatattttaaatatcttgttgaagaatgaactcacaaactcctaaaattttggtctgttcattcaacaaataatgttgaattatttttatactttaatgtagatgctgttgaaatttttcgtattaaagaacaaaacttttatgcctctattactttggaagattattcacagttaaatatcatcttctttgtcataaaattataattggtttcaccagttttccctaaaaaatcaagtgtgacatacaaacagctgttgtaacagctacttcattgagttgttataaggattaaatgaagtaatatatataaagatttaattcaattcttggcatatataaaaaagtgaaagtgttagtcgcttagtcgtgtgcaactctttataatcccgtggactgtagcctctgtccatggatttcccagggaagaacactggagtgggttcccattcccttctccaggggatcttcctacccagggaccgaacccaggtcttccacattgcaggcagattctttaccatccaagccattagggaagccttaaaatattcaataaatactagctatttttgttattaaagataatagaacccagattctctgaaggtttttcactgaaatattttccttttttttttagacatttagacttttatgtagtcaattttaaacccataagataataaaaatgcataacaaatatctttttaaaacttatcttcatacttttatacaaatacaaaagaaatagtaaagataaagctatttaacacattgcacaaagcgtaatattgtcagatagctgggcagtatgtgata

SEQ ID NO: 60379 - DNA, 1340 bp, Bovine  19866881120360
  misc_feature (1)..(1): n is a, c, g, or t
nttcccagtgcaggagcatgaattgatgaatgaattcagacccattccaaaacttgggagtgaaagagtcatttgtatattttagacaagccatgctggctgcaacatggagaatgtagataagtgggtatattcagggtgggggaagtgggtagacaggagttagagagaccagtctggaagttcctgtgttagtccaggtgaacagtatgaaggactgaagtaaggcagtggtatttgtcatgaagaaagaggagatagatttgagaagtgttttggagatgaaaaatggccaaacatgatcaaattacatctgtgtctctcttcagattcttggctataaaggggatgctaaaggatgctggaactggaagtggtccagaatgagagggagcaggatgatgttgcctgagtgccttctgagaccagtgcttttccatttcagcatttccctggattaaaactgctaaagcattcatgtgccccttgtgtagcgcaaaagcattgtcttgctgtagatcccccatgactacaatgagttggatgtatttttggcaccagctagatgttcaataatagttttaatgatagtttctacagcaattgggtttaccctggaggctgcccatctctctaatgactagggccaagccaacttattttataagatctggcaaaattacagtgtgaactggtaatgccgtgggctgttatacaaattataccagctctgtctctgaggaacttatccaagcctctggagacttcaagaatactaacttcaaaggaagtacgtgctattacaaatactacaaaccaggtatctagcaaaatgagaagcagacccacagtgcctaacttgtagaagtgtttgatctacttgaaatttctgaaaataaatttgggctgttgaaattgacattttgtagagtgtcacaaattttttttttttcaacatggtttgggaaagttctttttagcttgggaaaatttattattttagccaaggaaagaattgtgtggcctcaaatctataaactttctatccaagagagattatgaaattattttggatgattgagacagaggtcgttccaaagaaaaggtttatcacatgggtgatttaaaacactactaaaattgcctttctaagcaatgacctagaaatctgacaatgtgataatgaattctcaaacaaataaaacaaacaaacacaaaaatcacactggaacatttcacaattggcaggacaaaactggcaacagctgacttctggaaaagtgaattggatcttatagcattaaaatgagtttgcagactataacatgaagtcaacactt

SEQ ID NO: 60380 - DNA, 1381 bp, Bovine  19866881213315
  misc_feature (1)..(1): n is a, c, g, or t
ncaaaataatatcatggctatgcattgtacttttttttctttactatttcatttatcaaaatatactgattgagggtatatgaaattgattttacagcctttaaatagctctaaacattgtcttaaaatattcatgaggtagttaagtccgtatcgagcatctagtatgtgctcagcactgtttagcactgaagataaaatagtatacagtggaaggacacaaagttaactgttaataacctagaaactacttgctctgctcattaaacaaaatggggcgaactcccagttcgaatattgacagttggagcatattaactgttattctagcatacagagggaacagaaatcctaccaaccaagagaattaacctcttctctcagcatttgtttccttacaataactattaagaaaaatgtgataaaaagcatttgtaaaacaaaaaccattgttacttgagaaactgaaaaatctcaagctttttttttttcatttcaacagcttttagagtaatcctatgtgttaatagaggaaccagaaatgatcagtaataaaacacacaattttgtctgaccccataagaatggcctccttgatccagtcatcatcactctgacctcatactccaaggtacaggctacattccttccttccactggtcttgcctcttccctaagaggttggccctattgactgcagagagtattttctcagatactgccaccagttcctccccactcttactcctaagttgttttggttttcggtgaagaacaaatagacactagttcctagggcttcctgtctacttctggtaaaggaatgctgagtgtttatatcaacatccaaggtacaagacagagactggtatatctttgtaaatacatgttaccatgtcattactaaggcttgggaaactaatgttggaagatctagactgctcataaaagttatctttcaattttttaaatcaatcctttaaataggagaatttttttctcttttcatgggattgaaaagtatatttactagactcaccagggcatgatattttcttctgtctctagaagcattcatttttaaggattatcattgatcctgtttgcaattgaaatacacttgccaaagcaaatgataaaggtcagatagtgaaggagtaccttctatatgatttatttcttaggttcttgaattttgtggctaaaaaatcagtatttgggcttatcaatttagaaaaagttttatagcatgaagttatatgtaccaaaattgggactgtaggccgaactggtgttatggcatttttaaattatttttaattgaaagataattgctttacgatattgggggtgggtttctgccatacatcaacatgagtca

SEQ ID NO: 60381 - DNA, 1437 bp, Bovine  19866881359865
  misc_feature (1)..(1): n is a, c, g, or t
nctacctgatattaataacctgtaagaattaatggagacatccagatattcttacaatagacatatttcttcagttagtctatatcttatcaaagcttaatagcctgaaacctaatagatatattggtaaattgtcagataaaagcaaatatttacaaatcattattctgaaaacagataagttaatattcatttgtcttaggttttacatgtgttcaaaggatatagataacagtatgtattctctaaaagattatttctgttgaccttttatgtatctaatttttttcagttctctgatgtattgaactattgaaaaacaaatagaacatttaacagttttttactataagcctcccttagtctgatatatatgttatataaatttctgtttagtttttgctcacaaagtagaaatttcttcgttggttttcttctgaatataaaaaaatattgcaaatatctattctagtaatatggacaaaattttatattacaatggttttctggttttctgaaaaacatgatgtataacattttattattaccatagctatttctgtaataagagcaatgtaggcagtacatagtaacatagcataattccaaactccaaatctctgttatgggatttgattagtttttattaagaaaatcaactggggaactgccaaataggattatttccctttttttatattttagaccagtgattttcagtatgttgcatttagacttccacttggaagtggaaatccttgttaaaaaatgcagatgcctaaatgctaccctaatagtttctcagtcagagtactgtcgaatctggcctgcacatctgcattttaacaagtatcactgatgattcttaagcactctatagttctggaaccactaatgtacaccatagcctgagaactgaaaaaacttttgttctctgctttttttgatatgtttcatcttccaaattactactttgttactgacgtataattaatatataatactatattaatttcgggtatacagcattactcagtatttgtttatattgcaaaattgtcattttgataatagccattctgacaggtatgaggtgatttctcattgtgcttttgatttgcatttctttgatgacagagatgttgaacatcttttcaagttactgcttaatggtgtcatattatatttgcattacagcacttttataccttggtttaaatcagacagcatcttaaaccaagggaaagtagcctcagctctggctctgagctaaatggtcttcgctatactagtttacccgaggaatttctcttcatcctttacagccaatggctgcccgtttgtcaggtctagagtataggtagcattcgtaaaaatctgtccctttctttctcattacaatgagtgtaggaagtactatctattgatttatttaaa

SEQ ID NO: 60382 - DNA, 1114 bp, Bovine  19866881394808
  misc_feature (1)..(1): n is a, c, g, or t
ntactgttacgacatcatcacaactaactttagctactaatgtcaataatgatgacaatgatagctccttttatttgtatacttttacatgttgcaagcctttcacttacctgtctttgatgctcacaacgatcatgccagtgaatttccttagaaaatttcaaaggtaggaaactttcatatacaggaagatgtccattcccatgttatatataataatgaaaaaatcaaaatatgaatgccaaactttatcaggtagttcaataaatatgatcagtctacatgctacatggttaaaagtattcatatagagtctatatatcaaaaaggaaaaacccttgtgttattctgatagaaaataagaaaaatatatcattgtatttgtacttctattacaactatggaaacatttctgtgtatttggacaaggcctcagtggtaacatagtcatatataaagtttgttgtgatggcatagcacagcagtaaaatgtttgaattattttagattttcagtaacactgtattgttcattataacatatacatgtctaatactttaataaatgtatgtgcttataataactaatatttgctaaatgtatatattattataaaacaatgcatttctttagggtaagacattttccaaaagatgcttgtaggttccttttcaacagaatgtgattctcaccctccccacacccaccttgtacatctggatcaccaggggtgatttcaaagaatactactgcccaggctgtaccccaagagatgagttctgtgctgatcttggttaggacccagacattggttggtttgttggcttgtttgttttgtgcagcttggattggtaacaactaaaacaattatgatacacaactctaattttattattaaattccttgaattttcatctttagcatacataagattttcacaattaagaataccattggatgaagactggttaaggaatcatgagtataaagtatctttatgctattagaatgacaaagatttaaaaataatgataaacacagtgttgatgagaaaaatgagcactaccgacattgtttatagaaatataaatggaatgcatattgatcagctaca

SEQ ID NO: 60383 - DNA, 1265 bp, Bovine  19866881473313
  misc_feature (1)..(1): n is a, c, g, or t
ntggggtttcctctctttgtttcgcctagaaattatctctagggagtaaaaggggatgttggaggtagaactcatctggattatttacctttattcagggatcactgtacttgcttctctggctcagtgtctgaaaactattgtttcatatgtttagtccagtttttaaaaattatttgaggcaggcaggtaaatctggcctctgatagtccaacatgaccagaagtggaagcttatggtagactttcataaaagcaaagaggcagtgccatatgttgtattcaaaacaaaatcccattttctttctacatctatgctgctagatatacattgtcttcagaatcaaactggcattggtgctgagctctaaaccacaaggtatgcatttatcagaacaacctatgacctcttctatgttgcttctcttctaatctctctctccatttgggattctcttgagaatctacattttggggcttcagttattccatttttaaactttttaccctcttgtattctattacttgctcagttaatttggaccttttttatttgcgtttacccttttctgcaggtaggtcctgaagtttaactatggctcaataattcataagtctattttttggttacaatgcaatttaatggtatatttatattgctgtatttattagctttgaaattcctaaaagaggtatccattttctgccctcagggtatgctcacatttaaaaaaaaattaatttattttttattgaaggataatggctgttttaggaggccttacaaatagctgtgaaaagaagagaagcagaaagcaaaggaggaaaggaaagatattcccatttgaatgcagagttccaaagaatagcaaggagagataagaaagccttcctcagtgatcaatgcaaagaaatagaggaaagcaacagaatgggaaagactagagatctctcaaataaaattagagataccaagggaacatttcatgcaaagatgggctcaataaaggacagaaatgatatggacctaacagaagcagaagatattaagaagaggtggcaagaatacacaaaagaactgtacaaaaaagatcttcacgaccaagataatcatgatggtgtggtcattcacctagagccagacatcctggaatgtgaagtcaagtgggcttcaggaagcatcactacgaccaaagctagtggaggtgatggaattccagttgagctatttcaaatcctgaaagatgatgctgtgaaagtgctgca

SEQ ID NO: 60384 - DNA, 963 bp, Bovine  19866881581491
  misc_feature (1)..(1): n is a, c, g, or t
ntctttggggtgtacctctggtgaacctcacaattactctcctgatataccctgcaaaactgaatgcccccaaatactcttttcacccaataatttaactaaattttcatgacccatcctttttttttacatacatttctaaatataatgattttcataagtttagtatcaactatcaaaattaatattttatttgccaattaagtaagaaatattttattgattggctataataatttaaaattcacacatgcacagtcctatgtgtaaggcactgtactggagaggacagaatatggaatataaaacacatccaagggatttaggagaaatgagatgtgtggaccctgaaagatgcttaacaatacaaaaacaggtagttctttcttcttaaatgaattaagtcagacattatattaattacaagtgagtgttctagtaggcagtcaaaggaacgagtcaaatggagtaatgcaccatcaaagtttcgttgggactaaactgctggtccctgacaccaggtttgcattaaaatcacctggtgagtttaaaataatactgatgtctgggccccaccccagaccaattaaattagaagctctgaaaggagcccaggcatagacttttaaaaggctctctaggtaattctaatatgcagccaaagttgaaaaccactaggcaagactttgaagaattcagctggacagaaaagtagtagggataatataaaggttaggggaggccttacaggtaactagaaaggtgtgtttgggaaaaaagtgaggcaatccagagtggatgggtaaaggattctggtaagagagcaggggagaacagcatgagggaggaagtctggatcaatatacagagaactttaaagtctagaaccatagtttgggtatttcttctttagccacagccttttaggtctaatctctcctccatattaggatttttcatatt

SEQ ID NO: 60385 - DNA, 644 bp, Bovine  19866881645298
  misc_feature (1)..(1): n is a, c, g, or t
ncttcatctaaagccatgaagctgatttccctagtgtggaaggaaagatttgtgaaattcaagcatacttggtggaatttaaacacatttttatgtactttgggtcacaatcaattcaattcaacaatcagtgaatgagttcctactaattgggagcttgaactactcagcaattatccttgggaaaacagtaaacaagagcataatttattaatttgttatttattctcccagttatataattagataactgttgcagacttctattgttgtgtatctataggatacaaatgtgtatagatatattttattagattttattttaagccatacatagaggttatctattctaagtgtccttccagctctcatttctccattttacaaattaaaatattgtaaaagaataaaggacttgccaaatatagccaacggatgatttgatgacagaacttttaatcctcctaggaaagtgctgcttctggggtccctcagaattttacataatgcactgagttttataggctttgttaattccatccattttacatgaaaaaaaattaaatatttacatatatcaggttatatatatatatatcaggtaaagatatttctttgtatatgtataataaagaataaaatat

SEQ ID NO: 60386 - DNA, 545 bp, Bovine  19866881655624
  misc_feature (1)..(1): n is a, c, g, or t
nactgatgaaagcctaatttctgagccccgcctatttgctgaatccaaaatctctgttacactcttgataattgctctacataattccagtttcaaatggcatgaaatctgtccaagcaataaacagctttacacaatgaaaccttcctcaaacattctcctaagtacagtataaaggaactattttgtacaccacatgtgctgagcttgacaatacataataaaccatcaagatttcacgtgcaaaggtaacacaaacccaatataaatacccagaggccaaaacttgctgggcataagtctcatacagagcataccacacaatgttttcatattatttatatttatatgcttaccactgggcaatttctgctggaaattcatgggagcagtatatgcttagtttgtttgatctattctgcttgatgagagaatgaagactctaattagaagttgaattttgaataacttttcttgaataaaggtaaaataacttcaaaagatgaaaccatcatcttccaaagaggaaatgtttcaagatcaag

SEQ ID NO: 60387 - DNA, 1291 bp, Bovine  19866881677488
  misc_feature (1)..(1): n is a, c, g, or t
naacctagatggagtattcactccatcttatcacttcattctccagtgccatttttgttaaaagagcaaactttagggctacatatatgcactctagaacactaacaatgttaaatcaaaatttaattaaagtaaaacagaaatttatatttctcaatcaaatcactgtggtttaagaaaactaacagaaaacatatataaatatttaaccttggtaaaggaaaaactacccccagtgagacccaagtgatctagttttcaggagatgaaaatttagaatgataaaacttcagtgttaaataaatctgatacatttaaaatacaagagcctgtcatggaaagtaatgatctattgtcagggacaatcaagagccattttattcagttttttttacaacaactaattcaggtgggtcctgaaactctaaagttatatattatgtcatatgctaaatctaaaagcattcaacttaccattcaatcaaacctttagttgatatacaggccaaatccccagaaaaaaaaaagtgagtaagccaaaattaatcacaataaaaggaacaagtatttttctttatgctgtataacacagatactttgaaaaacatttttttagacatagagaaaccacattgataatttctaaaataaaaattttacctataaaaataaaagtacgcattttggcccatatattttctaaatgcttattccctggtaaaacaggaatctgcattgcatctaaaaatatattatcctgagggatgacactttgtgagacggtatgacttagtaaacttatttttaactaaatgatgattcattttcactatgcaggtttcaggtaactacaatacatgtatacatagtcccattcttgggtatctgactttcagtagatctcaagacattgcatctattataataataagtgctagtattatattggatagtatgagcagggcagaacctatgtttgaattagcatactgaattctctagatgcatataataactaaagcaaagtgaacagatatgtacatttagccataatatcctccagaagataatacggatcatgtaagacattttgtaaacatgcactatccagaaagcttaaattattttcttcatataatctttccaatttactatttgattgcactatgatcagtatgcaaaggcaaacttaatgattacaaatctcagtgttaaccatttattccattttcaattagaaagagctatccgacatagtatctacaatgaaaaatttgtaggacataaacaa

SEQ ID NO: 60388 - DNA, 1507 bp, Bovine  19866881844394
  misc_feature (1)..(1): n is a, c, g, or t
nctaaagggacatttatataattaattcacatttggagccaaaagaagccctgtattgattccaaaggacaacatctctcaacgcacacagaatagtgagttgtcatttctttgtttcaataaccaaatgtggttatggccagcttagtactaagatttgggtgatagctgcagctgtctagaaactatctctaaaaggtaggtgccaatatcccagcaagcactttaagaagacttcaagttgtatttatctgatctaagattgaatgatatatataggggaaagaatgttggcaggaatttagcagtcagaagtctgtgtttccttgcaaaagacagttggacaattcctttaaagagagcaagctattactcaaaactcaaacatttgcttctccatttaccagtgaaaattgtatcctattgtcagatacaatgtgtgttattattaaaaattacatgtccctcctaaatagctgagttcacctacatatttgagttaacatatcgaccaaagagaacagggttggccacaaaatcaatgaaagtcaaataaaaggccaaactaaacagatgagacaccatgccctaaagatcaacagaggagatcattgttaggtaagaagggtttagtcaattcagcaaggagaatttgccatgcccatcacaaagcaactcatttaaactacttaaacacaaattctactgcaagacttgtgggcagttagttgaatacaactgggtttttttctttaccatattgtattaaactacattgaatcttatgtggatatcctagagatatctttgaaatttttggtaataacaatggtggcaacaaatcagtagctttatattagttaactttttcaactatctaattgaaaaaattaattaatttcaatatttaaatttatatttaattgtgagatgtgatatttaaatgtaagatgtaatgataattatgaagtaatgaactatttgttttaaagcaatccttattccagtatattcttcctaaaatgattctacagcttttgaatactgggcattatctggactggtctagagtatcaaagacatgcccggaaaatcccatggatggaggagcctggtaggctgcagtccatggggtcgctaagagccagacacgactgagcgacttcactttcactttccactttccactttcatgcattggagaaggaaatggcaacccactccagtgttcttgcctggagaatcccatggacggagaagcctagtaggctgcagtccatggtgtcacacagagtcggacatgactgaagcgacttagtagtagtagtggtagagtatcaaagagtccacaccttgtccatatttgtccttcctgagatttgtcagaaagaacttctatccactaaactgaaaagcacaatttctttttctctgtagcatccattaggattcattctgctaaatattataattaaataccggaaaacccaagagactcaaccaaaaa

SEQ ID NO: 60389 - DNA, 1293 bp, Bovine  19866880485041
  misc_feature (1)..(1): n is a, c, g, or t
nggccagaatactggagtgggtagcctttcccttctccaaaggatcatcccaacccagggatagaacccaggtctcctgcattgcaggcagattcttcaccaactgagctatcagggaagcccttatctagagcgttgagaacctgcactgaactttgaacttcttgatggtttccctagggctctgccattccggctgctggaatgccctttccctggtaaaacctcactgacccttttgtgaaacttcattgctgttccaggctggtaatcttttcagctgacagcctgctcccctgtgatcccaaagcattttgttcatcactctgagagcccttgccagagtatagcctccctagcgatccacctgtttggctctcaccagtgagctcctctaggcgcccacggatacttgtgatgaatgaatgactcccactggcggggagcatccttcctgcggtctaacccgagtcgctcctgctgcagcgcgcgccgcggggagggtgagagagtgacagctggccaagtgcgcgccgcgagtccgagcggaggccggtaggagccgcggccgagcccccccggcgccgccgccctgccggcgaccccggctcccgccgccgctggcgcctcttcgccccggttaccgctagtggctgctgtcgctcagtggagcccaaggagaccgcggccagagcgtccaccgagcaagatggtggctcccgagtctccgtgagtcccggtgggcggggcgccccctcccggagcctccgggcagggggcggcgacgggggctggaggccctgcgggcgagttggcaccgggcgggcggcacccatcggagggctcctccaccgcgcgccccccagaggaagttccctacccctcggcaacccggcccggggaggttgggcaagggtgtgcagagagccccgacctcacctggctgcctgcggggtgggagaggggacacccggcccctaccctgcctgaagcgggaactctttctagtgggatcccgaaaggaagggacccaaagaagcctaagcaggggactggggccccccatgctagagccagatgaacactcagtttgaggctttcgtacaaggatggagtggggtccgccggccaacacgtcatcaccccatgggcccccatccagctggccagggtgtggagaggggtgaggccacctgggtctgcaacaggtacaccctcctggttagccttggtcacatagtcagtcttatttacatcctgccccacccagcccggttccctcaggaagcaggc

SEQ ID NO: 60390 - DNA, 1062 bp, Bovine  19866880534916
  misc_feature (1)..(1): n is a, c, g, or t
nccgaaggtcaggccaggattctttgggctgttgcttggccattgctgggagagggagaaagggtagccccggcccttggactagaggccagggaggcccccttcccctctgacagcgctcctgagcacagccctgggcttctgtcctcagccacccgctggcactcgggggtgccagccctgggccaggcagtggcctaagcagttgtacagggagccctgggaaacagggcctcccccagccagcggtgagccccctgcccacagcccctgctcctgcacccctggctcaagccggctcagctcctggtgggcaaacagagcgagggagccttctcagggacaactcaggcccgcttctgacagatggggaaactgaggtccaagagaggtggtgacttgacccagagtcctgagaccctctcccagggctggcccgagtgctgggtggtacagagtcagtcctgggcatcaggacatgccagtgtctgcggtgctgctcccatctgagcagcaggggagcctgccctgcccccagctggctccacctggctggcgtgtcccagagccagcagaaagctagggcgcgggcaagtctgaattggcccaggtggctgcaagtcccagcgggccctccctgcccgcaggcgctgggagcagggcctgagctccacaccccaaatcctctgccttccctccccacccacgcgttcagcctggggcccaaacgtggcatggagccagcccagcctccctccttggtaaccgaggcacaacacccaacaatagagactctttgtcctgccaaggccgcaccccaacctgggcctgcatgcctggctggggagaagcctgtgggggggaaggtgggaagacaggcagggggagggggcagcagggcccctgagcctggagacccttccctcccttctcaagttcaggggagccagggctgttgcccagcagccttggatggtgtggccccagccccttagacttggtagcaagcagaacgcggaaacgggccaggtggatcacagcaaaaagtgttattttcagtca

SEQ ID NO: 60391 - DNA, 1410 bp, Bovine  19866880535490
  misc_feature (1)..(1): n is a, c, g, or t
nctccgactggccgctaagttctgagcctcgagcacaacagcagttgctcactcggatgcagcgggtcggtagcagtctccctagcgggagccagtcggcctcccaatgtcccagcgtggcctttactgaacggaaccaggtggccactctaccggtgcagcggctcacggaggatgcagcagctgtgcgggacaacgtccacacggaggatggcttccagatgaaactgtatgcccatggcttcacccccgaggagctgttggttcaggtgaacagcgggtgcctggtggtgactggccagcgacaactggagggctgcaacccggatgggaccggcttccgcgtggcgcagaaggtgcaccagcaaatgtcactaccaccggacctggaccccgctgccatgacttgctgcctgaccccctccggccagctgtgtgtccgtggccagtgccgggcactgcctccctctgaggctcaaacaggacccgcctcaagattcagaagccgtggctctaagaaactagcctgacccagtaaacaaccaccgtagtgagcaacagcttcagtgtccgtggtcttttcttggggctgggatcagaggtggaagtagaacaaaggtagaaggccaaggggagggcccagaggggcaggaaaggcacctcaaggtggtggtctatcataaatcgggcccagggggaagctagaggggccgtgggcagtattgtttcactcagctcggctcactgcttggaccagcagctccagcagggagcagcagagagccgaaagggccccaccatcactgaactccgggaccagcagagggccccgggagagaccggggaccaggtgacttggatctggtgtggagctgctgctgtcttggccttaggactagccaagtttccaaaggtcttaggtgttccttcttcttcagggaaaagggtgagaggaccccattccctcaccagcctagtacagactagtcaagagaccccaaagaggctgtttctgatgtttagagaccaactattttcaaatacagactgcagatgccccaataaaatctggagggtgttggggagaggcaaatactggaccctcaactttcatcttggtgagattcagcctcagctcactcttacccacaccacccagttagagctggcctctctctcttggttaccatgaccaccaacatcccctcactttagatggggaagaacgcttttgtttaagatttagaggttcatgtgaagttaacttcaagtaagctggagaggctatggcctgataaactctgccagagaagaaaaggaagacaagcgggaggtcgatcgatcggcgactatattgacaagatacgattggttacatgttaagaaaacatacaatacaaaatacagaaa

SEQ ID NO: 60392 - DNA, 587 bp, Bovine  19866880651546
  misc_feature (1)..(1): n is a, c, g, or t
nttgtggtggtggtgatggtagtgatgatggtataaggattgtttggtttccagggaagctcttcacaccttcccaagcataattatctcctttacccagcatttcttcccaaaccacttcacacattcacacacagacacacacacagacacacaatgtctcatcaaagctaatattttaattatagatgacaaggcattgtatatgaacttaagaaacacaggtcagtcaccttgaggccccactgactcatttcatgtcaccagaagaatccttccaccactgaatgactcacctcctctccatctccttacatgggaagaacaatgcttccctcctctctcatggtgcaagagtaagtggctttattttgttaaatggctttgaacttgttggatgaaaggagctatataagtacaaaggagaagcaaaggtgtttgggctggggagctaaattaagactgattgagattgctctttcttattgggacccactcttggatatgtgtctcagggatgcatcgcctgtgcccacacagctctacacttgggaaaagagcagaggcacaggggaggggagggggag

SEQ ID NO: 60393 - DNA, 1412 bp, Bovine  19866880652365
  misc_feature (1)..(1): n is a, c, g, or t
ntcgtaccccagcgagcactagttgggcccgaggtgactgtgtgtgtctccatgattgacctggtggcccttcggttaccccagaagtggaaggtgatagagaaagaagggtgaggggttttgtctcatgctgtacacgtcaagccctctccctccacccttccgaagatcctcattctacccagggctgttttttaagttaagcagcaaggaggagggcagctgcttgggctgttggcgctgctgggcagccgcagtggctcgagattgccagtccggaccagccaagggagctgctgagtgagtggttttcgagaacactctggattttggctacagctaaggcaggttattggaagtggggctggaacacagttgtgggtagtcatacttgtcctaaacatggagcagaattaacaaaaagcttctggaagtttggagccctctctttatcaaccacgagttaattgactacagttccacagtttctttcccacatatttcgtatctttataccaaggccattctggcttcagtctgggtggtttgaggtggtggttgtggttagttcatgaaatctgaaatcaggattctgagattttttttttttctttttaactatccatatttgaaacataagtactcaaggaggcagaatgaatggttaactagcttaagggtgggtactgcagccagttgtctcaagttcctgacttgttgggagctgagaaccttgacaaaatgtggtttgcaggttagtaggtccctgggatgggctatatgtaatttaaaatgaattcagtataaatttctgatgtaggcactgtccctaatttgagtttcatgtcaaagcccctatgtgaagcaaatctttttccttaaaaaaaatttcagccttagaggatattctatcatgctgctgctgctaagtcactttagtcatgtctgactctgtgcgaccccatagacggcagcccaccaggctcccctgtccctgggattctccaggcaagaacactagagtgggttgccatttccttctccattgcatgaaagtgaaaagtgaaagtgaagtcactcagtcgtgtctgacgcttagcgaccccatggactgcagcctaccagactcctccgtccatgggattttccaggcaagagtactggagtggggtgccattgccatctccatattctgtcataagaaaaggtaaaacaggtgatgctgtaatgtgaccaggtgatagcacctgcctgcccagtctgaccccacagactatagcccaccaggctcctctgtccatggaattttccaggcaagaatactggagtgggttgccatttcctcctccaggcaatcttccgacccagggatcgaagctgcatctcctgcctggcaggcagattctttacca

SEQ ID NO: 60394 - DNA, 1302 bp, Bovine  19866880684612
  misc_feature (1)..(1): n is a, c, g, or t
ngtcgtgtctgactctgctgtagactgtagcccgccaggcacaggcaagaatactggagtgggtagccattcccttctccgggggatcttcccgacccagggatcaaacctgggtctcctgaattgcaggcagactctactgcctaagccaccaggtcagtggatctcaaacttttttccatcagaatcacccactaggtttagaaaataggcctgaccaactgcatctagaatctctaggggtggagtctagaaatcagtgtttttaaaataagtctctttgggactttctgagcggtccagtggttaagaatctgccttccaatgcaagagactcgggttccatccctgatcgaggaatcccacatatcacagggcaattaagcctgcactctgcagctactgaggtccatacactccagagcctgtgcaccaccatgaaagctccagcatgatgcaactgagacctggagcagccaaaaaaattaattaattaaaaaaacaaaaaacataacaacaaaaaataaaataagtttcccagtaattccctggcagtccagtggttaggattcagcgctttcactgctaagagcctaggttcaatccctggtcagcgaactaagatcccacaagctgtgaagcatggccaaaaacccaaaataataaaataaaaataagttccctaagtgattctaggtggctgatttaagcccaagagttgcagctgacacaggaaggagggaggaaaatgagagacagaaaggcgcccccagatgggtactgtggacagtacaggtggagcaagctgggggtggggactggctcttggctttacccaacacctgaagccttctccaagataccacatgctgctggaatgtcacccctccccccaagcatccatacccttctctaatccatgaagtcacccacttgatatgctctgtccttcctggtaaagagtgagcaattccagctggtgggtgtctctcgaacttcctgtttgcttcagaaacttcctctagctgagagtcccggcacagcgtggatagtgagcagattagggaaaccagatttcgttttggccagaggctgggctgagactctagacttgcttactcaaggttagccttgggggttgggggggtgctggccagtgactcttcagctatactttactctggataagagcattcctgaatatttaacacggtgagaattgggcaagaggacagcagaagcaacctgttagcttaaagagaatgagcaaatcagggaaggtaggagagttaattaggttca

SEQ ID NO: 60395 - DNA, 2446 bp, Bovine  19866880707678
  misc_feature (1)..(1): n is a, c, g, or t
nagaaaaggctggcgaattagacctggttgcggcccattagaatgtcaccatccagaggagctagacatctaaacccaataacagtctagcatgtaagatctattacagaggtgccgtgggagcacagccaaggggtgtttaacttggggacagtgggcatcacgttatccatggaatcttcctggaggaggtcaggtctgtgttgaggtttgaagcgggtggaaggaaagggtgaagaaaatatggcaacatccatggcatttactggaactacacgtatttgggttcagtattgatagtagaaaggagccaaacaatctaagacctgtgtgtttggccaaagagttcaaaccctatcctactctattctaacagcagtggaaagccattgataggatttatgccagtgaagtgacataatcagtttttgcttttaagcagttcactctggcaaagagtgaagattggagagaggtgagacttggggttagttaggagagtagggtagtattccaagatttccaaaaaatgataagaatctgaattggggtggaaaggaggtagatttgagagacatttgacgagagaatcaacaagacttggtgataaattgggagtttttttatattggagtatagtcaatactttggccacctcatgcagagaattgactcattggaaaagaccctgattttgggagggattgggggcaggaggagaaggagacgacagatgagatggctggatggcatcaccaactcgatgggcatgagtttaagtgaactccgggagttggtgatgtacagggaggcctgatgtgctgcgatccatggagtcgcaaagagtcggacacgactgagcaactgaactgaactgatagtcaattaacaaatgttgtgatagtctcgggtacacagcaaagtgacacagccatatatatgcatgtatccattctctaaattgagagtttaagatgcagagaacacaaagtaggaaggtggttaaggacaggtgggcctcctgcactagactgtagaccataagccattgacaagcagggcccgagtctgtgcctttccaacctagctttggagagagttgaatgactggctggaggaatgatgtgtctcttccaaccccggtggagcctctcccatcctccactacccagcaacaggtgtggtttagctccctcagcactgtgttaggcaggcactgtgcaagcagctcgtggacaatagcagtgacttttactggcgaagggggataaattcttaaattaccttgaccccttctttggtaaccgttaactttaatattttaacttcaaccctccccgcccctcagtttaacgtcaggaaaccccaatttaagtcagctccacaaaaattattggtctgggtgaagcgctatgaaaattaagctatgtccttgccctgtctgagttcccaatccagactgcattcggcaaaacaagcgtgctgagcagggagtttatatgagggctgagagcactggggacactgtggaacagggacctcaccctgcgaactgccttataaactccagggcagggtctggggctctgtgccaccctccctaggcttaatgctgagatggcactcccaggcggctgacatgaaagcagcctcataaaagggtcagcgtcattagggtgatgaaccagttggtacttggagatccaggggggatgaaaggcgcggtgcgaagacgccctgcgttccccaggcttggttgggcagggcttccaggggccaatgaacactaggaaaactggattcaaagtgtctcttcttgcctttcgcaggaggcgactgtggacatactcaaaggtcgggaaggtattagtaggggggtgctctttatctccagggtcctgggtcacagcgtccctaacccaactcagactcccggagcatcaccagagacgctctaggattggaagttgttatggcaacgaagctctcagaatactgaggaaagccgaagcctagagaggcgacaccctcctataccctcttcggccccacgggtaaagtggcgccccctacgcacaggaaccgtccttggccccccgccccggcgcggagaccaccctggacctccgggggcgggaggccgctctggcccgaagcagagcctctcgctggtagacgggcccgagggagcccctctgggcgcagcgccggtgagctgctcgatgctccgacccggaagtgctcttcaccgccgacctcccacccggctctctggtcccggcggtaagatggcggctgccgcggagtgcgatgtggtaatggcggcgaccgagccagagctgctagacgacgaggaggcgaagaggtaactgggtggcagggtaggggaagaggcgagcttcagctccatggctccgggaaccacgtccttgctgtgggtgcaacc

SEQ ID NO: 60396 - DNA, 3032 bp, Bovine  19866880780951
  misc_feature (1)..(1): n is a, c, g, or t
naggggaggaaggagcaaaatgaggagagaaaagatgagtggggagggaagggtatgggtaagcttggggtgacagaacttctaggtgatcagataaacgtgcccctccccctcttcctggcattgcccaggtagcagatccagcagtctccaggtcctgaactgtaagccacctgggctccctgcccacagcaccatggccaatactctagggcactctgaacttcagtttccctgtagcatgctgtgctcagtcgctcagtcgtatccgactctttgcgacctgacctcatggactgtagcccaccaggctcttctatgagattctccaggcaagaacactggagtggattgccatgccgtcttccaggagatcttccccgactcatggactgaacctgggtctcccactttgcaggcggattctttaccatctgagccaataaggaggtaaataaaagataatgggggcagaggatgagtaaggctggagagaagaacaggggctcctgcagcagcagctgagttcagcaggaagaactacctggcaggcagagaaggggctggcagcacctcttttcctggggcctggggtaaactcttctgtatgagaggcactaggccccctgataccctccccctgtccccatacctgggggaaagaagagccccattctttccatcattggttgcgatgtggggacaccagggaacaggcagcttcttcctgggcccgaaaccacggctctccagcagaagcaagagtccctccctctggccctcccctgtccctcgcatcccccaccccttccctctgtcactctggctgggtttcatttgctcctcactcagcgctcagcgctcagcggtgcctccaaaggcagagaatgctcttgggtgagtgctgaggacgcctgagctgggggatggggagggggattctagccaagggtgggcctcttccctctcccctgccctattcttttcctcctgttgttggccccccaaagttgtgtgtttagaggctgcagtaaccagctggctcttggtacctttcccaggtacaagtatgggcaaggggagcccccactgcagctgggagcaaagctggggtggggccggcaggaatggttgggggtctggaggtccggcctgcaggaataaggcagctgcagcttggggcaggtgtgtgtcatctggggagcctgctacagaggttccttgtatcaaatcatactttccatgcctctaaggggctgcctggaggagcaggcgaggaggagactaagaggggattgtgaatgcagcagagagcgagcgagagtgagagcgagtgggccgggcagatggagggcagcatccactgaggtcccccagcacgctgaggtcaacatcagtgcccctcccacatgctttatttgtggtctcctggctcacctccccatacaaggggtttcttggtcgtttccaagggaaacaaccattaccctttaaggatctgggagatcccctgctacaggggcgagggctagaggccatggggctagttcccctgctcgggctctggggtcttcttccgatgtggaaagggtaggagcctggaacacccatgcctccattgtgctggccagcccagaagtggaatgggggcgctggagaacgtggggaagaatcctaatcctagcaggaagtggggaccttggttcaacctctcattccctgcattcggctctctctccctcttgggctccccttcttcacggagttttggttttatctgtgatagtaacgataactttactacttgaggggtgtgtatgtgtgcgtgtgtgtgcgcatgcctcggggtccccatcacctgcccctgtgactcgaggtaggggtgggaggggactctgggtttggctgcctgaacttgtgagtatgtcagatgcatttaattttgtaaggggtgcgtgtgtttctgcacatgactcttcctgaacacacacctcacgttgtgacggcgtgtgccgctgcatgtctgttttattattgtctgtacgtgcatctgtaggggactgtgtgtcctcgtgtgtctgtccctctgggtgtacatgatctgagtgtgtctttgttgctcgtgcctgtctgtgtgtacgtgcgtgcctgtgcgtggcctctgtgcccgccccttggccagcaggcctgtctgtctgctgtgggtacgacctccatgtgtgcacacatcagtgtgcacagaccgtctcaccatggggatacgtgtgtgagtgtgttctttggtgtctgtccctgtcactctctgtgtggatgcctgtgggcctcagggtgtgtgtccctgtgctctttcgtgtgattctttcccagtgatggcaaagcagcaggacagagtttccccagattctggctcccttgggtggtaggcagggtgatgttatttcatgagacacctgctctgctcccctgccccagtctcagttggacccctgtgggtggtcttttctccatcactcagtctggtttgttccagtttgatcagagcaacagttcagcctcttgaggcagcatccagcaagtcctgggtcccagctgtggacccctggccatggaggcggggaggaggggctgctctgagacacttagccagggtgactgttctgttgcaagatgctaacttagggaattccctagggacccagtggttaagactctgagctctcactgccaagggtggttcaatccctggtcggggaactaagatcccacaaacagggctgtggggcaaaaataataataaacaaaataaaaatgtttactcttaaaagatgctaaccaagaccctccagcacacacctggccattttgggggtgcagaattctagatctgtcaggctgtgtgggaccatcctggaacagggggtgtctccctttgtctgagtgtacccacaagccaagcggcaacacatgtgtgtgcatgtcccatgatatatgcgtcatcccggtggccctgggtgccagggtgcacagtgaat

SEQ ID NO: 60397 - DNA, 1112 bp, Bovine  19866880785167
  misc_feature (1)..(1): n is a, c, g, or t
nataagaattactgtaaatttttaaaccactaggactctgcaagagtaaggagcctattcttgtttcctgatggttgtgtgggacagcacttagggtattttccaatgagcagggtgaccatcagttatactggagaaaaaactaagcctgcctcatattctcatggcctcagaatccctcctaaaaaagagtcacttggttaggcaaaaagaagcaacacttgctttaaaaattatctcaacgcctttagccattctctttttttttccctagccatttttttactggaagagagaatcttgaagaacaggtgggaatatccttccaaactgtccctcaagtgtccctaaattccacagaaaaaaaagcttgcctctccgaagttcgttcctcacaagctgaaatattaaccttttctcttctcatctggtttacccttactgggcaaagttcccaagaccttttcgttggcccttaaaaatataggccccaagtcgcagatcaagtgcttgcttaccttggaattaaccgtaccccgattacagtagagtttagcatttgtttttatattgttggggtctatccccagggcttctgtgtacagttcatatgctaacttgtaatttccttctttaaatgctttattcccatcttctttctttgctttaagtgctttggcattctacaaagaaaagcaaggggagtttcagttcacatccagaaaccctcaaaccactgcagagagagtccagagtctattttctgtttcttagatccaaggatggccccctaccctgcccaaccccaccacttgggctatttgttgctcattggtgcttgctacagagtggacgggagaaaccgagatttacaaaacaataccaatgagacctgtgttacccagagtttacctctctctactccccagaataagcattactatcttttcttcactgaaggaagaaaaaaagaaaaaacactgagatattaaaaggatctgactctaaattatcatatttaccttcaggcaaatacaaagttgtcctgaaacaaattctaatgaaagaaccaagcatcctggcaaggtgggaaagaagtgctatcacattcc

SEQ ID NO: 60398 - DNA, 1310 bp, Bovine  19866880812302
  misc_feature (1)..(1): n is a, c, g, or t
ngctgaactcatgaccctactaacctgacacacacacacacacacacacacacacacacacacacacacgcccctaaacaactgtaggtaggttttgaacattcacagagataaatgtttgctggctcaaccctcctacctccaacctctagtgtggatgttgggccagccccaggcttgggggacagacacctggacctcgatgtggggggaccaagagctgtgatgtacacccagcaccaagttgagcatgtacttaggagatgaactgtttgcaaagcacttccacacgcagcacagcattcctttcttacccagacatcccagagtgtggatgattggcattcagccctcatgttagacattgaaatatattagagctcagtgtaagcaacagagtgtaagcaacagacctaaggccacacagccaggttcaaatcccagcatctctgactctaaatcccatctcttgtgccctccccaccttgtgactgttaagagagatggagccttagtgtttcaggaatggggaggggggggatggcccaaagcaggtggattggctcccaggacaggctgatcaagcactcaaggcccatgccttggtgttctcaactgaaaaatggggagatgccagccatctcccgctctgcctaggctagctagggacagggagggtagcctcctaaatccggttggttcctcccctgtctcttggcaggactgacccagctggcccatcccctgccccccatgattgcaacatgacaccagaggggagagaaggggatttcagaaatgtcttaagctctggcttaaggggagtgaagggtagaccctaaggaggacaggaaagcagagatggaggcagactgtgttggatttcagggcaaagatggctgcagttgaatcagacgtccctgtgcctttgggaatgagaaggcatcagagtggcaggtggaggctgttcccggccccgtgccctcagacctagctcctgttgtaatcagtccctccatctcctctcctagtctttgcctgcagaaacctctgactgcattctgagccccagagatcaaagaccttgagcttgggtcatgcgtgagtcactggtttgatgagctattcaccccccactccctgcagatggattaatttcagtcccatcaggaggtctccaagccctccagcctgtccccccatggcttcaacatctcccttggttgccagttcctcctcagtggcccctcccaactcatcctgaggcctctgcatgcgtgtttcccctggctcccccaaggccttccaag

SEQ ID NO: 60399 - DNA, 2681 bp, Bovine  19866880827858
  misc_feature (1)..(1): n is a, c, g, or t
ntggctctgaaatactacgaagcctgtaaagtgatttttctggttcattgcaggagtcagcactgcctacatgtccgaaatctgcagctagtgatacaaatgcctgccttgtgtgaatacttgcaggcttcatctgtcttaatatcatatttccagggcttcttagaagtaactccgttaactcacctgtctttacttaagaaataccccatgtgaaattagcaacacatacaagttgaggctggcaaaaacacacagaacattcttgaccctgtgcccccttccacccttaaagggataactataaataggaaattatcagagtccttatttccttcagagcacacaaagcactttccttttcccttcattcctagaagcgaatagcataagcaccagagcgagtcagtaggagaacgggcagtccactgcaaagaaaaaagagaaaatatactataccttccactaaggtaactagtggattggaaatagacttatgtagatatctagtcagtttgaattggactgttgcctaaaatttgcagtgagcattataaataaatcacttgagccccagaaaaggtgtggtgcattgaggctgcatttatacaggctgtgtgcatgtatgtatacatatgtatgtaatttctttcccctagggactcaatagatcttgataatccacaggagaacattaaggccacccagctcctggagggcctggtgcaggagttgcagaagaaggcagagcaccaagtgggggaagacgggttcctactggaagatcaagctggggcactacgccacacagctccaggtgggcgtgagttcgtggccacgctccatgtgagccccaggccacactcttccctgcaggggctcttccttcatccagaggtttctctctctcctttcacccaaggttgccaagccacatgtgacatgtgtaaagttcttattgtttggttttgtgattgtagctgccatttttaaacgttttatttgaaaaccatttcaaatttatagacagttacaagattgatactgagaacatatgctcagactcaccattattaacatttgctatacgacattctccctctgcgcacatgcatgtacagacacacacgcaggcgcgcacacacttgcacaaatgcgcgcacatgcacagatgtgcacacagacgtgcacagtttttcatcactcgaaagttgtgtgcctcatgcccctttgtccctcaagtgctccagtgtccactttctaagcatatgaaccttctgttacgtagttacagtacagttaccagctgacttactaacatcttttgggacatttttctccccctccagtccaagatcgtgttcaagatcgcttattgcctatagttgtcatgtctctttaaggaaccatttgtcagtctccctttgtctttcattgcattgacattttaaaagtaattcagctcctctgttttttaaaggtaaaatgtgccttatttggggtttgtatgacttttcctcacgattagatccagggtacacacccctgatcagaattggaaataagtgatgttgtgtcctcctcagactatcacatccagaggtgtactgcgtccaccttgtcctcctcggtggcagtaattttggtcgctcaatcaaggtggtgtccggtttctcctctgatatggccttttaaaaatgtattctattcccaagcatggttcccttactttaagcaatttaagatgtaagaagtaaaataattttaccttcctcttgtaattgagtttcccacaacatgcttttcttgtccccattcacactggaagagcagcagttctcatggttgtgttacgaaacgtctcctccatcctgagctctggccctctgctctgaggtgaggttctgccccatagcatgaagcagaacaaagtgatgtttgctcttggattctttcagaacacatatgaccgctgccccatggagctggtgcgctgcatccgccatattttgtacaatgaacagaggctggtccgagaagccaacaatgtgagtgccctgtgggcttgggaagtcctttctggctcagctctttctgggcccagctttgtcaggatctctcagggtgcatctgttggtgtctctataaacagagccttgtcctaagagcacaaaggaaatagaaaactgatctctgatcttgactggcttgtaaccttgatgagatcgcaaccacaaaacaatgtgaacaagtgcaaaataatttaaccccaattgaatagtgtttgaggagaggcacgcttatattcaaggatccctggtggttctgttggtaaagaatcttcccacagtgcgagaaacctaggttggatccctgggtcaggaagatcccctggagaagggaatggctacctactccagagttcttgtctggagaattccatggaccaaggagcctggcaggctacagtccatgtggtcacaaagagctggacacagctgagcgactcacacacacacatgcttatattcagatgagattgcttaagaacagccccttctcggcccgcctcaacctggtgttgaaggaatagatccacccaggccaggtcgatgactcaatccacacagcgcttgttgatgccttgcccgtgacttcacttggggtctccagaacgccgc

SEQ ID NO: 60400 - DNA, 2669 bp, Bovine  19866880863192
  misc_feature (1)..(1): n is a, c, g, or t
ntggccctgcccgccaggcctctgcagcccccgctggacttcaagcacttgctcaccttccacttcaatggcgccaccccgctcagtctcttccccaacttcagcacggtacgggctgggcgggcgggtggggggagtgcaacccagcatgggggtgggctgggaaggtgggctcccaggggccggctcttagaagctgggtccaaccaggagcaacatccccccgagtgaccaggtgctccccaaatggggcccagctcctccttaggccagaatatccaggatgctactgtcctgtcccctagcaactggtgctgagcccggagggcctgtgagctgcaggtttcatcgagctttcataaaggggcatctgtggatgatctgtgtatgtctgtgtgcctttccgttttagtttgtctctgtaggactttgtgtgtatttatgggtgtgagtttgtgcacgtgtgcttgtgaactctttatgcctgtgcagttgtctttatgtagtgtatatgcctgggtatctgagtttttttgtgtctactgtgtatgtgtttggtgtgtgcctggcctccgcgtgtatgttttcctatggtttggatgattgtaagtttgtgaatgtgtgccattggtgtgcaggtgagtgtgtatctttctgcttgtttctgtgatttgtaactacctgtaagtttatgggctgtgtgtctgcctactagtctgtgtactagtatttccatgtatgtgtgtaaatatgaaatttacttcactatatgagctataaggtatatgaccccttttaaaaattttttgaaaaatcaaatgtaatcattgatgagcctcaccccatcctgaaaagatggtgggaaagtctatctaatcacccttgggagccccttccttcccgccctccagacttgtacaaagagcctaaggagcccgagacaattgggggggggtcctctggttttcagtccccactgtcacttgctgacatgctcattgttcaggcacatggtccctatgagggggtcaatctgcagttgttctcatcactgggggccctgcaggccactctcccctgaaatcctgtcccgccccgccacccacctacctcagcccctggccctgggtgctgtgagggttagaacctctttctggtctcagggaagtttctgaaaccatgctcttctctcaaagcctgtgttctcctctctcaggaaggtttggaaagttcctcttgacaagcaagcccccaacgacttctgcttttgacacaacaacccagcccttgagaaaagggaacataaaggcttggtttgatagaagaaacagaaattatttaaaacaaggaaaagaaaaaaaatacaaattcatattccagggaaatgccctactcttcagggaaccctctggcttccatctgctaaccctgctccctgcccccagcctggtcccccactgccccgggccgtggctctcactctcaggccctgtgacagcggcaaagctgatacgataagctttatctcccccagcccacaagcgcagcacaaggctgggttatgggggaggaaattccaaattcccttctccgcttctccctgcccccaactctgcacacgtagatgtaattctcatgaatgaggaaaaaaagagaccagaggggcagcaagggaagtcagtgtgatcaccaggccatggtttctcaagatcacaaaagtcacatgccatccccctgcctccaagcacaagcctaggccgtctaagaaagtcagccagggaagaggcttttcttttccagtgtttaatatccacagacatgagaaatttcttcctatgggctgaccactgccctcgtccatagactttagttttggacaattggcactgccctcccaccttacttagctgaccccacagttactatgccctcccacccctccacagatggacccggtccagaaagctgtcatcagccacacatttggggttccctctcccctgaagaagaagctcttcatttcctgtaacatctgtcacctgagattcaactcagcggtgagagggagttgtggaaacaggcttggggggcgctgggcagggagcgggctggacccttggcttccaggtctttcctgcctggaggaataggggtggcaaagggactgtggtctgtattttctgtccttcgttgaggaagagccacccctggccctttatccatactatcctctcctctctccagattcctgtgccccttcccagcccatccccctaggattctgttttcctccccctatgcctctctcctgtgttctggaaccttctgatgagagcaggctgcccttccttactctgggtccctggggccaccatcagttctggttcggggctgagttcttaacacacctgagagtttacagaatctgtttgtgcccatcctcttaattggttctcatgatacatctgtgagatggttcgaggtcccatcctcagcctcatttttcagatgaggaaactgagcttcagagaggttaagtgacttgcctgaggtcacacagctggtaattagcagagctgggatttgaacccaggcctggctgaccccacagtccacatacttcctagcagagcctgcccctagagagtagggaagcctcattcggcctc

SEQ ID NO: 60401 - DNA, 948 bp, Bovine  19866880870788
  misc_feature (1)..(1): n is a, c, g, or t
nagagtattatctgttactggcattgttgggggaagggaggcggtctttgggtgacccttctgcacccccaccctcctcggtgcgcttaggggccagggcagctgtggttttacacagacatagagcccctcacctccaaagaggtcatccttaatagaggccaggaatataaagttagacttcacttctagaaacgcaggcttcaggccctcccctgcaggcacttcccagcagttttcctttcaaggtggcggcagtgggtgatccttgaggctacggttctccttaagagtttgggactgcccagacagccctctccatactgcacagccagaagccctcaggtcccaaggacctaggagagaccatctagaacctcatggcttgggaaggtgcccatggcttgggaaggtgcccacggccccgggggtgcctgtcaatcaagggccggggtgcctggagtggggggattcctgaatagggccaggcctgagaggaagaggagaggctggcggggtggccctgcgtgacttggctgacgcctgtcttcccctcctcacacagagtagaggcttctcccgaaagagccagacgttcctgcccaaggtcttcttccgcaaaatgtcatcctcaggggccaaggacaagccggagctgcagtttcccttcctgcaggatgaggagacggtggccacgctgcaggagtgcaagacgctcttcatcctgcgaggcctgcctgggagcggcaagtccacgctggcccggttcatcgtggacaagtaccgggatggcaccaagatggtgtctgccgacagctacaagatcacccctggcgcccggggatccttctctgaggagtacaagcagctggacgaggacctggctgcctgttgccgccgggatttccgggtcctggtgctggatataccaaccatgagcgggagcgg

SEQ ID NO: 60402 - DNA, 1354 bp, Bovine  19866880874524
  misc_feature (1)..(1): n is a, c, g, or t
nccttggcttggtaaaccccaaatgatctcctaaaggtcagctagtatctactgggcactgtgcacagtgacgcagttatttctgcatttgttgtgttaggtatataattattataggaatttaccattcacatcatgtctctaacttaagatgcacatcagcgtcgggtaacttgatgtttagttatcctgcaagtagttaccaggataactgacttcagtatcttttactatcctatcttacccgctagaatatttcacaagttgttttcacgtctataatagtgatattgtccctttaatgagaaatgttttctgccagtagaaagcctgagtttagaaggatctctggtaaatattggtaagagataataatgtagctaatgaaagcccagtaaggaatttgggaacaaatagaataaaggtaaccactctgcttctcataggaaatgtcacagtgttgcttctttgttttatttatctatttattaggctgtgctgggtctttgctgctgtgcgagcatttctctagttgtggcgagcggggactactctctagttgcagtactcaggcttctcattgcggtggcttctcttgtcgcagagctcaagagccacataggttcaaggacacacaggtttcaacagttctggctcccaggctctagagtccgggctcaatagttatgacgcatgggcttagttgttctgtggtatgtgggatcttcccggaccagggctcaaacccgtgtctcctgcattggcaggcatgttctttaccattgagccactagggaagccccacaaagttaattctgaccactggtggtcaggatctaggtttaggcctctttgaaaaatcacccacccccagcacgattctcgttaattctcccactcctttttgtaatctaaagcttttggctgatttctgatttgattgagaagagtgaaggtgaaccagcagattcctaatacggcctcctttgtttgaaagcttggcatcctgatgttctcaggcctttagggaagggagtcctatttaaaacattttggaaaaaaaaaattgggagattgtcaaataatttttgttatccgtgagttacactttgttaattcgatttgcagcttttatcataaaacaatgttaaaccacaggtatcatagtcaagaaaagctcacttgatcaggtgaagtttttaataaataaagcccaggggttgagggagaaggcaatagcaccccactccagtactcttgcctggagaatcccgtggacggaggagcctggtaggctgcagtccatggggtcgtgaagagtcggacacgactgagtgacttccctttcactttt

SEQ ID NO: 60403 - DNA, 890 bp, Bovine  19866880879914
  misc_feature (1)..(1): n is a, c, g, or t
nttgaggggcttgagggtctgagggccgagaggtcgcttctagaggtggcctggtctcaaggcttcaggggtttctgtgtggcgccccccaggcaccaggctgctgccttttgccagcactgactttcctatctccctggcagtgacaccatctgcgacctggggggtgtcaacgagctggcaaactacggggagtactcgggcgcccccagcgagcagcagacctatgactacgccaagacgatcctctcccttatgacccgcgagaagcacccagatggtgagacatacgggctcttcgttggcgtggcccagtgtcctggggtggaaagagctttggcttgggtgggaggcatgaggttgtcccggtcctttgaaacctggggctcatcgtttaacttctggaccgaggttgccctgactttgcagcaggtagtgacagcacctgtcattccaggggctccaagcaggtgaggaaggggtggatacatgaagtcctatgagcaggtgcgagggaggtggcagcagaggtagtggtggcagcatgcttttgctgactgctataagttcagttcttcatggcctgcttacacctttattattcaggctgtgtggttcccaatttccctttaccacttgtgctgtgttttgggactacagatactgattccccttctcatgagccagacagagaatcccaccagggtgtccagaaaccatgctaggtttctcgatgccagctaggaatgatgcagagattctgtgggtttggattgactacctgctccgtggcgtaggtaagggagggttgagctgatgaaactaagtcaggagagaccagcttgctccccacctctgcactggtatctcctaacaattgggggacctca

SEQ ID NO: 60404 - DNA, 794 bp, Bovine  19866880897249
  misc_feature (1)..(1): n is a, c, g, or t
natctcgccctgccttttctatttatgggccatcctatctctgttttcttgtctccctgttttcccttgacattccatccccgcccacacgccttgccgccttgccgagaagtgtggctggagctacctctgtaattaaagagccctctcctggcgctgggcacacacccactggatcaggctgtgggcagcctctggcctcgaggcgcctcaaggacaaagggcagcaaaaatggcaggagcaccccgccctcacctctggggccttgcaccatccggccctactccccctccctgcgaggcgtgggccactccagccagaagcatttgggaggctcttctgtagcccgtgtcctctccccaaacctgacggggtcaccctgagcaagtcccctcacccaacgccagcagacagggggcagcagcgcacatggatctaaataaggttcaaggcaagtgcactcttcaaagatacaccagcaaggacctactgtatagcacagggaactctgctcaatattctgtgataactcacatgagaaaagaatctggagaagaatgaatataggtatatgtataactgaatcactttgctgaaacaaacacaacattgtaaatcaactctaatccaattaaaattaaacaaacatgggtacgtgaaaatgcttagagaaaatgctggaaataggaaccatatatgaacagtgattattttactatgatggaaatatagctgattctttttcttgtttttttttttttttaatacttaacaggtattggtttgtaataag

SEQ ID NO: 60405 - DNA, 2581 bp, Bovine  19866880919199
  misc_feature (1)..(1): n is a, c, g, or t
nactgacctttgctgtgccgctcttcaggggctccactggctggagtcggggtggggggcacccgcatctcatcctgggtcagggtttgcggcctctgcttgctcttggcggcttcaacagccttgagttttctggcatgtttgtggcctttgtaatgtgcttcggcctggttctggggaggggagagtctggggtcaccattcatttgctgcatctacctgccccatccatgagctggcacgtagggggcaggtcagagggaggcagggctccagccacacagggagcaaatccttgccattgttgttatcattatagcacgtatgtgggcccaagggttacagaatgcattctcgtatgtgaacgcccaggcaaaccgccactgccttccaattctgcctcaacgcctctttagctgtgcatctttgggcaagtcacttcacctttctgagcctcagtttcctgactcataagctttggtatgataatactgatatcacagagttgtgagaatgaaaatgagaacatgaatgacaagtgaaagcgaaagtgttagttgctcagttgtatccaactctttgcgaccctatggactataccctgccaggcttctctgtccgtggggatcctccaggcaagaatattggagtgggttgccattcccttctacaagcaatcttccaaacccagagatcgaacccaggtctcccgcattgcaggtagattctttaccatctgagccaccagggaagccctggtttgatgactgacaaccttggaggcctcatataaatggaattgtggcaggaactgggggaagagggaaatggttgttcagtgggtttaaagtctcggttgtgcaagacgagaatgttccagagatctgccctgcactgtgcttatagttactacactgtactgtacacaagaaaattggttaaactgttaagcgggtagatctcatgttacatgtttttaattaaaagagaatctcttttgttttgtgtgggtcagatttggagaggtttagtgaaggccctgcccctgcaccaggtcttcccagtgaggaccacatggctacctgctgtttttcaagaatgccagacaacctctcaggactcctcctgggggtgaccactgtctctgactgtggagactggcctccctgccctccacgcctgggctgtcgttaaggaaccattcagcatctgcagacgtgatcccgcagcctccagacccagctccgggctcagtcagagctatgtgacacgcatgcacatgcatttcccgggcccctttggctttcattctccgtttgaagccagggcttgagaattttgcggagctgacccgctggtttttcagcgactccatagcttggtggtaacaccccaggattctcctggctgtgtttgtcatcacagttgcaccatcaaggaagaagcaagcacaggggctgtcgtttcatacgaaagagcaggaaagttatttgcttgtgtcctagaagtgacattgaaccctctgaaagggcagaggctgctcggctctcgccttctcttcctctgccgagttccctttgggtttcctgtaggagcagccgctgtcgtgtgcaacttcaccagaatttctgtccccatcatcatacatccagctcgcctgtactcaaccccctgtggggatgcactcggctcccctcaaggtgaccttgaaggcagtgctaatgatggacttgcacaatttcactcctgacttccgaatacattttggctgcaggacaccacaggaggaggggcggtggtggtctgcagccagcgaccaacctgtaaccctgatttcgtttaaagagcccttagcctggctgcactggggattcttaatgcctggcgatcttgcacctgctggaggagcaggccagagcacgcactaagcagcgatggctgcattcaccaccccgaacctctcactttctagcgccccgtcctcctttatttaccttcctagctctcatttgcttaacacagtccacatctttcctggttgcctgtctcttgtccactctgagatttaaggcagtgtgctttctctcttgcctcctgctgtattcccagtgctgggaaccttgcctggtatatagcaggccctcagtaaatatttatggaatagatgggtggacttgatgacactgtgggcttgagattaagcagaccacagggacaattctggggctaataatggagggcagtctgttccagctccaactcctcccttctaagagcctcagtttctgcatctatgcaaggagggtcgtaaatacctagacctcccagaaatctcgtcaagactgcatgggaggctgcaggtgaaagtgttactaaacagcaatatacctgcaatgtatgtgcggcgtgatttctttggccaggttttaatgttttgatggcatctttgtttttgctgtaagttacagtccttttgaaagcatgtggaatataaatgatataggtggaaaaagaaattagataaggatatctcacaaatgagcatgtagcattagcagaaaattcacaaaagaaaaaaatg

SEQ ID NO: 60406 - DNA, 1339 bp, Bovine  19866880925927
  misc_feature (1)..(1): n is a, c, g, or t
ncacaacgtgcaatctcacactcacacacacacactcacacatccttcactggtgccaccatgcacagaaacactaaagtcacaactagtattaacacttcacattatgagtattgtttccaaagagaagcgattcatggaattaaaacatccacaaaagtaactcctctggcaaggatgaagaagctagagatggcgacggggcaggaggggtggggtggggcgtcacgactgtgcgtgggggatccactgactgtccatgggtcggcctaggagctcctccacacgccgcgccacgtcaatcgtgtcgtccagatcgaagtcaccatcgttgtcaaggacggggtcggggcttgggaggaaaagaggagaggttgagggaagggagaggtcagaggccaacaagaagcagcagagaccaccctgcaccccaccaggtgagcggctcagactgcctgtacccttggcccaggcctggcgggcaactagtaaggcgacctgaaccctggggcagagtcgtctgccagttggttggacacaatgacagactaaaataccagcctacctagcctcaacactggttgcccgcatatacttaaaacccatctggtctttacacagagccagaaaaatctccactttagaagagtggagcaggtgacatggcccaaccctgttcgatactaccaatgcctgttggtcacatctctccctcccacctgggcacgtgcctgagcctgcctggcctgggtagtctcaaacccagactagccctggtgtccttgcccatcagtcctctgtgcacccagcctgaggccaggtgcccagttcctccccatggagccccagaagaacacaacctacttctgtgggtacatgttatagtgaggctgggggcacacggctggggagggagcctggtccatgtaggtggcactgcctccggcagagtctgcagaggcgctcacaaacctgtgggaggaagcggagccttagcaaggggtagtggggagggagcacttttgtgtctttctcgggtgtggaaggacaaagggcccaccgagcccggggctttggctgtgggagcagagccctgggtaccaggtcccctcatgaccaaggcccagttccctccccagggctgggccaggtatgtgtgtgtgaggggaggcggtagggggtgaggagagccaggtggagccgcggggaggagaaaagaggcagcaggagaccagcgctgggcccggacacttactcagggaccacctgcttgatctgtggcttcacgtacccgtccactgctttagctgccgaggagggaagatggtgatgagaacca

SEQ ID NO: 60407 - DNA, 2073 bp, Bovine  19866880930646
  misc_feature (1)..(1): n is a, c, g, or t
ncctcctttctccgaacctctcccctgctctcagggcaggagatgggtggcagataacacaggctccccgctcctccaagatgccctcaatcctcttaccaccttcctcatcccacctgctcaatattaggcttctcaaacggggggctgcccagggatccctccaccacaggccgggtcatctgcaggatgcatttccgcaggagctgcaggaagagggaggagtagagatcagtggagcacagagccgcagaccttcccagcctccatctcgcccactcacactctcatttgaagggagctcaccttgaagaggtagaaatagacctgcttggtgtccgtgtcctcctccttgtgaacagacatgaacagattctccacgtccaccaccatccccagcagccggttaatctcatcctccgacacgttctccaggtgggacacgtggtcagctgtaagaatgagtggtagttgggaaaaactgacagaaaaaaatcaacaggacttccccctcctcattattgccagccaagacacatcctcagtccctctgaccagtgtgactgggcaatgagactgactgctcctatgtcagccctggggggcctcttgtctcttgtggtggcaggtttcctttctgcttccttggggcatacacactcccggcccaattcctccttaggaggcatcttctgtctttcagagatgaaactgtgtggtcctgtccaagcaggacgcagcacctccagcttcccaaccccagttccacaggtactacctgccttacccaaagggtgctcacagctgcggcacagctcgctcaggttcgccgctggctgctgcaggtccatgcggggtgcagtggggggcttggggtttttccagccattacacttgcaggtttcattggcctggaagcagaaacatcagtcaataagcgtgtaagccggggaagagtagccgctccccagtcacagctttgcccccattcccacccaagccctaggatgccccaagccccgccccctattaccccaggccccgcccctaccttgcaagccgagaagacccctagcttctctagcttcttggcgcgcggcagcccccggacttgcgctttcctttggctggcgcgctgctgctggctcaggccaggtcgagccggatcacccccgctcccggtacccccacttcctaccccgggccccccagtccctgtgctcccggctggggctgtagctggggcaggggctggtgccggagtgggagcgggagtcggggccgaagctgggctgagggtaggagtcggagttggggtaggggctggggactgaagcggacggggctgcgcggcaggggccggggtagaggcctgggaaggttccgccatggcctcccccgaagcggagcgcggcgcagcgcggcgctcccagccctagggccgcatgggcaaccggcattcaatgcgcaggcgtcgctgccccagagcatgatgggagttgtagtctttcacggttactttagtcgcctccaggttccagacttttctgtcctgtccctcaatcccggacagccaaatgaggctctagccagcaccccagattgactcctcctcacttgtaatccttttagaaggcttccgaggtagtcaaaattgctgccttttgaggacaaggagaagcaccccagaaaacaggcttctatttggggaatcacatccctagccataaagatggaaatgcaggcctggggccaggagtgtagtggtttcatgcccacctccctcctcccctcactctgcccctatcccacacgtttctggacacagaattgcagctagggtgattgaatagcaacagttctatttcttgatctgttaagtggttacatggttgtgctttgtgcacttttctctgtgttaacttatacttcaacaaaaaaaggtttattataaaagcactgagcgtcagagtaatggccagggtcaggaaaaaggctcctgaggcggggatgagggactatgggacctgctatccacccacacagtgggcacctcccattcagggcccacgt

SEQ ID NO: 60408 - DNA, 2175 bp, Bovine  19866880936360
  misc_feature (1)..(1): n is a, c, g, or t
ncctgtgactattgacacaggtgctaaaacaactggaaggacacacaccgtggtgacacactagggcaaggggtggggacacggcctggttcacttcccttatctgcggcacctttgcacggagcacattattactaatggtaagagtcaaaactaaaaatttaattttgaagcaaagaagacagttttggagacaacatgggtaggcgtttccggaatgccccgagggttcctgttctgtaccggagaggggggtcaagctgattcaggccacatgtgggaagcccatgggggaccgaccgtcagcccctcagcagccccttcggtcacctgtacacgacagaggcaccccctccggccaccatggtccagattctccccttgggattcagtaaagtcagcttcaagcttgccccacttttggcgtccagatctgcgatgtaggcttcctggggaccagagagcaacagggtgggccctgggggcacccccttcaccaggctgcagaccccaggccccctccctttcccctggagcagtaggaaaagggcctccgttgttctcacagggtcaggaagaagggtttgtgtggggcctcatgggcctgggacaaaatgggatgctgtctgtaagcaccaaaaccatctacagccagtcaccgcctggaaacaaactttccaactgctttccctctgattttaagtcctgctaagtcacttgcttctaccctggccccacccgcagcatctccctgcctaactcattaggtgccaccctcccccagccggccaggccccatccgttcctccagcccagactcttcccctagcctaggttctgtcacacacgcccgatcctgctgtgaggacctctcagaggatggggtgggaagcagcaattaaaagtctcagcaagtggccaagacaactatctaatgacaggatcagggggagccactcggaattactgagaaacaacaaatcaagttacgagcccagggaggttgattgagagaggagtctaaaaggatttctggccaggattcagaggcttggctctctcccacccccacctcctttggggttttaagaaaattaaatggctcgaccttcctttcctgccaaatatatagctcacaagggggtggggggaatgctcatctgagattagtcaccccgcccgggcccccctcactctcagtctcctccccacagcagccttacctctgggtaagcctcccgtccgaaggggggtgggaactctatgtcaccccacttcactttgcagatgtagtcggcagtggcatccaccttggcggccaagtcaaggacgtagacgccatctttggtcacgactttaagaaaagaagaggcgattggacatgggtctcagcagaggcgaccgtcaccctccaaccccctccaggctttcccacacccaccccccgtgaggcccccaggcctcacgactctccagctcaacaagaaaccagattggttcttatggagacacagcttttccctcattcaaggaaaaacaaattctacaagaccatccccactccctgatctgtaggtactagggcagaaccctgttttagctgccatggcaattttaaaacattacccattcacccatccacaactctgctatttaaaaacaaaaagagtgtttcaagcacaatgtctaaggcccctgggtgggcaccccagggtctcttagggtccagagagaagtgggaagaaggggagctgtgggtgcaccgggccccccaccagcagaattcatttattgctgcctcgctggagtccacttccctttacccagggccactgagctaatttagttagcgcagagccatctggtccatgagaggggctacatcccccagctggaatctgaatcaggaatctgacctcagaagctctggccaaagccagcccacaccacctgcctcttgcaaacccgagagccttcgccaaggtgtttccaactgtggcgggtcaatgattgactaactcctggagcgggtggaggggaagggggcctctgaggcaccaagaggaagggagggcctgactggtcaggcagacacagcggcagcccagctcccgggagaacagcctgatctactggcgggaagagccactgagcagaatcaaaccataaccagga

SEQ ID NO: 60409 - DNA, 1108 bp, Bovine  19866880941316
  misc_feature (1)..(1): n is a, c, g, or t
ncctgggtctcccacattgcaggcagattctttaccatctgagccaccagggaagcctgcctctatgaaaaggaccaattcaaacaagaagaaaaaagttggcaacttggccaaggcagctctcaacacgacctccctctgaccagactggaactctgagttgtgtgatttttgctcttggacaaaataccaagaggctgaagatgccaaaagcacagtagggacatgttagttctgagctgttttgaaggaattcgggtttggcaacgaacaccgcttcccttcaccagtcaattgagattgatgggcaaggtatgtacacatcccaatgtcagcaaagggcctccatccagaggctaagaccccagtgccccagagaattcctggcagtgacatgccagggccggtgaccacccaaggtcttgacagccagggctctttatcacatcacatacattgccaaacaccagaagcatgtcatacaggaaggaggtttattgaccactgaatacaagaacacaattaaatttgaggagattctgaagcactggagtagaaccaaaatcccagaagagacactgggaaaaaacaatagctttagtgaaagaccattacaacatggaaacaaagggaaaaaatacagcttaaggaacaaacaggaaaccactgctcagaagttatctgttatcctatgattcagtgaaaatgcctccagtgggtttggtctttttggaaggaagactaagctggtgagggcaatactagccccggtaccagcagcctggatcttctgcactgggcacagaccttcagaactggctcttagtgccggtgcaggcaggcagagcactgctgggatgaagggttctagaggcaggcgtagagcagggattacaggggagtctgcagggagagagagagaagaatgagcttgacctgggaggtgaaaagtatctcagtgatggacagaaaggtaagaccaaaagtcttaaggacaggtccaccagcaacaaattacacagcccagtggaatctacagagcagtcccactttcactctcactgtatctctccacatccaggagtccctggtcaatgggcttagggac

SEQ ID NO: 60410 - DNA, 1180 bp, Bovine  19866880974807
  misc_feature (1)..(1): n is a, c, g, or t
ntgaatgtgagcaattcccggagatagtgaaggacagggaagcttggcgtgctgtagctcatgcgatcacaaagagttggacacgacttagtgactgaacaacagcaacgttggcggcccaataccccgtgcactgaggggtgtcaccccgggtaccccatgttctcacctcagcaccatcaccagtggtcaccagtcctgggccttggggttggttgcggtagtccagtttactcatggaattcttgactggcggggtctttctgtgcttcatgagaagcagccctgggtttttttattttgggttgcatagcacagctaatggagtctcagttccctgaccggggactgaacctggggccctggcagtgaaagcgctgagtcctaacaactggaccaccaggaaactccccgcagccctgggacatttgtttcccatggttgtaagcgcttgctttcttgctgccttctttctaagcacttgagtgttgtcccttggtccttccagggcatcgtgagagcaattcgagattaccagggtcccctgaaggagcacgaggtcacgatctttgtccgaagaggtggccccaactatcaggagggcttacgggtcatgggagaagtcggtaagatggggggatgttttctgtccttcccaccctgagcgtcttgcctcctcgggatttcctgagcaagtcagtcttctaacgtctccatgcttctcccaccacccacctcactccctggagctacagccagcttccgctgcatttctatgccctctgacacatggcacctgaccaaaacctaaattcaggatgggcaggaaagcagtttattcagctgttcattcagcagttgcctgtggaaggcctgctccacgcccagtgctgtgccgagctctggggtcacggccacacgcgacagctgacaggcagcaggccctcgtgccatcgaggacagtggctgcggcctcaggtacgaggcaggaccacttggggaaggggtggcctctgtgggaggggacagggccgttttaaatgaggcagtcagagcgcttggccaaagaggtggcatttgagcagaaatctgaggaggagagggagcagttggtggtggctgtctgcaaatgaaagggcaggtccggaggccttgaggtgggaccgactgaggagcctgg

SEQ ID NO: 60411 - DNA, 958 bp, Bovine  19866881015524
  misc_feature (1)..(1): n is a, c, g, or t
natgcctgcccctagctctagagctcctgactccaccttgagttcttcaaggcttccccttgtcacctacccctgggccctactcccttggggccctcctttcctcgttggaccaggatgtctcaggcctggttccttcaagtccatggctctgccagtgcctacttagcctccatctttgctctgcttccctctagccccagcatggctcctcctccctccttgtgccaggccatccactcaggtacactggtttcctgggaagcagggtggcatgctggaaagaattctagaccgggagtctagggacctgattctagtctcttgtctgccattgctagctgtgtgactttcaacaagccactcaacctctctgagcctctgcatctacctctgagaaagagagatatgagaatcttccctgaaaggttactgtgaggctcctacgtgatgatgtgtgaaagaacttagaaaactgtaaagtactcctgacgctaccgggagaaggggggactgcctggtgggcacaaaccaggtggggatgcacccaggggagaagtggggagctccatttggaagggccagagcctcagggcagacacacccacatgcacgtgtgtgggagcatgcacacacgtgtacacagccaggagaagaggcccacagcccgttggcggctagttaaatccggctgcgtgtaggtggtttcccgctatagctgagtgtggcaggcagaggagcacacggggagactgctctccacctccccactcaagggggtctggggacacagggtgggactccctctccctgggccatagaagacctagtatctgccggctgggtgcagagctgaccactgagggcgcctccaggcagttctaggactctctgcctccaagtccgccccgcagcctctacctcctcattctggcttgctacgttccccctaaatgtt

SEQ ID NO: 60412 - DNA, 1076 bp, Bovine  19866881089666
  misc_feature (1)..(1): n is a, c, g, or t
nttactcagcttctccatcccaggcagccaccaagcccctcccacctctctttgatgccagcgtctccctattgcccagccagcttcccaaaccggtgagaccgagttccagtgagtcccagcgtgggccctctggggccctgcagttcattcttccaaaccccacccagcccagacgccctcgccctcgcctcctccacatctctatctccctgggccctctccttacccggcccccaactccccagccgggcacctcagccgtactaccaagtgtaacataatggctataaggttagagacgcggccaaaaggccagtggggatgatgaccttacacaatagggccagactcagatgccacagaggtgtcctggacccagaaagcccccatcctgaagagagaatcactgctgcaatgtgtcaaatacctactgtgtgcctggctcttggcaggttctttactgcctcagaacagtcttgcaggggcttcccaggcagctcagtggtaaagaatctagctgcaagtcacaggttcaattcctggtcggaagatcttacgtgccacagaacaaccaagtctctgtgccaaaactactgagcctgtgccctagagctggtgctccgaaacgagggaagccaacacagtgagaaggccgagcactgcagtgaagagtagcacattgcaactagagaaagcccgcacagcaatgaaaatgcagaacataccaaaaaaaaaaagtcttgcaacatagatatcaattcccttctgctacaggcgaggccaaagagtgagaagcaacctgcccaaaattcccctgggagagggggggtgactgagctgggtttgaaacttttctccctaaatccatgttgctcagagaagggagctagagaaggaaccctctggtctctctatccctttaggctgtcagctgagggaggcagagagttccagaagggagagaggaaggagagaggggtagggaggaagggaggaaggggggaggaagtagaccatccagcctcactcttgggcctgattccatagctgggtcccacctcccacagtcagct

SEQ ID NO: 60413 - DNA, 1208 bp, Bovine  19866881127934
  misc_feature (1)..(1): n is a, c, g, or t
naaggctttggatgaatatttgttgcatgcctattttctagcttctggtggcttattggcactttttggcatgtagatccatcatctatctctgccttcatgttcacatggattctcctcgtgtgcatttgtgtccaaatcccccctttttataaggacatgtcatattggattagaggctcaccctactccagtatgatagttttttttttcagtatgactgaattttaactaatttcatccacaaagactatttccaaataaggtcatgttctgaagtgctgggggttaggacttcaaatgtaaatggggaagggggaggggttgcacaattcaacttgtcacaggtgtgttccgttgaaattgctggaaaaatcttgcctcatccctgcttaagaacttctcctgactctcagcgacctacagaataaagtgcaaagcctgatgatctctgagggctttcacaatctgggctgcacaagcctaattgccgccccttcagtgcctcaccgctcccccaaacgccctgtaccacactgtagccctgtggaagattcctgttgaacttcacattccctgccttttcggcgggcgcggctccctccttcccagccgcatcccgctcctctgcttgcactttcctccgcgtttctcaggaaaggcctggcgattcagaatgactggtggagcaccgaggaccgtgtctgcccccattctcccctcctagcactcacatatgcggttctcaccgctctccagggccttgcacagtttcttgccctaagagcgcccacccgagaagtggttcaaagactcccaaaccaaactccaggttttccggctctttacggttcgaaagactctcacgccccctggagggcgggacgcgaccgcacagggacagagagcagccacactaacagactttattcccctttttcctgcgagctgacactttttttttttttacccctgcaggggtgagggaggggccagggtagggccaggactggacccgagcgagagctcagaccccggaccgtcccccaggagccacggacgaggcggcctcagagggacaccggcggccggagcaggggcgcagcgctggctctgcgcctgcgcggcggcccatggtcaggatgcctgccgcgtggttgccgctggcctgcaggaggcgctgcagccggccctggagacccgggggc

SEQ ID NO: 60414 - DNA, 475 bp, Bovine  19866881144599
  misc_feature (1)..(1): n is a, c, g, or t
ncatgcccagggtcttgtagacccaccacacattttcccaggatcccttctctccctactcacttggagtcctcgctgtccagcagcccacggtaggtgttgatctcacactccagccgggcccgcacgtccagcagcacctggtactcctggttctgccgctccaggtcactcctgatctccgccagctgtgactccacgttgccgatcaggccctgcacctgggccagctgggagctgtagcgggcctctgtctccgtcagggtgttctccagggagtctctctgtcagagggaaggggaggaaagtcacagagctgctccttcaggggcttctccatcgcttccaaacaagtcaccagctccaagggttcaggagagggtggtccggagggcatcccagtgcccctgactccccaacctcacctcctcaccaggagtctcatcagtacccaccaggttgtgctgggcctgaa

SEQ ID NO: 60415 - DNA, 1140 bp, Bovine  19866881169452
  misc_feature (1)..(1): n is a, c, g, or t
ncataagttttggaattgagggaaaaaactaatgaatgaaactaggtaattcaagattctcaagaacttaaattatgctcctgtgtattggtgtccataggctaattaaggtgggcatggttagtattttttgatgtctgttctcagatgtctccccctgctttctggcatcttcccttgttagatactggtcctctcattgactgacttcttcctcatcttatttaagaagatatacattcaagaactttgatctttcatcttttgaaacttcctgtgttttctttgaaagtcacttaccttggttgtctgtgactctaggagactctagaacaaaatttgaatgtccttgatcttcagacacactcagaggatcagaagctttatggcctcttctattcctcaaacaaagtgtcctgttgttcaataacccctggaaaagggcagccagccagcttccaggctatgctaacgaagatgctaccttgaccccactcctaagatgaatgaattcaccacgagggcccctgaggcagcagtacatattttgctgttgtttagtcactcaatcttgtctgactcttgggcaacccctgtggactgtagcccatcaggctctttctgactgtgggacttcccaggcaagaatactggaataagttatcatttccttttccaggggatcttcccaacccagagacccaacccgcctctcctgcattggcaggcacgtttttaaccactgagccaccagggaactttaaaacatggactctccaagcccaaagagatctcaaagtcctctagtctaggagcctttagcattgtgtgtgtatgtgtgtgtgttttttatgtgtgttagttgcttagtcgtgtccgactttttgcaaccccatagaccacagcccaccaggcccctctgtccatgggattctccaagcaagaacactggactgggttgccattcccttctccaaaaggaattatagaaagaaagaaagtgaagtcgctcagtcgtgtctcactctttgtgacaccatggactgtagcctaccaggctcctccatccatggaagtttccaggcaagagtactggagtgggttgccatttccttttcctcctttagcattctgctgctg

SEQ ID NO: 60416 - DNA, 1231 bp, Bovine  19866881174093
  misc_feature (1)..(1): n is a, c, g, or t
ncttcaaaatgctttcaaaatgtagacattcagtgtggccatggaaaggtgtacaactgggtctatgaagctctgactacaaaatgtacagaagtcctaaggaaaaatacaaattcagcattaaggaaagaaccgcctatagttttgatatcacagacatattctttcttttacatgtgttgcaaacttgaagtaacagtaagcagcatttcaacactaatgataaataagtagcacagggattttgttaaacaatcacttatttaaattttgtatttttacttttaaaaggtgcaataaacacattgccattttgaaaaagacccaaagaaaagtggtaatatctaatgcatggattgaaccctacgtattatcactatttacctaaacagtaattatttgtacatcaaaggaacagactgctttggaaaataaccccaaggttcaccttctgagttaccgctaaggaatttatgaagcaatgttctgttaaaattaaagcacttaaaaatctttcggagattgaaaacaatatattccagctaagagttagaaacaaaacccattatattccaacagtgggtagatttttaaaacactcacttgatttcagaaaaatagttttataaaactaccacgataccttttcagactcacctaagaatttttaattcatttggcagaagatcttcgggatgaaaccagcgtgtggcagcagcgctactttcccgtgcgcaggggcctccctggcactccagtggctaagactgcacttccactgcaggaagcgcctgagttggatcactgagccgggaactaaaatcccacatgccgagtggccaaaaaaaaagttgtactttcatggacacaaaggggactaaaactgaatcttgctctaacactatgatccacagtggggagtttgaaacaaggcagggatatcttgaatcccttccagaactacctgacgactgatttgtacaattctcctattaacttgtgctacagtcagggtctggtgaattagaactttggttttgttgaatagcagagaccacacaagtgtgtcatgaaacaaaaatcccttctctgttagttgtagttgtccgatcgcataacacagagctatttatgggacaagttagttagccaacaatgaggtgtggggtggctgccagttacctattttagatttgtgctatgctatagaacatttgcgcagtgtacaact

SEQ ID NO: 60417 - DNA, 1130 bp, Bovine  19866881174690
  misc_feature (1)..(1): n is a, c, g, or t
ncttgttgagaaaagagagaaatacactgggaggtgtgattagcaagaaagcaaagaggaagagagagggagcatcttggaggatgatttaaaaaataacccgtgcattcgagatttcaagcagaatcttaatccatggactgttttccttgggacttggggccactactcccatttaaggcagagcgagtagtggtgtcagtcgctcagttgtgtccaactcttagtgaccccataaactgtagcccaccaggcttctctgtccatgggattctgcaggcaagaatactggagtaggttgccattcccttctccaggggatcttcctgacccagggattgaacccagatctcctgcattgcaggcagattctttaccatttgagctacagggaatccccaaaggactgttctagagcctcttaaaacatcaaacatagagttggttctctctctgtatcccctactcattgctctgggcagatcacttctgccttctctgattccatttctcagtctgtaaaatgaaggatcagcagattcagaaccataagactttaagccaaagccatgagactatgaaaggtattctttaaattgagtttttatgttgtcaataaatgaaggtgttagtatgctagagacagaagtattaacaatgaaaaattacccaacacccagaactggctcctgttggagaggtggaaatggtcgtgatggaattcagataacctcagggccctgggatttctgaagttcagaacacttagagaatcttccaatctttccttcttaaatgtgaatagacgtctattgccattattgctttgtccccacttctcccaaatttagatcaccagtatttataaagtttaccagtcacaaatagattcttgcatttcccatccctttttatagggacctctttcagttcagtatgcttttactggcactgactttggttttctttacagcagcagctgctaattactgacagcttttgagcaagcagcttgtcatttttggcagggatagggaccatccatagcaattcaagactatattttcatttgctaaatttactttgctacatgaaaatacatctagagttaaaacatagtctgtagtcag

SEQ ID NO: 60418 - DNA, 860 bp, Bovine  19866881271384
  misc_feature (1)..(1): n is a, c, g, or t
ncagagatagttaccaagggggttgatctcgaggtaggtgaagtacagatcctcatagaaattgaagaggccggagataaagctggccagaattctagagggggaggcagagagggactgtcagtccacgagggagcagactcagcagcatctctcactgctattgacaggctccactccccagcaaccgctgttgctgaccctccctctgctcgccaaaccctgctccccggatgtcactcttcagccactgaggcggaaagaggttgtcaggcatggagcaggaggggggcccacaccagacagacaggggcaaggaggtgagggatgctgacagacatttcagtctgagccagcctccccactgcccccgcattcctcctgggggcggggaggggctgggactgctggctgctccccatcttccagccaaaggctggggcggggtagccagtgcccagacagggaagaccactccgcttgccccctgtacccagagctgtcggccttccccgttcctataccaccaccaccctgccatccctctcactcaactctttcttgtcttcgggggcgtggaccagcaggtgtttcttgatgtcctcaggattcagcttctcatcgacgccgacaagtagtttctgggctttagcatccacgtcgcccacgtccaccccaccctcgtggtggaacaggacatagtccccttctcgggtagcatagatgcagacgtagaactcttcctccttacgagggaagagggcaaaatatgggtgaggggcccagccccagtagtatcatttctaaaatcccacagacacctcctactgggtgagacctcaaggacaagaggccactgc

SEQ ID NO: 60419 - DNA, 1027 bp, Bovine  19866881328293
  misc_feature (1)..(1): n is a, c, g, or t
nattgcagagaattaagttgagatccccaggtaacaccttctgggttcttaatgtgttcattttttgtagcccaaggaattcccacgcatgccagaaagtgctgatttctcctagcttttccgagagatggcccatactgacatctgatccttgtccactgctgaggacttaggtgtgtgaaatggctgctgtctcagaccaaactgggaggttctttgttatgtggccaaagtacaggcctgagactgtaccttaatgagtgcagcctgactctgaaggccatgactgacccttgctatctacagtggaggaagggagggaggcatgcaatctttgggaatttctgaagctcttcagtgttctgggccatctttactgcccttggatgctccttacaagtattccagttgttttgccttgagatctttttgacctcttttggacagtgtctgactcctgcgaactttcgagctagacctaggatgcacttatttcattttttattgaacaacaaaaaaaccttgttagtgtcaacagtcaggtcacaagctctctctctgtctctctgaacttctttggaggttgctggagacttctatgaccaacctagtttctctagtctggccagtctgtgttcctgaggggcaaagtcagagaagctggctgcttgctggccattggtctctgaccaaacttacctcctcagtattggggtgtagtttctggaactctgggagtcccaggatgaggctggctagctttctgaggggaccttctttgtccgggcttggtctcccagctctgattctaaagcaggcttctgaaggagaagctctccctttcagagacaggaaggcattagtgccctgggttaggcaggcacttctgtcatccagagatgatagagtcccagcagagatctgacactgcttggcagagaaagggagggctgtgtgtgcgacagaagcccatcccctctgatgccctttggctcctgtcttgcctctgacaaacagtaggcctttt

SEQ ID NO: 60420 - DNA, 1101 bp, Bovine  19866881393928
  misc_feature (1)..(1): n is a, c, g, or t
ncacaggcggtcggggttctgccccagctcccacgagctgttcccataccagacatcctccatggttctcagcacacagaggtcctggagggaggggtctgggatcacaggttcggggggccttggctggtgctttgggctcctttctgagactctgtgggggtactgctccatcttcccagagtatgagagcccagcagaagcctcatcccgtgagacagctcatacaccaccccaaaagagagagcaagcggaagggctcgctcaagagcgagaagattgtccgccagctcctgggtgaactctacgtggacaaggagtacctggagaagctcctgttggacgaaggtgtcggacactttgtttgcagcagggaactcagggcaaagaaaacctggggtggatgcttaacacatgaaccagagacaaagcctataaaatgatatttgctgacatgttcctctggacatgttccactactgttctcactttacagatgaggatactgagtcatggggaggttacataactcagtgatgcggttctcagattggaagccaagaagtccagtttcagaaccagtggtcttaagtactctggtaccctgggtgggaacgctagagatctgggtttctttaccaccttggtccctgaaggggcacccccctgagccttgagtgtgtaccaagggcaaaggaatccagctcagaggtgctcacaagggactcccaggactgtggaattagaatgtcctaaaatctcatctgttatcagtaaggaaagagagaccctgaatggggagtaacttgtccaaggtgacaagcaagttagtggtggagttgacagcagcgcccaggcctcctaagctccagttccacactcttcccgccgcaccacactggcaggaacaagaaataggaaggcaccttgaagtgaatgtctcgtatgaacactggtggtgtgagtgttgccattagctgttgagcctgcacagggatcactctcaaatccaagggcttttctccagaactgacttcccaaggtcctctataggattccccgcaggttgcatctcaggggcaacttcacggcggcccgcct

SEQ ID NO: 60421 - DNA, 1141 bp, Bovine  19866881466844
  misc_feature (1)..(1): n is a, c, g, or t
nataatatcccctttatagtttaagggaataacaagctttttttgtttttttgtttgtccatcctcatacaaccctagcatggtctttgattattcattcctgcaactgtgaaccaaagagaaatctacctaggggccttattcttgacacaaagcttcttcgtgtaacaaaaaatggccctgtgaatgttttttgttgctatttgtttttacttagctgttacactaaaaatttggttgaagctaagatttttgagctaagccagggacctttcgtcttggaggtggagggtgatcttgagcagagtacctgcttgcatcagacacctttactggatgacattgtccttttggagcaaaagaggttacttaaccctgagtgtgcacatctatatctgcagttataagccaccacatggctccttttttctgtgccatgtctcttgacggggagaagaatcttcctcagcaggaaaccacacgtgcaggtgctggccagggtgggctgggcgggtgatctgggttctgtgactcagcagagctctgtggtcactcagcctgtcctcctccctgaccgaagtttccaccccggtaggttggtggcatcaagcccgggtgctttaagatcgggaacaccggcgggatgctggacaacatcctggcctctaagctgtaccgcccaggcagtgtggcctatgtctcgcgttcgggtggcatgtccaacgagctcaacaatatcatctctcgaaccacagatggcgtctacgagggcgtggccattggtggggacaggtgatcttttttaactttttattttgtgttgggatatagccaatggtggctcaaatggtaaagaatctgcctgcaatgccagagacccaggttcgatctctgatttgggaagctcacctggaaaagagaatggatatccacttcagtattctcacctggagaattccatagacggaagaacctggcaggctacagtccatggggtcacaaagagttggacatgactgagcaactaacacttccactttcatagccagttaacagtgttgtgatagtttcaggtgaacatcgaaggaactcaggcatacgtattcatgtatccattctccccccagactcctctcccatc

SEQ ID NO: 60422 - DNA, 1505 bp, Bovine  19866881512299
  misc_feature (1)..(1): n is a, c, g, or t
nctcattcatttccccactgtgctcgcctggcaaccaccagtctgctgtttctaggagttcagtttttgtagattccacaagtaagtgaggtcagacagcattttcttctgtctgacttatttcacttagcataatgccctcaaggttcatctacactgttcatccacataaaaagaaggaatggatttccttctttttatggctaaacaatattccattattacagagctctctcacatgttcttcactgatttgttaaaaataactttcttttcttgtttacaaaagtatttcctatttattgttgttgtttagttgctaaattctgtccaactcttttgcgaccctaaggacttcagcatgccaggcttctctgtccatggaattttccaggcaagaatactgtagtgggttgccatttccttctccagggttcttatttattatcacctatttattgtagaaaaatgggaagctactagaaagtggacacatacacccagaatcccacaactcagaagaaatcttttttcagtgcctattcttatgctgggcctatatatttcttttaggagttatttcctaaaagctactgttttaatatttgtcctgttgaaatttaccaatataacaggaatatgttctgtcccaactagacctcttacacttaaggaataaaacttcaaaaccataaattttgatgatgtcacatttctgggacacaatttaaaatacatgattaaggtaataagttatcttatggacccattcctttaaaattaggcattttactctggtattgcaaaatcaaaggattatgctgcattacaattcagcatgttcactgcagccatgtccttcaggaagccaaacattttctattttgctttggtaccttaaacagttaaggaggaaggccaatctctattacacattacgatgcattagtatttttacttgatgtttaaactcactgaagaataaactcatctttaaaatatgctcacattcagggtttaatatatcattacacaattgaaacgataacagtaaaagaacaaggaatatttgcactacattcctgtgcattggaccttctgtatcttctggagtaagactctacaaagttcaattctgaccagcactctctcttactttctaccagaaacatcacaaatcctaaaaacacaaacccacaggctgaagtgactgtttcattctgtaaagagctatatatttctgtagataccttggttgctacttttttcaagcctaaaagatgaccaaatgatttttagaaacacgaaacaaaaggaaaaatagaatcagcattatttctgagagaatatttttgcctagtttaaaccatgaatatattacatatatataatatatatatatataatgctatatcatgaagctgataaatcctaatttttagtactctaacaaattaagtactcaacagtttcttttctttttttctgctacaatgatattttaa

SEQ ID NO: 60423 - DNA, 1154 bp, Bovine  19866881680307
  misc_feature (1)..(1): n is a, c, g, or t
ngacagggcatgcttgctctagctttaaggaatttgggtcagtaaaagcttggaaagtaagaaccggaaagtaaatgtccttggccccttcccccatactccctgagggaagtgatgaactaggaaaatactagacatcccacctcaggtatctgaaaccttcatcttcccgggactcaacggagaacttcatccttacgccccctagcggcagattgcagtcgcaggctgatgctcctggcagtcacaaacaccctgggtccatagaggccaaattatggcccctcacctgtctccatatttattgatgaggtgagatgggtgcagagcggggaggaaggacctgcagcgttaccactccgcccagggaaatctggaccctaattctgtgattcattcaacaagaaatgtttattgagcacccactgccagtgtgccaggaaccaaccacgggactcctggtccagtgctcttcatgatgccagttgcctctctgctgtgtgtgcagttcaggctgagacccaactcaggagagctggaatcttctccaggagactgtccccactgggtggggaggacactgggaggagggcaggccttcagcagctgcaataccaccatcctgtggtccagagacccagagaggaggcaggaggggtctggggagcagtgctcacaggtgggacaggatggggcctggtcagctctgtccattttccatgtttaataaatagttcttgttggacccaggcttcccaagctcttgaggggtgcaggggggcgtcttctcatggtaattcaggttctggctctgaaaaatgaaaggagagggcattggggttagccttcccattgtcaacaggcatctgggtgctgtcctggggacaggtggtgcgggcaggagcgagggtcctcaggaacaggttcctgcttcaggaaggatgctcccccaccccttgaccaggtgggacaggggttgctaacaggccggaagtccccaaagaaggagtgccagcaccctctgcagtccagtcctcagagccttctgtccttcacctccagcccaggctgtaccacccatccaccaggactagtcactgaccagcctcagcctcgtcgcccttggcatctggctcctgccaccagtcagcata

SEQ ID NO: 60424 - DNA, 775 bp, Bovine  19866881742396
  misc_feature (1)..(1): n is a, c, g, or t
ngttagagacccaaatttcatcctatatactttcctgtactgttaaaaatttctgatgtgcacgtgtttaaataaaaaaagtttttttttactgttttgttaaaaagtcagtttatagaaaaagtaagctgaagcttctgctatctacacacacacacatccaaccctgatgaacacagaaggcagagcggcggacgacactccctttaggctgtgctcgagccgtgaggggactcaagacagcagctcccctaccaccagccgtggcagtccttcgcaaagcccgagcagcctggggaagcctagtggagccagcttgtcctcccaccaagtctgctctgtcccccacctggaactccacggctctcttgctggccaggtccgccttgttgcccgcaagcgcgatgacgatgttggggctggcctgcctctgtaactccttcacccagttcttggcccgtgcaaaggtatcctggggaaacagggccagagcgtcagcaggacagggtgggccttctgtccagggccgctcactggagaggctggagctgacagtgcccaggtgtctaagatgtcaccaccctaaagattctggagagatgcccgccaacaccagaggaaatgtgcccacaccccaaacaggaataaagggtggagaagcaagagaaaatctttactgtgttgggtgatgtcgtagaccacgatggcagcctgggccccccgatagtacatgggggccaggctgtgataccgctcctgtccagctgtgtcccag

SEQ ID NO: 60425 - DNA, 1202 bp, Bovine  19866881944128
  misc_feature (1)..(1): n is a, c, g, or t
nagttttgtatcaaactaaaaaaaagacacgctgttggatggaaaagttctgtatcttgatttaggaggtagacacatgaatgtctgtcgttcagttgctaaatcgtgttcaactcttctgcattccctgcagcctggggctgcaggctacagtccatgggcaagagcttaggctgtagcccacaacccacaaggtcacggagagtccgatgcaacttagcaactacacagcagctgcagcaggacggaagcccaccaggctctcctctgtccaagggattctccaggcaagagtactggagtgggctgccatttccttctccaggggatcttcccaacccagggatcaaacctgcatctcctgcattggcaggtggattctttaccactgagccaccaggcacacccacgtggatgtctacgcaagcaaaaatgcacttgagacttgtaagtttcactgtatataagttacatgttaatgaaaagattaaaaatgctgctggtacagaattttgcatatagtaatgaaaacttaaagcttagaaacatgagaccaatctaactcccctgtagataaaatattttatattttagtattacaaaaggcagagtaaagacaatccaaaaaatgttgtctgaattagaaaaagatcaaaagagagcaaagatacccaaacgaacaaggggcgagatagcaggattcaacataaacaaatatgcctgctgtatacatattaagaatatacttatggttcatacttaattgtgggttaaagaattttaaggttgtttaaagcttcagggaaaagctgacgctgatgtcttttcagtgcggagaaagaggttacagcggggagactctctgcactccccaagcagtccagagggaaaagggtttaggggtggactcaaagagaggcatgtcctccctgcgtgaccactggcaactgtgtggaatcactacaccgagggcctgagtctcatctggagtgtgtaacagaggaagctgggccttggaagccagaagcttagcagtgcacgtaggttgagatctgggcagaatgtgatggtgtgtcaggccagggctgcagtctcatcccacaaggaaggaaggggcttgggagagatggaagcaggaggagagggaaggggcgctgcctttacagtcacagcacgtgactccctatccaggggaaagggag

SEQ ID NO: 60426 - DNA, 855 bp, Bovine  19866880553210
  misc_feature (1)..(1): n is a, c, g, or t
natataaacatgcatggattgtctgagtttttaaatctcaatgcagtaaatgagtttcaagacagaagaaaacagtagagggagctttatgctcaagcagctaaaaggctgcaaagcaactgcacacagtgcctgggtaggagagaaaaatccttaacaaggtcaaatttcaaatctgcatgtggaactgttcatccttgtgcctgacaccacctatgcaagctaatactaaaaaaaagagagactgactcaacattttatatcagaggattagaaattcactggtttctaatatttccacttagagtttccaactgtacttggtatgcgatacattttcggtgccatgcatgctaagtcgctgtcacgtcccactcttggcgatccgatggactgcagcccaccaggctcccttgtccacgggattctccaggcaagaacactggagtgggctgccacttcctccttcagggccattttctatgatgcctactctaactgttgataagattagttattggttgtaaatattttactactttcatctcatacaagacaaataatgaagtcaattttcagtattaaattctgattcgattacttttatctatttgatttcataaacatattgagggttttattcctgatagaattatgatgcaaaatatctcaaatgaaataattttaaagtgctctgaaatccttcactttcatgtgaaaaagaaagaagcaacctaatattacaaactaatatttcttggtatcaatgcaaaaccaccattgtatggaattaactggttagtctcagttccacttttttaataaagcaaaccccaatgcttacattcttaggaa

SEQ ID NO: 60427 - DNA, 1004 bp, Bovine  19866880718001
  misc_feature (1)..(1): n is a, c, g, or t
nttggtagtttctgcccaaccactcaacgctgctgttatagcatgaatgcagtggtagacaacagataaatgagtgggcatgaatgtggcccaatgaaattttatttatggacactgaaagttgaactttatgtaatttcatgtgttgtgaaatactgttcttttgatttttttctttaatcataataaaatataaaaaccattcttaggttcactggccatcaaaataggtacagctgcccccctaaactaaagcctataatacattgagaatagtacctgtaaagctctaaatgctcaaaaagtgtttgctgctattattattgttgttgttattattaacacatccagcatcattctctggacccctcccctattcgtgttgccttcatcccccattctgatagcaagatggcgaccagagttcaaggtagggcatccagaggaaaacaaaactctctccagtcataaattgttaggagaaaggagacgtttccccatactcaaggtctcagtcgttagaatggggtcacgtggtccctacggaaccaatcactggcaagaagagggactactctttgaccaatcaggcccacccctgcagctggggggtggagtcacttcgccctgagtcacgttctgaatggggacaaggcgaatgcctgaccccaacagatcttttgttaggacacagcaaagtaggacaaggacactgggtaggcaaccagcacagcctatgccacccactctttcaaatccccatgaatttatgacaagcagaggacccgctaatctggtttatatataacgtcttataacaagagcaagtcttttaaagatttgagctggagaacattggctctactgacctttaagtctttttaaatagccactgtggtcataactcattggatcataagcattccaaacaactttatggcctttttgagtttactacacaccctccctgtcagatgcctcatttgaccttcacagttctctga

SEQ ID NO: 60428 - DNA, 1007 bp, Bovine  19866880719794
  misc_feature (1)..(1): n is a, c, g, or t
ncattgaatcaccagggaagcccaaatgttccccttgtctgacctcaaaagggaaacatcattgtccaagcatctctttgtttttaaatcataattgtaatatgtgcctccttacatttaagccctatttttggcttactaactttgcaagataagaaaagggaatctcaccccgccccccaattaaaaaaaatgattgagtcaattgagtgtacctaaggagtattacgcaaccattagctttaatgcttatgaaaactttgcaatgccttgagaacactctgaagatagagtgttaaaggatagaagcaggacacaaaattacatatagataatgagatcaggaccatagaaaagattggcaatcaagaaaccaaagtgttaacccatttgcttctgggttgtgcagtcatgagtggttttttcccccagcttttttatatgttttccttatattttccagtctgtctccaatactcatttttatgatcagagaaaaacataaagtaaaagccagaagaaaactgggttgttatgcaggctagggtttcttattatatagacaggtccaggcaataaaggactaagtgaggcaaaccagaactgtttgcagagtgaaaggatgaaaaccacaacttgaaggatgctcgtcctccaggggtaggtgtgcagcctcggcacggttggctgatgaggaaatggacagattcctccagctacggagtcagaaactcacaagccgtgtggcttcgagcaaatgaaccactccgaccttcaatttcttcatctgttacatgagaataataatgcctagtatataggattgaaatgttttcaattacatatttttattgagttcttaccgtcgtaggagctaatgatgcaatagtgagcaaagaaacaaagtccttgttctccgccggcacattcattctagtggagggtaagggtgaattttgtcctggggcagacaatagcttagcgctttataccagagagtgttctta

SEQ ID NO: 60429 - DNA, 1966 bp, Bovine  19866880744339
  misc_feature (1)..(1): n is a, c, g, or t
nctgcagctttgggtgtcatttggaaaagagcaaatttataatgcaccttccgtttgacctagcaattctgcacagatgtgtaaagacctatagagcaaggatgtgaactaaagcctctttgtagaaagcaacttccatgtccatcatttggggagtagtgaacagtataatttaattccatgcagctgttaaaaataatgagttagcactatgtatacttatacagaataatctcaaaaagagattattaattgagatatccctggaaggttgcaccagagataatggtaatatcagttttctctggggatagagagaatagggagaaaaatcacttttcactgttttgcatttttttagccaaatgtgtatattacctattcaatacagtaagttttaaacaacacaaatcaatagataaaattgaaatcaaattttggaatcaaataaaaataaatagaaagcaaataaagcaaattgggagggaaaaaaaaaagagaaaacctcatctagggagagctcttcggctgtcaaagcaaaagccccagagtggaaaagaaaaggccagaagtgcagtgtgcaattgcctcagcaacatgagtaacagaatgaggacccaagagaactgggttctagtctcaagtgggcccctgagcagccctgttatcttagacaaaccacccgacctctctgggcgtttcctcctgtgtgaaaaggcagcccaggtgatcctccatgctaagtcatttctagcaatgaaaccctttgactctgcactgtagagatgactgataaatatctgcagagcccttaatagagaaagcaatgggagttgatggatagcttcaggagataaaatcaaaacaaaaaaaaaagccatgctggcgactaggcagcagcaagacaccaggcacttctgagtccagttccccatgtggggggctcataagaagcatcctcgttcatgacgttcatgagtttccctctttgtgaaaatgcctaactgcccaggcaggaaatggatgggcccctctgcacaagtctcaggtcctattctaagaatgacaggttagttccctttcatggttaccaaatgtcatggcagagagaaaatggaagcaaaaacctgaccggaggaggaaccaccctgttagaaagaccacaggaagccgccacagctgcagggtgggagtattttgtaggagttaagaagacggcttcagagtaagacacacctgggttgcagtctctgctctgtcatgtgctagctgtgcagccttaagcaggtcacttaacccctgttccatgagttgacctcccagagcgatagcacagagagagatctgagcacagtgatcaataaatcacaacaatcacaagtcacttgtctatcctagtacaacggaaggtagcatccagtcacctcacttggaggttttttcccttcaaccttagtttcattggatgtagtttatcgtaaataacaaaagtaacaaaatgctagctgtaacaggttaaacagcatgggagcatgccaaggaaaatctttaccactaagatcaccaaactcaaccaaattattaggagtccttatttggcttcctccaagatcataccaaatcatattggttggcccaataaagttccttcagtttttaagtaaaaataaaagacacatttttcattttctccaagaactttattgaacaaagatataagcatctgaatgcagagttccaaagaatagcaagaagagataagaaagccttcttcagcccccaatgaaaagaaatagaggaaaacaacagaatgggaaagactagagatctcttcaagaaaattagagataccaagggaacatttcatgcaaagatgggctcgataaaggaccaaaattgtatggacctaacagaagcagaagatattaagaagaggtggcaagaatacacagaagaactgtacaaa

SEQ ID NO: 60430 - DNA, 571 bp, Bovine  19866880897785
  misc_feature (1)..(1): n is a, c, g, or t
nttgtgggaatggtgtgtctgtattgtccagataacatctctgccctggagagttgtgattgggcgactcgggcgtctaggccatggggaactcaaagattgtattaaatctttagattgcatttggtagtatagtcattttcacaatattgattcttcttacccaggaacatgaaatatctctccatctgtttatgtcatctttgatttctttcatttgtgtcttataattttctttatatagttcttttgtctccttaggtaagtttattcctagatatttaattactttttgttgcaatggtgaatgggatatactccttaactgctctctctgatttttcattgttcgtatgttgaaatgcaagtgatttctgtgtattgattttgtatccttcaactttgctaaacttactgattagctctagtaattttctgatattatttttaaggttttctatgtacagtatcatgtaatctgcaaacagtgacagctttacttcttttccaatctggattcattttatttcattttcttctcgattgttgtaactaggacctccagaactat

SEQ ID NO: 60431 - DNA, 1535 bp, Bovine  19866880974183
  misc_feature (1)..(1): n is a, c, g, or t
natttctttcccttttgaatgtatacttgctacagtcctaacaagatgcgattttcatgtattacattatcttgtaatacatgattatgattagtttgtttatatccccttgacaaaaaggaaaggtcactctaccaggaattagttcatgtcattaatacctaatgagacaccatcataaaattctgttttgtctggtaattacagggttgcaacagttgccctgggcatcttactctgcttggaaccagatttaccaagtcccaccacttcacttgaaattctcaggtcaactttaaaaaagattttttttttggcacttaactgcttctagtcagaacaaagtaataaagcaggtaagaataaaagttgaggaagaaagcttggcaagactgaagtcctgatttttctctgttaaggttattttcctcagtgaacattagttaccaaggaagatgcagatgcagacagacactgggtcagtctcacttttttctttttaaggcaagcagggaggtgtggaaagaatgttttagttatctagaaacagcgtttgtccgggctgcaacttggtgctctgctcaggttggagtctaagcaggtgtgtcgcggtgcgtttaaaatcacccacacctcagaacaggcagacacgctgaaattataacagcccctttcagcatctctctggccagtgctccctattttatgtctttgtctccttgcttgcaaattaagcaggtttcaatttacctgtttcataaaaccacatgatattcaggagaactggccctgccagagctaaagtgagagggctgacttggaaatgtttgctgtggaagggtcatccatttaacatgtaagatggtccttgtcttaattaatttgagctcccaacacttttcagaaagcatttacaagttagcttctcttatttaaatcttactttgtttacttagaggcttgatggagctcttactaatttatgttatttaatatataaaattatttactatctgcctcctttaagtgtgtgatttttaattgtagaagagaatgtttatgtagttctatctatgtgcacacaccaggttttgttttttttttcctgttgacctcttatcactacaaaacttaggaatttatctccctatcaggtctaggaatcaaggtcattttttttctcatgggatgaactaatgactttccagtcatttctgtgaacaggagagtttacttaaaatgacaaaaacgacctcagattgggctgactatatactaatgctgtgagtaggcacacgggaaacgtttgttgaaagggtggaatgaatacacatcaaaactgaaatttaccagcaaattcaccacctgctgctgctttttggaggagcagaaaatatatattttatatactagaaaatagaagaactccttttatttttctgttattgatttaggttttctatttcttatgccaattttggaaattgaatttttacagggaaaaaatgagttttccaacatatactactatgcaa

SEQ ID NO: 60432 - DNA, 1107 bp, Bovine  19866881030540
  misc_feature (1)..(1): n is a, c, g, or t
naattatttcataagcatcatttttcatataccattatacttaatatgtttctctcccctacttgacagagtgtcctgtgaccaaatcacacctggctgaataaaaaccatcagggtgccatagatcacaaagccagaagagatctggtatcaagtgaatagaaaaaagcaaagtcttcccactcacctgtattttaattcctgtttagcagctttattgctcagcaaattgttttctgaggaaaaatttatatgggtccagtaagttaaaagttagattatctcacttggttgtcacagaaatcctaaattagttatgtgaaactaacccattatacagctgaggaaatgaaagcctgtgattaagtaacccatttcaaggtcattacagcaaggaggtggaaagctggtactacagtccaagctttgtgatacttggtttactgctttgtttcatgacactatccccgctctggataatcacagcaaagctaaaatacagaacttagcatagaggcagacagactaaagagccacttttatagttttctctagctctaagagtccacatccaaggtatctatgatagatttggctcctgctgttcctctaaatgactttccagaaaatgcgtttcccaaatccacactttgccattcaaaagtctaaccctaactaatctggcccatgttttctaccgctctcccaaacaaactttcagctccccacagctgcttactgctatgccacatacagcacatgtaaatactcactgctttgtgctcaggctgctatcacattcctatgtacacttgtgctaatcttttgtgttctccaggcaaactgccctaatgactccagctcacagattttagcctattacttatgagatcacattacacgttttattataagtgctctcagttctctacagaagtcagtataaagtggttaaaaccaaagacccagagccagatgccctcctcttccacttacgtgtcttctgggagttcctaacatctctatgcctcagtttccccatgtataaacaggaaatcttagtatagtctctaccacacagtaatgatatgataaaatgagttaata

SEQ ID NO: 60433 - DNA, 1673 bp, Bovine  19866881056202
  misc_feature (1)..(1): n is a, c, g, or t
naatagcaggaataaattgccgataacattccattagtttattagcaggttattttggctttcataatgaagtactatgttactgcattgtatttccccaattaaaaaagatttaaactatagtttctggatgggatgaaattgaggaaattctttgaaagaaattatttcagttctacagactcttgatttctaaatgtaatttatgagttaaataaggaataataatatagaaagttttatgtatagggactttatagtaaataatagataaaaaacggttcaacaggaaatgattacttttttgctgtattttgatacataatgtatttagaaatcttgataggaagaaatgaactttctacccccttaaaaaaaatcaaggattgacagaaatttgtaaatattattagcagatttatttttctgtattgaagcctgtttttagtgttctttatgtgaagaaaacagtcaaaattgtaattttctttttccaggctgaactcacaggaatcaaatggcgtaggtacaattttggagggcacggggactgtggacccataatttcagccccagcccaagatgatccaatcctgttaagtttcatccgctgtctccaagccaacttgctgtgtgtatggcgccgtgatgtcaaaccagattgcaaagagttatggatattctggtggggagacgaacccaatctagtgggtgtaatacatcatgaactacagggtaagttttttgttttttcttaaaaactatctgcattatatatgttttgaatagtggtaaattctgaaaaggttattaagacttgctaagaagaaaaatccaagtatttaatggatttgtgtcaaaggaacctctttactctcacccctcttctttccacccctgtttttttttcagattctttcccattcatactgggactcagtaccttgagagccactctattaaagtatagtgtcccctgggtgtttgggttggaattgaggctaagatctactgtattaaaatgatagtgaaatgtgagttattagagcaagtcagtgaaatgaaaagaattttttttttctttttggactcgtgctgttatagtttttgccagctgagctctggtggaaaattgtaaagtgataatagaaacttagtgcaagccttattggacagaactatgaggtgtcattgcatagtatatttaaagaaagatttatgtaaagaatctactctggttttgatgtagcatgttttcctgtgttttgttcctgctttttatgtaagtaggtgattccaggaattatttgctctaatgctgcctaatgtttaacttcagattacctctgatatctggaaattttgaattagtataagactttgatttttctgagctatcgatactttttgtatttaccaccaatttataaccagaggaaattttattgatattctttgaatttctagtaaaacttttttacctctttccttaaatgttttcgtctagtatgctaaagaatttttctaaatcagggctaattctgatttttagttcggataggtcattaactcttttggacttagtctcctagagccagcatttataacgtctgctgctgctgctgctaagtcgcttcagtcatgtccgactctgtgcgaccccatagatggta

SEQ ID NO: 60434 - DNA, 853 bp, Bovine  19866881317317
  misc_feature (1)..(1): n is a, c, g, or t
nactgcccaaatcttttttgcatttcagttacctttttacctttcttggagtaataaagcataatatgccaaaatattgcttttttcatctttaatacgaaattcacaaaattttcaacacaaaaattccccggttttgaaaagtttttttttttttaaacgcacacttacgtatgacagctgtcacaatccaatccaggaattgttttgaatgattttagagaactaagcactactagagccatcttatggaaagaaaaaaaaccacaccagtaatttattgatctgaagaggataattttgataagccagttttatttaaatggccatgtgaaggtaatgggatcataatatgaagttagtatactgacaacaatcttgtgccctgcactgctattttgttaggcacatagacacatgtaattacctttgtaagtggtatggggtgaattaagtggagcaaccatacggcagaaatgctttggtgatgccatgaattgctgcttgaaagcagtgtagcatagtagttgagtattaggtagcaaataattaagtctgttgaatgtattagctttagcagtcagactgcttacgtgcacagactaccataatcttttatggaacatttaccctctgctggagacagttttaggtacttttagatattatctcagtaagaccctgatgctggggaaagattgagggcaggaggagaaggggacgacagaagatgagatggttcgatggcatcactgactggatggacatgggtttgcgtgaactccaggagttggtgatggacagggaggcctggcgtgctgcggttcatggcgtcgcaaagagttagacacga

SEQ ID NO: 60435 - DNA, 3977 bp, Bovine  19866881455527
  misc_feature (1)..(1): n is a, c, g, or t
ntggagtggattgccgtttccttctccatgcatgaaagtgaaaagtgaaagtgaagtcgctcagtcgtgtccgactcttagcgaccccatggactgcagcccaccaggctcctccgtccatggaattttccaggcaagagtactggagtggggtgccattgccttctccgttataatggctaaattactcttattaatttgtggttgaaaaattttggttagtgtttgaatgttttgttactgcgtatatttaatttttttttataggaaggagtaaaactaattttaatgtatctgaggatctattttaaagcatctaaatttccctaaaggatttcccgccaacttctgcttgacaccttcctggcttttctttacagccacttttttttatctgtgatatctcctgccacaacagccagagggcagtaaaccacagtggactaattgagctgtttactttatggtccatttgttcagctcaaacctttctcccatagttttttagagtatttggtttatatatatataagaatctattctgggtaagattgcttacctagctggttagtcagcaaaatctcagaattatgtacatctcaaagcttattacatgtagtttgcagtgaactcaggtaaaattagttttaaacatctggtttccgtttaatcagagtttttaaaataaaatacctcctaaaagatagcatttatatttgtccatttaagtatcaaagcatatctttttcttctttcacagtattttgcacacatggtagaggaatataacttttttttttttttccatttctttccccttcattttctgtgattgtttctgactcagtctcactctctttctttttccctgttgatcctttatgttttaactttttggtctggtctttactgttagcaacacaaataatcattttataatgaagatgaaaccaagcccaactattacttaagcttatttagttgttgtataaagttatttatccataccaaaaaggcacatggtcagtgtttttagaaataacttgctaagttactgtgttatttctcatgaattttgttactgtgttaacgaaaagatgtagcctgtttgaatattttatagttgctatagattgcctatgtacatttgttcatgttttaagtgttttttgtggtacatatttaagattaaattcttttagatcgttttataaattacagaaatattacactttaattagaaagttaggaaaacagaactgccaaaggaagaaaacaaaaaaaacaagaatcccgaagtctaaagcagagttttaatgtttggtgtttctgtgtataaatgaaagtggtatcatactgttttttaactcagcccttttcacttaacggtgtcttatgaatgttttcgcctgagaatgattgcgttttaattttcttccctattgagtctgaaaacagtgtaaactgtttattttttggtatgtcaccagggaagtattagcgtgatgaaacaatcataactttgttaagtacatctactctttttaacatgttgaaagtgtgaaagttattagatcaaggcaaatgatcttttctgtaggtaaaagtggttgcaaagagtagtttcacgtttcaactaatattaggaaatatatgaaacttaattagaaaaacgagtgacataaagactgctttgtttcaagtgagggagaatatgacatgtagagcaatcatgaaaaaaggataccaggggagtattgtaatggcagtcacacagatttaggatactttcgatctgtttcattctctagtatgtgtaagaatgattccattttgactaaagtaaattttgtcagggtcctttaatattaagataatggtaccattatttgtagcattctctgtttttaagggacattttactgtcctttaaaaaaatgctttttagttatgctattaggcatttacctttgtttttacagttaagcccaaatagcattctactaagaaatgtcacaaagcattgtatttaagtatatgcagaaggagaacaatcctgtaggatacacatagttttatattacattttttgttcaattgcttaaaatacctatgaaatagtctatgagaagactaagatacgtttataactggtctctgtcacttggatgaacacttttgggctcttgttcagggagttgttgtttatattgtatagcatagtggttcagaggtttgggtttgaatccctgcttattgacttgcttgctctgtatctttggtttagttatttaccttattcgtgcttcagtttcctcactctaaactgggttacaagaataaaaaatgtttaagtactcagaaaagcacagagagcaagctaatctagaattgtgactactgctgctacttcagtaccagcaattaactcagacgttaaaatgaaaacattttggcagttggtctatgtggtataacattcactatttgctgatgtttgtcaaatactagttttttaaagtatacttttagattgaagtaatcatttttgagtttgttaatgtcgaataactgagaataataaactgagagcagtgaagatgttcctattcataggaaatttgtctagatagagtctgtaaacagaatttcataacagaccttaaattatgttgtaaagaggtcagaactttaagatttgactctgttggatccctgtaatgtagatttgtaactttactgccttttccacatagaggtatcaaaggacactggctgaatactgaatatacaagtatttccttccttgtttccatctctaagtacctgtatcagcaggtccaattatagggttttgaaatctctacccttgataaattatagtctgaaaaggatataagacaggcacacaaatatgtataatgcagggaacactgtaagtatataagagaaatacagtatattgactgctttccacattagcaaacattcagttccaggtgtgtgctgtgctgagtcgctcattcgtgtccaactctttgcgacctcatggactgtagcccgccaggctcttctgtccatgggattctccaggcaagaatactggagtgggttgccatgtcctcctccaggggatcttcccagccgagggattgaacccagctatcctgcattgcaggcggattctttaccgtctgagccaccagggaagccctcaattccaggactaatgcataaataagtgttctataaagttttcacaagaacactgtaagtcctagtgagaaaccttggtttctggtctgtttatttagtctctattaggcaagagctgtgatcagccctggatgtgtaaaaatgaatcctcatctttaaggagctcacagtcttactggggaagcagctaaatgagtccataatgatgatatagtggagtaagctccaaatgtttaagttagggatctcgcagaagtaccagatgcgacttcagggaaagagatagggagataggggtgaagcccagaggctgtgaggcttgcggtgtcttacaggatacatctgttacataggttgcaatggaatttgccctagtcagagaaagtagcctctgtaaatgggccttcaggcagtgaatgaaccgtggaagaggcaggcttgcccagaacgtgggatatgagtgagatagttgggggaaacaaaaagtggggaggtgggccatagtgtggagttcactgaagcaaggacttaatctgatagattttgaggaattgttacaggtttctgatcaagaaagataattagaaagattatatatacgatattgaatatgggcaggaagaccataatattgtaatattttattctgaattgagttattaaatgtttttagtttaggatacagatttaaattgaaaaataccaatgactatgtactaaactttatattgatagtttttgcccgttttattttattataa

SEQ ID NO: 60436 - DNA, 1347 bp, Bovine  19866881478574
  misc_feature (1)..(1): n is a, c, g, or t
natggcttattgtcttctaggaatgtgacttgaattgattaaatggcataggcaacaacatctgttttgtgaagctagtttagtgtcataaaactttaaatttccaaatttacaacttacaaagagaaaacagtgtatttctcttttgctgtaaaaaattttccactgagttttatgatagcttgttttaaccttattaagcgtttagcttgttttcttgttgttgttcattgtgaaggaaaattaacattgggaatgttggaaacttacagtcttagatgagtaactcttagctttcttaggtcatttatgcatttgagatctgcggaaagctttgggtggtctaggaaaaccacctatgcacatacttctaaaactgtacagttggtgggaggtggagctccctagggcagatcccctgaagtacattgcttcctggttgatgtcctttgtttgacctctgttattaagtacatttatcatgttgttgactgtggaccaaagttaccttttttatatacagattttatactcattgaacatttgagtcacttttacataaaatatgttgatgtacacatgtattatttttctttccctgccttattatctgtttttattatttttccttgttcttccagtttttttccagagaaggaaagctatccatctcagggtttcttggtttttacagccgttatttggatacatttgatcacgaaagttcatatgatagattgtatggtattaacaatgggcttatctgatttcattttgtgacgttctttccttgatactttctgtgcgtaatatttccaaatgatattttcaatgtaggtatagaatgccttagagaaaattgagacttaggtagagtcagatactcttcatatgacaagccacaggggcttgtccgtcaaaccagtggatgtgtgctgttgtgtttggtggagtcagcagtctttgtgtagttttcgtttacagtttggaattttgccagtgcttcaaggctagcttgaatgtttattaatttatcttgagaatgactgctcttcttttgtaaccttctctccgaattggatttcttttaaactcagaggctgggcctatgtgtgttcctcactctgtttttaagttacaggaacaatagccattgtatctactgtgtgacaggaacttatatgatgttatctacctccagccctttattgtaaaatttcaacttggtgactaatgttctttaattttatcaataacatttactcattaagacaattaaaattcattaataggaaggtgagtttcagtgaggggactgtctttgaagcatgcttcatatgtatcatt

SEQ ID NO: 60437 - DNA, 1426 bp, Bovine  19866882042575
  misc_feature (1)..(1): n is a, c, g, or t
ntacttggaaaaccatagctttgactataaggacctttgttggcaaagtgatatctttgatatttaatacgctgtttgtcttttaattttaatccctaatatatcacataactctaacatcattacttgtctaatggaaatatttgaatccacataaatttatttgaactctattcaaatatgaattcatctttttaatcatccttccctttatttttgaaataaaaataaatattttggggaaaaataatgtatatatctttaaaattaggagaaattccaggtctttattacatgattgagaagcagaatattctgtttgtgtttctttccaaatgtattcagcttccaaatgcttccggccacatgcattactatcatttgaatctgagccacatccattgttgctggtattattgcaaaaggctctcagattttcctgccttttcaattgctcccctgtaagtaattcttaccacaataataagacagagtctttttaaatgaaggtctaattatgctgggctcaaaattgtaaatagttcttcatttattcaaagaaaagacagtccttaagcaatcccaccttctgtgattcagccactactcactcccccaatgagcttatttctttttagagtttcattttgtgatttcctctatagccacactgatcctctctgggtcctaatgaaccaaacaatgcccccatcttatagcctttacactggctcttaccagggttaatccacatctccttgaaatctactcaaaccattgccttcacaataaggtcttttacattgaactccactataatctataagttcctatttctagctggcctccccattattctttcccaactctgttttatttacctgagtaaccataatgcttggtattctaaataacttattcttatatttaatgtttattttgtgttcatccagccagaatcattgatgggtcctaagtgcctcaaagagtttctggcatatacaaatatgtgtatacctcaaaattattgtatgttaaaataatattatataaaatactttttttttcattacttgccctttatttttttaaattttattttatttttaaactttacataattgtattagttttgccaaatataaaaatgaatccaccacaggtatacatggttccccatcctgaaccctcctacttttaaaatatgttttgaggaattgcatttttacttttagagtaatttaactagtactgtctatatatgctcagtcattcagtcatgtccaactctgcaatgccatggactgcagcccaccagatttctctgtccatggagatttttcaggcaagaatactacagtcagttaccatttcctacccccagggggagttccccaccgaggaatcaaacccatgtctcctgcat

SEQ ID NO: 60438 - DNA, 1541 bp, Bovine  19866880066361
  misc_feature (1)..(1): n is a, c, g, or t
ngcaactaagtatgatggatatgctgctatggtatttttcaaggtatggttcatagagcatctgcataagaatcttctgaggcactacttataaaatgtagattcctgggccccataagaaaccttggaaatcaaaacttctgtaagatcaggaaatttgcatttctgacaagctcactgagggcactgacttgaaactcaactgtataaatccatttaatgtcctactatttaagaatgagattggttaaaacaaaaacaaaaggacctctctctattctctaagtgaagtcgctcagtcgtgtccaactctttgagaccccatggactataacctaccaggcttctccgtccatgggattttccaggcaagaatactggagggggttgccacttccttctccaggggatcttcccgacccagggatcgaacccaggtctcccgcattgcaggcagattctttaccctctgagccaccagggaagccactatttaagaatgagattggttaaaacaaaaacaaaaggacctttctctattctcctgaattaaacataagtagtgttttttggtgtgtgtctaaaaaagtttaggagacagtaatattgactataataccatcctcaaaagcaatacctcaaagtaaattttcactttttagataaagctttaggatagtgtagttcttaaccaaggattaataatcaactaattagtcttcactcagtatagcagtccacacacaatttattcagcaatagaacagaagagaatgtcaatcatgacagacataaggcagatacagggtagatctctggggtacattctttatacagactaacaaatgacttttaacaacatgtggcaggcatgatttgttgcataccaacagccattcattcctcacttcttcctagaagagccctgattttattaggggatacaatgtgtcctacccaggcaatgtcaactccattcccctctgtcaggtttccaggctcccttgtgaatcaaggatgtaagggaaaatccctgatgtaatgagatgtaaggaaaaatctgagggacttttgagagaaagattttcttcccaaataaaaaacagagacttgaaagaacaaaggtttttgctccctacttccagtctttgagagagattgaaatgtctggagcagcaacaagctatattgtactcactgagaaaaccgtgaggacaaaaagccaatacaataaggatcccagaggggaaagacagaaagaacctgggaccttgagaacatcgttgagttgctacataagcaatggattatttagcatcttaagtggaatttttaaattgttaagtggactctgagatgttttcagctgctttttccaagtttcttaactcaaactctggttccatgattcttatgaacaagtgaaggccagaatgaggccaatgtcagggtaagtccttcttagttccaagaaaaatgcttcccctaaactgttcattatctatatggagtcaagtttgataactccttctgtcacttag

SEQ ID NO: 60439 - DNA, 847 bp, Bovine  19866880386214
  misc_feature (1)..(1): n is a, c, g, or t
natattcaactgaatgaagaaacaatctttgtctgtgatctgagtcactgatgacacgtacatactccataccggctctttacagatccgaagtagcacaggtcagcaggcatcagttctacaaggcaccactggttttgtgagtgaatgaatgaaagtgatgtaatgctagcatctgagatctagaaatattgaaaaaaaattgaatatggtatatagattttccttccatttctattgattttatactgtattgatattgatctcatatacactatgttttaactatttgttcaggaaggtctcgcctcaaatctagcagaagagtccttcacaaaggccccagtgaaaacagctcctttaggtatgtggccctacactcaattgagcacagtgtcaggtcttggttggaacagatttatacgtttttcctgtgacaaacactttcaaacagattcttcctcccatatctttattatctctctataggtatcaataaagacccctatatctgattactgtttttgaaaaaccttctaccctttagtcacttgactttggaggtcaaaacctagctgaaatattcgaggttcatggtgatagttcctaggtatgccatgtaatgggttagatccttcactaggtcaagatcattttactaaagtttctgctttaggggtgaaatgcaaatcaataatcactgtctccataaacactgttctagagctttcttacaatcacagaacatgatccaacaattaatactagctgttaaaacctcttagaatctacctaccatttctacttcctctcactaagtataatatctcctgcatttttctaattg

SEQ ID NO: 60440 - DNA, 1073 bp, Bovine  19866880391631
  misc_feature (1)..(1): n is a, c, g, or t
ntgatgtatagaacagtcttatggactctgtgggagagggagagggtgggaagattttggagaatggcattgaaacatgtaaaatatcatgtatgaaacgagatgccagtccaggttcaatgcacgatactggatgcttggggctggtgcactgggacgacccagagggatggtatggtgagggaggagggaggagggttcaggatggggaacacatgtatacctgtggtggattcattttgatatttggcaaaactaatacaattatgtaaagtttaaaataaaattaattaaaaaaaaaatctggtgctagtggaatcatacggcattgtgtaactctcagtcatgaccttttaaaagcctcgtaattgtgttgtaacaagcctttaaagatcttggaacagtccagtttatttcagtttagtcactagctgtcttttaaggaagttttctggaggtttggtcaaaccaattttgcttgtatctcattggcaagaacttagtctcctggccacaccaaggtgcaaagggagactgggaaatttatttattctgggatttaagtgcccaggtagcaaattaagggtcctgatactaaggaacggggtgggaaatgatagattgactggcaacagtcactgcagcaactgtctgttgtagttcactacccctggtcttctgatcatttcttaccttcttctggctgtgtaagtgtgactacattcttctgtttccctttctgccttttcttattttatttaaatgcataaatgtgttagtctttagtctacttggaaccttgaaaaagttcattgttctttgtgatctcatcacttagttacaaaatgaagaaatgtccctcccgtatactgcctttgggggtgttcagtaattcagttctgtgaacaacacttacttggtcccttggtctgtcgtgtactacgttaggagctgagattttggagaagtcatttctcatggtagctggtactaactactacatataaaatggatatgcaagaggagcaacaactgaattagatacctttgaagtgttcatgaaagctataaag

SEQ ID NO: 60441 - DNA, 1272 bp, Bovine  19866880446095
  misc_feature (1)..(1): n is a, c, g, or t
nttgcttggctaccggcaggtggtctcaaatgtggggaaataaaaagctgcccagccttagaaattggccacagacgtcactgcaggaagacaaataaatatagaacatgaaggggttattcatttagagccctgctcctccaacatcgccctgctgtgattcaccagatcaattcaagatgccgtaattcggtgtgtcagggaggctgggaagagaacagatccaacccctcctgcctccccccaaccccagccacatcccctcttccccaccccttagccctcaccttagctgcctctgatgagattcgctcctcccttgccttgggatataagttactacagcttgtttcaagaaaaccaattaagaaaccataaattgcggttgactcggaaggtcagtgcacaggctataaatacaggcgtttctaacctgtgagtgcaagtcagtctgaagcccattctctcctccacacccacgtcttccagctgaagcttgcctctgatgaacagagagcacgtccaggatcagaaaggcacccctggtgcctttaaatctgcggcctgtcggctggagtggacctgagctctggaggaactgcaggcctcagacaccttagctagactcccagttttgtttttcttcataacaatcatttcttcacagtgcataaaacgtatataggttcaaggtagaaacttggaaaatagtgaaaagcacaacggggagataacccatagttctaccccttaaaacaaatctaacattttaggatatgttattccatgctttttcccccttggctatatatatatacatataacaaataaggagatatatgtatgctgctgctgctaagttgcttcagtcgtgtccgactctgtgcgaccccatagacggcaacccaacaggctcccctgtccctgggattctccaggcaagaacactggagtgggttgccatttccttctccaatgcacgaaagtgaaaagtgaaagtgaagtcgcttagtcgcgtccgactcctagcaaccccatggactgcagcctaccaggctcctccatccatgggattttccaggcaagagtactggagtggggtgccatcgccttctccagcgtatctccatatttgtttttcctcacaaaaatgtgttatttaatgatattgttttggagcctgcttgctcagcaatatttatgttaaagatatttttccattagtgtgtgctcagtcagttcagtcgtgtccaactttttctgaccctatgg

SEQ ID NO: 60442 - DNA, 887 bp, Bovine  19866880478314
  misc_feature (1)..(1): n is a, c, g, or t
nctaggtgttgtttttgttttggttctatcccttcattctttctggagttatttctccactgatctccagtagcatattgggcacctaccaacctggggagttcatttttcagtgtcctatctttttgccttttcatactgttcatggggttctcaaggcaagaatactgaagtggtttgccattcccttctccagtggaccacattctgtcagacctctccaccatgacccgtcttgggtggccccacttggcatggcatagtttcattgagttagacaagctgtgttccgtgtgatcaaattggctagttgtctgtgattgtggtttcagtctgtctgccctctgatgccctcttgcaacacctaccgtcttacttgggtttctcttaccttgggcgtggggtatctcttcatggcttctccagtgaagcacagcggctgctccttaccttggaaatggggtagctcctcttggccgccgcccctgagcttggacgtggggtggtaattaagtactcattgactgaatgaatgattgtgtgtgtgaggataagtgctgtagaaagtgaataaaatggtatgggaaacagatgaagtagtaattcttaagggactgcctgggaaagatttataggagatgacattagaggttggtcttgaagggtattactgctagagaaaatttaggaaaagaagatatggagataatgaaagtttcgatgtttagagaaagcgtgctaggtatagctgtttgacaggagcagttggtatactgtgacaatagcgaggggtaagacaaaattaagggttgtgaagagttcagacttccatcgtgctaagggattggaactttatcctatagataagtcataagagttacaaaaga

SEQ ID NO: 60443 - DNA, 2544 bp, Bovine  19866880617028
  misc_feature (1)..(1): n is a, c, g, or t
ncgggccttttctttggccgcccggggctcgaagtcgccgtacacttcgggcggctcttctgagaacctcacttcccgccggccgtggcgcgacggcgtaggagttccgtacgcaggcacgtcacccgctgccgccattttgaggggcgagtcggggccttccctcccgtagcggagccctgggcgtgacgtacagcgcccatccttctctctccggctccgcccgctgcccctcgcctgccatagttgttgacgtagcttgagtcgatcgcgaaaggtgttttgcggtgcccttaagagtctcctgccgttggtggcgatcgtttttcgggagtgaagggcggtggtgtcggcggtcagggaggcagttgagcgtcgccggggctgccgcctgcgtcgtcgctgctgtgctgcaaaccggcctctgggcccatggtgtgctccgagggctgtgggagaggcagtgcctgtgctgggtcagctgccgcgggtcactcccgcctcctggctgaaggcactaaagaggaggagaagagcgaggaggcgtcgctgtcctcggccttcggggagggagggagggaagacggagaagggacaagtggctgggcaaattgccggtccacagtccagctgctcctggcaactgctgcctgactcgcaagaggcgctgggtcgggcccccagcacagcgtagctgggaaaggcggagtgaaacgcggggtggaggtttcgctcctcagccccaggctgttgcgcagttttcccgcagcctttttgatcgactcctgccttcgccgtacctttccaagtgtcgctttgcagggctgataagacatattcgcaggtgtcatctttccctggagaaaattttagtttcaagttccttgggaaggcagtttaccagttttaggttttaaaagtctcgttgagtgtacgaaatcgcatctacaggcttacttgggtggatttccatttacaaaacgtacgcagcaaccagtattactcctgatttcgtataaaggctgtacttcagcaacactgttcagagactttgttagtgctgtgttatggacagtgagaaatcaacaaatactttgattaaagacagcactgtaattttcagttgtgatccattattttcactttgattctgagcatgacttgatacactgcatttgatacagggttttttctgcgtttagtttactgaataagaaagcacgacaaagccatttgtttcacttctgtgtggaaaatctgcaaatatctaaagttagacacactgagggaatgttattgaaaaatcggttaatcttgccttcacatacacacagccttctcggacgattttctataattgattttagtgactagacttaaaaatttgcagtttggatagcagttacagtgaatgggcctgaaaattttgaagtgaagtgaaagtcgctcagtcatgtccgactctttgggaccccatggtgtacagtccgtggaattctccaggccagagtactagtctttcccttctccaggggatcttcccaatcaggattcgaacctaggtctcccgtattgtgggcatattctttaccagctgagccacaaaggtgtttactctttcaagtatttaaaatcactttagaatgtttttgagcaactcattgtccaaactgggtacatatttcattttaatgaaatcttaatgatgtcgtgttttcactaatagtccataaatttggtcacagacccgagtaattacatgctttagaatcacctaggtttttgcttgatggaagctctcgtttagttttctgttttgttttttttttaattatatacaatatagccaaagaaactaaaggaatagcaacatgagagatgctactttttaaagaatcttttatcttagggaaaattaaaagcatgttctcccttgtcagcctgagttagtatatttggaaaatttgtgagaattttctctgacaaaatgctgagaagtgttgatacttgattaatatctggcttttactggttttaactagtgctttataaggtacctattatattactctattaatatgtaacaggaaaagtactgtaatagatgaaaagatataatagattcaaggatataataaaggatataatagattaaaggatataaaactatacaagtagtattaataaaattcatattatagtggtaatattgatacaaatattaagctctttaaaacagttatgaggacagttaactttatagaaacttggatacagattgttaaacagatttgggggggatgtattaaaaagacaggagattcaatacattagtacatgtattgttgctgctaatttgcttcagtcctgtcccagactgcaggcccacagactgtaccccaccaggtcctctgtccatgggattctccaggcaagaatactggagtgggttgccatgccctcctccagggaatcttcccgacccagggattgaagctgcatgtctatgtctcctgcattggcaggcaggttctttaccactag

SEQ ID NO: 60444 - DNA, 777 bp, Bovine  19866880645053
  misc_feature (1)..(1): n is a, c, g, or t
ncctttatgcttaattccttgaacagcctgtgttcctgtgttaagattagaaactattttagaaaaatgctttgagtgataggctctataatcacatttttcaggccatttgagaaaactatattcttgaaattttatttacagtagcttcaattacatgacgcttatgcctagaaaagcaaaagtttctcatttttaaaatctacagcaaaaataaataaaatctacaataaatttataaaatttatggggttaagtaaattgatacaatgaagacagttgagcaccagcctatagaccatacagaccattataaaactattaaacaatagaatgtctcgtacagtcttttggggttcacattaagcttgtattttaggactgctattgaggtacatggctgcgtaatgttgtgcaaagagcactggaccttggtcatattagctagccatgttgaccctcaggcctttatctgtatgacttaacgtgtcctaactcacaagctcactgcaaaagtgaaacaatacttgcaaaatcacttagtatacagtaaaacatatggctataaggtgggggtttttttttccctcacggcactttgcaggcagtgtgaagttcataaaattttgcttaagcatttctttttctgacaaagctcatgctatggttgataatgcaaaagacaaaacatttcccaatgtagatggtagattgatggaactcatgcacgtattacctggaatatattgtgctacaatataactagacataaagata

SEQ ID NO: 60445 - DNA, 769 bp, Bovine  19866880653372
  misc_feature (1)..(1): n is a, c, g, or t
nggctgggagagcccgtgaaggggctctgggtgttaagcaacaacatggagtgttacctagggggacagtcagggtcccgtctcctgcctctggtccaagactcccaagttcccccacctcaccctccctctgcaggtgactctggccttggagatggcccttccttacctgcgaggcgagcgttgaccttgttgtggctggaccagaaccaaaggacggcgctgttcagactccccacccggtgcatggagccagaggccatctgctcaaagtggccagcgcactctcggcagccgaagaagaagcggacgtagccccggatggcttggaggacttcctgggccttggctacagggaagaggagatgtcagtcaccgggggccctgcaggttacttggccctgccgaccccaccaccagccccatcacaggcccaccacggcctcctctgcatagggcacacacactgggcccaactgatgcggggactggtctcttcgcctacttcaccttccaggggtggtcacagctctgactccatcccccaccccagactcttaaacctcagtctcccttgtctgactcttatccaggccctcatcacttcctgacacttaggatagagtccaaactcatcgtcaggacactcaggctcttagagatgtggctggagagttaagcaggggctggagcgcccaccaccagacctgtgggtccctaccctgcccctcctgcttcaggcttcctgtcgtgacctgctctccattgt

SEQ ID NO: 60446 - DNA, 1749 bp, Bovine  19866880780517
  misc_feature (1)..(1): n is a, c, g, or t
ngccgaagaaacaattgtacctttaatggcagaacctaaaagagctccagaaaagccgtgtgaaacgttactggcagtcccacatactgcagaggaagtagaaattcttgtacatgatgcagcagaagaactttggaaatggaaagaattaggtcatgatcttcacagcatcagtattcctgcaaaactgcttggctgtgccagtaagggtctagatatagaaagtactagtaaaagggtgtacaagcaggtatgtaacagggaaggataattctaatttttaaacttctcaccgttgtctgaaatttggattcttagccatttcatttgtttctttttctctatcaaggcggtttttgatttaacaaaagagatttttgaggaaatatttgctgaggatcccaacttgaatcagcctgtctggatgaagccatgtagaatcaactccagttatttccgacgagtgaaaaatccaaataaccttgatgaaatcaaggtaaattggaaactacaaagtatctcctttttttatttgatcttctttttgtacaggtctataaatgtcattaaagcaggtactcttttgtattattcactcttctgccctcaagacctgttccatagtagatattcagtaaatatttgttcattcagtctgtgagcaaaagaacaatgagggtgacagggaatcctgaaccctcaacttattgcaaaataaaacgtaatggtaattttatatacatatgttttataatatttttaagaaattagcaaatactcggggaggtaaattattggaatttgtacgagctttaggtgagttcttaatgatttagagataggtataatactctaaaagtatcagaagacatatatcaaatatgccaaccctagacacataaatgatataacctttccatctttgattttggaggtttcagattggttatgtggttttgaaatatgtaggatagtgtgatatataaaaaatattgcttgttgtctaagaagcccctgaaaagattaagtgccctgaagctacagggactttcaacaaaccaactttaaaatcacatgggtgaaaacctctctgcttgttcacctgttcttgaactatatagcaaaggttatattcccattgcagtgcctctcaaacttcaatgtgcatctgagtcacctggggggattttggtaaaaatgcagatttcttatggagtagatctggagtaggaccagaaagtctgcatttctgcaagctccgaagtgatgctgttgttgctgactctaggattattttgagtagcaaggctctagagttttgtctcccaaacttatttgatcatagaaactattttttccccagagagtctgcctccaattacttattttacttatgtattgtcttacattattcagttgtatatctggacgatcaaaatacattaaacgagcatacacattaatctggtatataacatgaaaggaggcactgtctaaacaatttggtcttttttttccctgagatataattgacatataacattatattagtttcaggtatttaatgtaatgattttatctttgtatatactgtaaaaagagcaccacaatatgtctggttaacatccatcaccacacatagttacaaatttgttttgcttgtgatgagaacttttaagatctctgttagcaactttgaagtatataatacagtattgttaactatagaaagcttttaaaaataggcat

SEQ ID NO: 60447 - DNA, 1513 bp, Bovine  19866880890139
  misc_feature (1)..(1): n is a, c, g, or t
ncagagtcagctccccctcccccaggcacagccacggctcaggaaaggagcaccttcatctgacagggctttgtgcctctcagttccccgtcccatttcctctaaatggcatctggtctccctttttcctccccacgcccaccttctcagggacccttcctctgtcagactgagcgacatcctgtctcattcctcaaaggttcctgagcacaggttgtgagaagcagagcaggtatgacccagagaatcccggcccacccttcccttcccagctggtggggtgggccctctcatcccgctcagccccaggaagtcagggcttctccagcaatgggaagccctccgccagctgctcgcagcggctccgggctccagcccactgtacaggtgtccacagcacaggcaacaggagaacccaagccactgcccagccctgctgtcccctccaccctctcactgccatgcctgccatcctgccaccccgccccgggcccaccccggccccagctacctggcaggctccagcgggggacaggccgggggccacgtgtcactgtgggactccagggcatcgatgagcctctcccgaagcgtctgcacatcagctccggccactgtaaatgatgatgggggaggggagtgatgaagggggcaggggatgaggaagtagggtgcagatcccagcttccctcacagaagaaagggcccaacgcacgagctagctctgagcaagacgaagcatctgtcagtcctcctccacgtgaggcaggtgggggtcacccccggccctaagctcggcagagggacccatccctcagggcaggagagagcgccccaaaagccctccacacgctgtctggctgctcctctgggtgcccatcccactttgacacaagggccattctgggaacacctgaccccgcttcccaggacgggcttcttcagcctcgttttcccggaggaatcttccaggctggctggggagggcaggttcaggaggacatccctctggctttccctggggccctcctcccccttcagaccttgctgggctctctctcccctctcagtagaagcccaggtgaaggagggagaggaagacgcggacagcgccaacgggaccccgagagccgggacacccacctgagagcgtggttcctgagccggtcttggagaaggccttaaagaactggaagcaaacacacaggcaggagtcagtggagctccgagtaccacagccacagcagctgggctgtggaggcccagctgtttactcaatggggcggctatggggaaatgacttttgtgagcctgtttcttggtctgtaaaatgagaggaggaggtgtctgctcttggagagcacccgggttcctctccccagtgtcctgcgcccgagccctgcccccacagctctggagcccccggggaagctgtggctcagacacttgactggaggcggcctgtttttacgaagctcagggacccagcatgtaggactagtaaatagctctt

SEQ ID NO: 60448 - DNA, 1333 bp, Bovine  19866881093773
  misc_feature (1)..(1): n is a, c, g, or t
nacacacacacacacacacacacacacacacgcacgcacacacgtctgtgaggttctgcacctctgctggctgacgtgcccacctgtgcaaacagcagtgacagcaggagcccagaaagcgcccctggagagaagctgtgctgaggagcccggcaggcaacagagggctgtggttaaaaagctctcccaccagggacatctcacaaccagctctaaagcccagcttaactacttactggctgtgtggccttagacacacacagacttacttgacctctgcttcttcatctgcccaatgggaacagtatctgccttctactaatgttgtaaggattaagtgaggtctggagagagagcgctcaacagatggcggttcactcgtgaccaacacaaggactcaaccaagactacagcctccttcctaaatgcggattggtgaggaggtcagaggggacaaggtggacccttctgctcccatagatatggaacatggaggagagcttctttgcctcccagactcacctccttcctgctgtccagcgcatttttaaagaaaccgtatggaattttctttctctgctgcttcttgagccagtcgttcatggagtgcaggaagttctggactaagggccggccacggaaatactatggaagcgataagtggacagtgagaagcaattcgccgggggttcccctggggagggtagtgggggtgggcggaagggggctcaggtatgttctggaatgttccaaaagcaccaggaaaacattctaagacccaaatgtgaggagagaaaaaaaaaacacccaaatgtgggctcctcactcactacctttgccctgggacaccggaaggtgaggcagagggctgggcagaggtgctcagtggagctgggccctcaaggctgcccctactccaggctgcaggctggggctctgacccctgaccacacacccactggggggaaggccgagcacctgtgtcactgcccagggcggctgggacccctgtgccacacgggcctctgttcaggtaatcttctgatacagcagctgattagtgaactgaccagctgggctgggctggcaaatggcctttcatttgtattccacgggctgccagtggcgaccaggcagcacaggggccagagccgagatccaaatcttgatgggaactccccgtagtctctgaggagcaggaaaagctactctgaagataagtcaactcaaatctgattagtatcagcactttaaaaccacaaggactccagggaggaggatggatgtgttgtgtgtgtgtgtgtgtgcacccatgagcacatgcacgagcata

SEQ ID NO: 60449 - DNA, 1461 bp, Bovine  19866881311420
  misc_feature (1)..(1): n is a, c, g, or t
ncacctgggtgatatttagaaacttgagggtggaagcattttggaaagaagatgcatgaagctaaaagcagaaagaacagaagtaacatctttagaagaatatattgcagaccgtttggccatatggtaaaacattaatacatttctgattaagatcataaaactggcacagacacacacacacagaagtgacgctttcaactgctcaaatatttgctaagtatctcaactgactaaaaactaggtaagtatggaatctgacttgccatactaaaaatttcatctgaactcatggaaaaaataggcagggaaaagctactctatgttgaccagaaaatgtacgtttcagagaactacataactgtgtaacatatccagttacttgttgaggttactctttcgagacagttgagccaggtcaccaagtaaaattttaaaaagtttcttttcttaaataaatttttaaaaagcttctattcttatatacaacaccaatcacagaatctaaatcatgtaaaaactatcaactgtttgagtgcaaaagtcagttgcaaactaacacccagccctgattttcaattcactcaagaccagaactttgtttataattccaggtttacctactttaaatcccatgttgaatattacaattaagtttttctaaatgtggggtaggacaggggtactgtgaagtaaaattattttaagacaggacaggaaaattaaacataaaatctctctctgcccatttgagctattactcgctttagtgtgtactgtatgcctgaattatacattaactagattcccttagaagacacaggaatgcccactttggaaaaaaaaaaaaaaatttccttctggctccagcaaagtaactccctaggagacaacattcctttctcaatcctctaggtggtcacaacaacccactattcaccttgttggactgtgtaaacttcgatgtataactcttggtctcaaaaactgatttaactgtgccttgacctctaacaagtggaacagtcttcagaactttctgaaagaccgcctcgtgggttataatcctcaggttggctccaataaaatttcccatttcattcttagatcaactattgattcattttttttcactgacagtactcttgattgtaaagctagagaacaaagaaataccagatccctgtacttgaaccaaacactctttcagtcaataacctattaactaacatcactgttagctgtgctctaggcttacacactcatgcagagaattctgaagagctggactggctagagtatctgaggcttcattcactagagtgataatggctaacccatacttgccaattcacattttcatctcccatctaaacttaccctaaagagatcaaaataaaggaaattgaatagaatgtggtaaaaagatatccatgtcttacaaaaatagtttaaattatt

SEQ ID NO: 60450 - DNA, 768 bp, Bovine  19866881356652
  misc_feature (1)..(1): n is a, c, g, or t
nctctagctatcttttaaaacatactgaggctggatcactcctcacactctgttcccaccctatatacacacacacacactggacttcctccatctccaatgtagctgaggacagctgtccctactggagcagtttaattcattgcctccagacgatttgatggtacccatcctgcttgtaaggaaaaaggaaacaggagaacgaaaaataagccaagaagtgtgcatttctcagctagatctcctggacaacaatctctgtcttcttaccattgtggtgtctcatacttacattaacttctcctgtgtgcgatcaagtatagccattgcttcaagatactttggggccaatgtaccttgatgagctgattctctctgacaagaaaagtatgtattatgaatgaactgaaagtcccaacagtaaatagcctccttcttcaggatgttctggaccaagctatctttttctactattcatatttatatagtagatgattaaacacactcttaatatgaaagaagaacaaataccataccagattgccaattattcatacttaggtggatataaaactatattagagttgtaaagaagaagcagggaaaacaatatcaacaaaaagaagcagggaaagaagagaaagtttaaaaaataaagagaagggcaaacatatttctctaaccaagttaaatatcaaggaaatcaattatatttctctcattataatttacttcactaagcacataacattgcatatccaatcaaat

SEQ ID NO: 60451 - DNA, 1098 bp, Bovine  19866881365802
  misc_feature (1)..(1): n is a, c, g, or t
nccctcctcagccaggtggtctacatctccgctgtccctggaggaaggagagagggcttgtttgtgaaagccggcctggactggctgctcagcagggaggagtcagccagattagagaggctgcccctaatccggcctgctgggttttacaaggatcagagccgctgataatgaacctcattaagggggagcaggagcctcaatccgatttggggttttctctttgacatcttgctctgctcagatggcctcggcaccgggcggagcaggtggggtgccaggcctgctcctctgctagggcagccgggtggggaggggttggccccccttccctgctttgatagccctgggtcacctctttagctgcctgactgcacgagtggatggcggcattggagcctctctgcaggcctctcatcttccccagagttccctctctgtgtccccactctagtcatccacctgcctgccccatccgcccaggccgtctctgctcatcttcccctgacccaccgggccctggttgagaggctgacaggcccacaagagggtgaaagaggctcccagcccccgccgggccaagaccacttgagtacgcctgtacctccaccacctggtacctgacttgatgccaggagcagaggatttctaccagacggcccttacggctccagtgaccatattttctaaaaccaagctcaggcgttcagaattagaactaggctgaaaaagctgactctgcgactacccccggtgcccaaggcagggggtagggcctcacttggggccacagggggccctggtggtggttgtgggtctctgtcctcaccttggcccctggcagacagcctgagcagctttccaccctgtcccagtccctctgattgatacacaggggtgggcctcctgagcaggactgctgcctttcaccttgatttccccagggctctcagcagcatcagcatcgataaaccggcttcgcccaccagctggtcccctcccccacccaggctgccagcctggaagccggggcttctgtgatttgagcaccgcccacctgtccttccaagttgttttctgtaccttaggagagctccc

SEQ ID NO: 60452 - DNA, 1862 bp, Bovine  19866881694366
  misc_feature (1)..(1): n is a, c, g, or t
nttttgataggagcaaaagcctgtatctgatcaaacagggtgcttttgacttcacagactcaaaaggaggctcaggacacagtgctgcacaggatcttaatcacagacatggatcagaaatcatttgtggagcttttagaccgtgcagacaacaggcccacttttacattttctgatttagtgggtcatggataggaccaaacgtatgattttatatattcctgatttagatgttgaggactgcagttattagaggacaggaggagaaattaggagttggaaaatccagatgcgtcgcaattctaagtcattttggttctagagcgagatttctctcctctattctaagagtggttactgtctactccttatgtttcttgaagatatttataaagcatattggtcacttacatttctcttcccaaattcatgccagtatctcaactgtgttagttaaataagaggtactcaatattgttagtgtattttcccttctttatatctgcttttatctgagcccctacagctttaggaatgaatggcagcccactccagtgttcttgcctggagaatcccagggacaggggaccctggtgggctgctgtctatggggtcgcaaagagttggacacgactgaagcgacttagcagcagcagcagcagcagctttctcaaagagtagccttggaatctggaatagtagctttggtgataatacttgaagtattgagagaataaaaagaatttagataaggattaatattggttcatctaaaaggaaatatgagttctggggaagattagaaatctccttcatcactgaatggcattccatatgtcaatctgttgctcacaacctcagtcttggcaagtattaggacacgaactctctagggctgtcccaaacacagtgggtcccagaaaaagaagtatgactcgtgacaagaaccctgtggggtgcttcaatctgtttccatgatttatgatccccttaccccagttgtgactcctaccatttggtccaaacctacagagaccatgtctgacattttggcagagagaggggcatgtactatcttgaatctatcttgggctcacaaatcacctttcttccctgcaaagttattagttgcttaattatagaggagaagtttgcatctgtggccagataccagggccaagtttaataaaacctgaaatggctcccagttcccaaggacaatcaaaatcgaagaattccactgcacacttgcccaggactatagggttgatgaaaaatgccagtcttcccaagtataatattttctcagattcctgaatagctactgatgatgtgtaataaaacaactgctaatacatctgggtttgagtgagatatcaggaaaacaaaactatcaaggtgacctacaaaaactcacttcccatctgtctccattcctcttcctctaaaacaatatgtagggcaccttggtatggcctcaaaaaagatagggaagagggatgaatgacttttttaaagagtcattcactttaacttcccatactgtataatcctatgttgggggcttttgtgcaattataatttttacagctagtaatatacacattgtacaaaacttaaaagattttaaaagatctacagaagaagtctccctcccattcatttcacttaatcctccagtgtcttatcccgggatgggggcaatggggcaggcatggatggtgctaagcagtgttttaggtcctggggacagagaagcaaacctaacaaagtccctggcctcaatgagcttacattctagtgtggagagacacaaaatagggtcctgggaagtcctatgagaaaaataaaatagcctgagg

SEQ ID NO: 60453 - DNA, 5511 bp, Bovine  19866880442600
  misc_feature (1)..(1): n is a, c, g, or t
naacatggcagaacttcactatttttatggctaaataatatttcactataaacatatactacattttttatccttgcatctttgatcttgttcctgatctcagaggaaaagctttcagccttttacctttaagtatgatgttagctgtgggcttgtcatatatggcctttattatgtagaattatgttatttctatatccaatttgttgagtttttaatcatgttaaggatactgatttttaaaaaaacatgtattctgtgtataatgtgtctatcaatatagtcatatggtagttctattttattctattaatgtggtatatcacttattgagtcacagatgctgaataatctgtggggatatatcaatatttcatttgatcatggtgtatgatccttttaatgtactactaaatttattttgctagtattttgttggaaatttttgtatctatgttcatcggtgatattggtctatatattttttttcttagagtgtccttatatgactttgatatcaggctaatgctagcctcacaaaattagtgttagaatattacctctcttcaatctttaagaacagttttataaggagtggcattaattctatcaacatttaccatttaaatttaccaaggaagctgtctggccctcagtcttcttgttgcttttactgttgggagatttttgttgttgtttttttaaaaattactgattcaacctccttacacattattagtctgatcttattttctgtttcttcatgattcagtcttggtagatgagatgactatttaaccatagcaagttatccaatttttggcacatgattgttcatagtaggcccttacgataatcacctttgtatttctgtgatataagttgtaatttttcatttataattttatttatttgagcactctgtcctttccccttggtaagactagctaaaggttttaattttgtttacctttcagaagtacctacgcttagtttcactgagttttctattgttttcctactctctacttcatttatttctgctctgatcactgttatctccttccttctgctaactttgggattatttgttcattacctcattcctttgaagtgtaaaattacattacttatttgagagttcttcttttcttaatgtaggtgttagtatagaattatcttctgtccatcctgatagggattctgaggatttatcagtgctcttctatggatacacctatttcacagttcttgctacccaagaggacttgtgtgggcatacttaagattatctgctgtctctctattcttcaaagctaggctgcatgctgacagcttcactcttatttgctttccctggggtactgcatgctgaggtgctttctgcccatgcaacagaggctgagcagctgtcagggccggctagcagtttgcaaaggattgtacttgcaactctctggaggacacaagaggaaccagccacaggattcagggctgtgtggatgaggcatgtggagcacagggggtgactatgtgctagcagggggaatccacaggtcaggtgtccttagctactcaggggcaggctttctgagggaatccatgaagtggttagtaggatctaccttccttttgatgccctctaagagccctaactgctgttctcctagcccctcactgcccccagttgtgcagcacaccttagcattctggatgggacaagaacaaagtgagctactttggcagtatctctcatagctgggaagccagaagcgcactcacaagctctcagtttaacccatgaaagaaatcataggtcaagaaggtctcttctggcactacactccacctccttgaaaggaggtgaaactgctactctgactcttctcaatgtgtctaatcttggattgttttcgtttcaatggtgtgcttgaacatctccgctggacaccccgacttccccaaagtcattcataggtgaataattgtcagaattgtgggtttggaggggaggatggtagaaaactcctattccaccattttgctgatgtcactcctacagtgagctttaaatgatacagtctcctctagaaataacttgaagatggctgatagaataataaaaatggtcaaattttaattaaatatgcaaaacacagattctggggaaaatgccttataggcatcatatcattttaaccttttcaaaaccttcaagacaggtaatcactttttaatccattttgcagctgagaaagttacagcttagaatggttaactgcccacccaaggatgcactcatggaaatggcatagctgttaattctatcttaagccaaagcccatacacttgaccatttttcatgagattgtaagaatgggattcattcattcacttgctcattcttgtaataattatttactggacatttatagtatgctagcttctgttctagaaatggggaaagaaataattctctgtttgtggacttacaattcaatggtggagacaaacaacaatagtagaaaccaaataagcattatactttcagataataaatataaagcaggaaactgaagaaggctaaggaaatatagtgaagtgggggtgatactgatatttggtaaaagagtcagaaaccatgtaggcatttgagacagacacaagtgttgagtgttatcatctcaaccctgaatatttaattggaaggactgatgctgcaggtgaagctccaatactttggctacctgatgtgaagagccaactcattggaaaagatccaaatgctgggaaaagattgaaagcaaaaggaggagagagcagcagaggatgagacagttagatagcatcaccaactcaatggacatgaatttgagcaaactccagaagagagtgaaggacagggaaccctggcgtgctccagcccacggggtcacaaagagctggacgtgacttagcaactgaacaacaaacaacatcatccctcggataggggtgagttgtctgagcctcaagaagtcatgtgtggctagagaaaaatgagaggggatacaggtagagagtagtcaggctgataggcagggccaatgatatgggaactttggagtctggctttcacttgtagtcctataagtggtttatccttaggagattcactaagccttcctggactgttcccttatttataaaataagaatgtaagagatgtaggagcaggagacctgaaaggtcctttctagccttgacattctgtagtgagacagagaaaatgatagatgacatggaaaaggtaaaaactgaataacgaatccagtcactgagggtggtcaccttgaatgtctccatctttttgcatatgagttgatgtgagcctttataaataaagctactcttttcaaatattgtaggctcatctgataaccatgttggtttcatgattcattaagtaaaaggagataagccaaatgcccctgacattcaaatcaaggaaattaaaaacatttggaaaatcaacgcaaaattctaccactctggtgaaatattttgatctgatgacggttcagtgtgagacagttattgaatacctctattgaactgaattcttccagaaaaaaatagctcctaggactgactgttttgggtgtaattcaaattatccttgaattaaaatgagtcaaaataacccatgaaatgccccattcagaatataaagcaaacctaaatactaaacctaaatatatttcctgtgattattcctagtgttacaaactttgctgaggaaaatacctctggattttgtatacacacaaataatgctaagagccaggctagcttcccagggtgtccaagttccagaaaatttattcattccttcaagaaacttaccctctacagtccagaaataattaaatgagtgaattaaaagcatgaaaaggtactacaataaaatagtattgtatcagaggtgtaagtgataggctgatagagccagtgcactaatgtcaagttgcagaggaagctaatggcataaacacagacaggaattaactaaaagtaaaggtgaacccatttcctgattcagaggctatacatcattttgccaaatgaaatgctaagaatagcgaacatttccagatttattatgaacctggaatttattcagtgccaaaaagctaaatatacttgtgtatgtttaattaagagaatgcattatttagcaggataccaaaaacacctgctcaaccaaactagatcattttgcttcatttcttcaacaactcctatgcaattaaaaaaaaaaaaagcctacaatgtgtacatctcctatagaaacaattatataaatgacagtaaatgaaaataactacaaaggatacagaatatttctggtacatatgtaactgagtctatttagattaaaaaatatttgcagaaaagtatttattaatataatgctaaagttgaaaaaataatccattaagcagctgaagcaattttgaacaaagtagtcatttgaatgttttctacttctattttcttataacctcccatggaactcagactatagaggcttataataagttttactattgcaaataaccaaaaaaaaaaaaaaagatttttaaccttaaaaagcttttataaagctaaaaaatgataagacatttgacttttttcacatatcacatgattatttggtttagaaacattcccataatcagcatacaaaaaaaaaatcagcatgcaaccatttgcaaatgttaaactattctaatcatcagggaaaatgtgagtaccttggtaacaataaatgagaagaaaggagaaaaagtaaaaaaaaaaaaagtaactctagaatcaaagcctcaaaacaagattataaaagttttatcaaaagatctgatacaaatgtcagagatttgattcctatgatgattctcattggaatgtgacctttcacctcaaaatcattccaagtaatgagggcaagaatatctgaaccctaaagttttcagtgactcccaacagtcaggcatgagagttgtccctgaaactaaaaaatgtgtgaatgggaatggactcactcttcagatcatctctcttagcttcctaaatcatgatatttagaaagaatgttcattttagccattataagtgtagaacaaaacattattaagactctgtgagctaaagtgagaccacacttactggacctctatagatgcctaagcacctagtctaccccattcttgaggatgacgctcattgacctgtggaaaggagcattcaaaaaaaacattcattctattttcatggctgagtagtattccattatatatatatgtgtgtgtatgtgtatatatatatatatatatatatatacacacatattctttatcttctttatccattcatctgttgatagatattagtttatttccatgtttcggctactgtgaatcatatttctagaagacaggggtgcatgtatctttttgtaaatcaacaata

SEQ ID NO: 60454 - DNA, 1747 bp, Bovine  19866880446785
  misc_feature (1)..(1): n is a, c, g, or t
nagctgcctgataccaagcctcatgttggtaatgctgcactcctcatgactgccttttccagaaagtgttgctagtgatatatattgttatggctgattttatgtttatggctcattcacacagtctcattatgcttagtttcatttctttaccaaacagaatcatgactaacttgcatatcttagagaaagatattaaaagtttaatgattaaaatatgcatttttatgcatctttcctatagttactttttaagtgagagatttaggaatgaagaaagagagaagaggaaattagtttattttaggcattcactttgttctagacattgaactagatatttcgtgtattaaattcttgtaatgattttcaatcttcaatcccttatccaaaatctacaagccaggtgtgttttagaattcagttctttttttttttttttttaagaaaggtaatacaatgtacatattctgctgggatcctggacagaagcctacatcaaatcatatgctttttttttatatatatgttagacattagattttattttatttgaccatgccagcatagcatgagggatcttagttccctgagcagggatcaaacccctgtccccagcagtggaagcagggtcctgcccactggaccaccaggaaattcccatatgcttttctgatgtcagaaaacctgtgaaatgcacacaccatcatcctgaatggaataaacaaagactattcatggccctctgttctttcaggtcacattttactaccaggtgaattcatgtcaggttagatttgctaccagataaactctgaaaacagtttgtttttcatatcttttggttctgaattgtggattatgggttctggatgtgtattatccacacaccatagattaggaagctgtggcttagagaggttaagtaacctacagttcagtcacttataaatagtcgaacaatattcacacaaaggaacactattcagccataatgaagaatgaaaccctgccatttgcaacatagttagagtgtgctatgcttacagaagtatgtcagagaaagacaaatactgtgtatcacttatatgtgaaatctaaagaataaaacagtggattcagtgatatgagcacaaggttagtgaaatgcaaagtcttactcatttcctctggtcctgctcaccacctgacctgcatgtgccctaccatgctctttgcctttttggctgccaggtcagtccagcaagaacacacagatgcataggcacaaatagattctttatattatggcccaaactttcaattaaattttaccttaagctaataattttctccacataaatagtaagggctctgatctctggtcaaggtgttctgtatctcaaacaccttctctccatttctctttctgagatagtgctggatgtaaggcttaagggtgtggcctcattcagtacatctcaaattttgagatgcttatgagttgattgggatcttgttaaaatgcatttaaatgaatcagtaggtgtgcattgggcctgagctttagtttctcacaagctcccaggtgatgttcctgacccaaggccgcacttggagtagcagtgacttaggtgaccgaatgcagattgggagtagtaggagtcctctgtccctttggtctccaaggcagaattcctcacctagcagtttgctgtgatgtagttctataatttacctgggcttggggttagagtcttggttagtg

SEQ ID NO: 60455 - DNA, 913 bp, Bovine  19866880463987
  misc_feature (1)..(1): n is a, c, g, or t
naatctgctctgggtaaatacatgtcatctccaggttttccaaggacagaaagcattgtatttacttgtcttttattctcccaagaccccaagcacaaaaggttcttgatcaaaaaatactcagtaatttcactgtgtaaacaattcatacaactgaattaaaaagagaattcttgacaacaagcccaaaagacctacaattagagatatactcttttccaaaataatccatccacttatcacaagtaaaatcaacaatgagaaataataaatacttaatatcctttgtaaaactacaatttcagttgcttttgcaaaaagggaaggaagagaagaaatgggcagagaaatgctatcatcactgccttgaaggaagatgaaactcttatttttgcatacaataaattacatttgtttccatatgaatctctctcacacactggcttaaataagaaaggggaccagaagtatatttcctcctccaggtttcaaaatcaaaacagacctaatgatacaagcacaatccctcagtgaataaaattacaaagagtctagctactcaggaccaatttgtaatcagagcatcaagccatactgtacaaaaatgtcaattctggcgcagctctgatgagctaagattgaacacacgggccagtttatcatattatcctgactgccctcttttaagactggcaggcacaatttgagtacaaaaagatttcagtgtgagtgatcttgcatctgaaaaagaactcacccagactgacaatgtttccattactatttttttcttaagagaaataaacacacagaaagcatccaatataaatattttctcaaaatcaagtggtcctttataacacttttcactatgatgcatacaaataaaaagcagggcattaagagatctttt

SEQ ID NO: 60456 - DNA, 1530 bp, Bovine  19866880480918
  misc_feature (1)..(1): n is a, c, g, or t
natctttaaaatcttcccttcttttcagccaggaccaattttttatgtagttccaacacactttaaggaaacaattcactgtaccctagacttctttgaacatttacaccattgctcatatcagcaggagttttcttggaattcaacagcaatttttatgaccatacatgttttatacaatgttggagctttttttttttcttttctgaattagtttttcaaaagaaggggataaacacacttgccattttataaaaagtgaacaacaccttctggccttactcagttgtaggaaatgagttttcatgaagatatgaaagataggaaagagcagtttttacaatttaccacagtgagaggacagatatatattaaaagtaacagtagcaacaacaaaaactattggatttctagaaacttcttgaataggaaaaaaagcttggtgactttgggtttgtcaaagatttttaacataatacaaagagcaaaaggaaaaaaaatgtttttgctcttttagaagcacagttttaaaaaatgaaaaagcagagtgcacactgggataaaatactttccaaacagacattaaacaaaggatatggactatagagtctctcttatagagaacttatgtaactcaataatgaaaagcaatccaatggaaatggggcaaagatttaaagggttgtttgatcaaagaacatgcataagtggaaaatgagcacaggaaaaaaatgttcaacatcactatcattggggaaatgtgcatttaaatcagagggagatatagcacacctctagaactcttaaagttaaattctaaaaacctgaaaataccaagtgtttttgagtatgtggaacagctctcatgtataactagtgagaatgcaaaatagtactgctgctttggaaaacagtttaatagtttcctgagaaagtaaacatgcaccccttaccatatggcccagccattgtattcctaggtatttacccgagaataaagaaagcatatgtccacaccgaagaactatacatgcatgttcactggagcttcatctgtaataacccaaactggaaacaacaaaaatgtctagcaacagatgaatggataaacaaattgtgatatatccatgaggtgtaaaagtccttggcattaaaatagctgatgcatgcagcatcatggatgaatctcgaaatgattatgctgagtaaaggaagccagacaaaaattgagtacatactgtatgactccatttatataaaatcccagaaaacactagttaactttatggcaacgtataactcatgtcagtggttgcctgggatggaagagggtgattggagacacaggagaaatattacagaggaatacaaggaaactactggatctgatgggatttgtttctcatcctcattgttgagatagttccgtagatgtgaacatatgttaaaaagtatcaaatcatgcccttgaaatagatgctgtttaatgtatgtcaactgtaactcaacagatctttaagaaaaagaaat

SEQ ID NO: 60457 - DNA, 1299 bp, Bovine  19866880548689
  misc_feature (1)..(1): n is a, c, g, or t
ntccagggaattccctggtggtccagtggttagggactccatgcttttaatactgagggtacaggtttgatacctggttggggaactaatgtatcacaaattacatggcatggccgaaaaaaaaaaaagactagaatctaggtgactgtacttgctcagtagaattttctgtagaagttaagacctcacatgctagagctgatttgaatcacttatataaccttatattatttaattaatctaagcctcatttttaaagtagttactgttaagaattactcatgctattacagatacaatgcttaacaaagtgcttgacacacagtgcttaataacactttagttatcatcatcataattgtgtcaccaacaattcctagatgaaattctactttactgatataatcactatatcagacaatgaaaagggaagaatctaccataagaattttctcatgtattgctccatatcctttttcaacatttattaagaccttctttgtacaagaagctgtgctcgatatagaggaaaatatagtcatataagacatagtttttgccctcagtgaactgtaatacctgattttgaaaagtaaataatttacatggtggagaaacaaacaaacaaatccagaactgcagtttttttcttatttttaatatttgatatagaaaatttaaagtgtatgattccccttatgttagtaatgataagtagccattcagtccctactggttctcctttatttgggggttgatgaattcttcaggaagttaaagcagattatggacccacaccatatcacccagacaccagttggaacataatcttagggattctatattgcagaaatctctaattctaagggtgtaacactggctgttgaaaagctcaaaggagggaaagaaccgtgaactgaaatgtacatccctgagcctttgggcccttcagtggtcctcattctgccctgcggacggcagcctgctcccttttgcagaacaagagctctgtagatatttggagacagttaatgtgctgaatgtctccatttcctttggtggttattcatttctcatgggctccagactctttatcagcctgttactttcctctaactgtgtaatagctctgtaatttgtttcctttaattacaagaggaacatattcttactgtaaataaaggtgaaaccaaatcaaaacacaaacaaatccaaagctatacagttttgggtgaaataaaaagtaaatgtgtctacaccatttaggcaaattactttcctacaaacaactgtcaagag

SEQ ID NO: 60458 - DNA, 1636 bp, Bovine  19866880591463
  misc_feature (1)..(1): n is a, c, g, or t
ntttccttatctgtaaattgaaaccgtaaccatatggtatttgtgtatatgtggcctcattttttaacttttcattttgaaatgatattagacatgcagaaaaattgtaaatacagaattcctaggtatacttcaccctgcttcacttaacacgagcatcttacagaaccatggtatatttataaaaacagacaaatcagcatggctataaaactttacactgcaaactttagatttcattggttttttccattaacacattgttctgtaccaagactcaactcagggccacctcattgcatttaattgtcatatatccttagtcttccccaatctatgacagtttttccaccttcctttgcgtttcctgcccttgacacctttgaaaagcagtggctaggtaattttgtagatcatctctcccccagttttcccatggataaactgagattgtcgatttgggagtagaatactctctctttggccacatgattttgtcttctgctccagcttgggattttataaaaggaagtccttttcccctggtctataccctttttgtcattcctccaggtccagcataatcggcacattagacctgaaagaaacttaagacagacagtcacacaaagtcctgtgtcctatctagttttatttttaggaggctcattaatcttcaacctttcttaaatattatttattctcttcatttcttatgtgttttcccttctctctggaccctgaagctaccacagatgcaacatgtctacaatgacaagataagtattatgttctgtagaagagttttctctctggtctctaaaacctcacagggaacctctttcaaggtagcctcgtctatctacattggcagggaattagcacatgcaagacctgtgtctgcaaattttctagacctcacagtttactctttaaaaagacaatgactcgttcctaattatgttttctcttgaagaaagaacagtctccctggatttaaatcacacctatcaatgtgctggttaatctttggatggaatctgtaaaattggaacacaacaaaagcaatatttctttgtgccttaagataagtctctaagtcagtttgtatacacaactttcattttagataaatttgatgggtagaattgcctgattttggagttaagaaattaggatctgagaactctgcagatgttataaggtgaactcaaaggcctgtagaaatgctgggttttggcttccctggtggctcagagggtaaagcgtctgcctacaatgcaagagatctgggtttgatccctgggtcaggaagatcccctggagaaggaaatggcaatccactccagtactcttgcctggaaaatcccatagactgagaagcctggtaggctacagtccatggggtcacaaagagtcagatatgactgagcgactcactatggaagagaaaataactgcatttctacttctttaaaagttccatcacacttgctcttttttccttgaacacatggtgctctgctctgactcagggccactgcacacaatgctccttctgtctacttaactctcctccccatctctctattgttttccttaggaaagtcagtcattcaccttccagactagatca

SEQ ID NO: 60459 - DNA, 2370 bp, Bovine  19866880707189
  misc_feature (1)..(1): n is a, c, g, or t
ntatgagtgacaggcaatgcatgtgatgctacctgatacctgagttagaaagcaggttcctgactaccttgccagcatgcctttcatgtaacatttagaaggtctttctgacttggttcaccctttctttgaaaatacgatccaagatttaatgaaatgtgtttaaattaacaattctcctatctaggaggtacagacctctaatgaataattggaaggccgattacttacatatctgtattctcttgttaatcactttaattaccaccttctgaatcttctatgcagcaaaaactcaaagaagcctttctctccagagaatgataacactttcctgtggagccctaaacttctttatagaaaactaggtcttagagtactaaggtaagtctcatttttacggaaatgtatgatccaaaatgcccaaacttccaaaatattgtaaatgtgaaaggaaccatacttatttttgaaaataagaccaaaaaatatctaccttgggaatttacttaaacagtctctctgtagatgagtttattttctagcttctttctatattcagtgcttacagaggcctaacacgggccaagtactcaactaggaacacaagatatctcacataagctccttgccttcaaggaactgagagcttagtagtggagacagataagaaaaaagcataagtaacacacatgtgacttaatgtaaatatgtatgaatacagcgttacaaggttaaagaaaccaatcattctgtgatgagaggagttgggaaagagacaagatggaggactgaacagagtttgagagaaccagcaaggtaaccagagcaggagagtggaggctgattaaaatagactcaagattctgtacaaaggtatagacatgaaatgaagaatccagcgtaagactggacaacaagaggagaactgggaagatttgttgtgaaggactgatatgcctcataaatggagagctaatgaaaacttgtgatctactgaacgtttttaaaaaataactttaagaggaggggagcagacggactgagaagggtcaagctggagcagagggatcagatagaaaattgccttcagatcacaagagagatctgcaggaaccaggatggagaggagggaactagtcgagagctatttcagagacacaatgggctgaatttgcttacagaggctcaaagttattacaagcatgagttttggggttaaatgaagttgaatataaactggggctctgccacccactaaatgtcgaccattataccagttttcttatctctctgagtttcatattcctcatctttaaaatgaagatcatgttattgagaggattaaataagctaatggtgtaaagcacttagtataaattaaaccctagcatataataaatgcttagcattcactgaatgctggtattatgactatcattattattacaaatattctaatgaataattgatggagagagatagcagagaaggtcattggaaatcactatcaagcttgaaagtctggtaaatgataatgccattaatgacaaagtcagtgactataataatgagcatttactgagagtttaacatatgccagacagtgttttcagaggttcgcatacacaatctcctttaatccttataagaatccctgatattatcatctgccctttgcagaggcaaaaactgaagtacagaaaagttgaatagcttgagtaacaaagccagtaagtataggaacatagaaactttggtttaagattctacatatgcacagagaagacaagggatgttctgggatgggtaaagggaccttggtgagggaagagagatatcattagctaggtggagtttaacaagctcagagacactgacgtggaaaaatgtagtagtaaagttagaaatgaaggtatgttcataaatcatttttctactcaaaagaaagaccaaggaacaaagaacctgagatagcaaagcatgaagagctactgctagcaggagataaatcagaaaggcagaagtgcctcaaaaacaagtttgcaaggcaaagagaaaatataactgaaataatgcaagctcaatttccatgcaaacttctcaggaagcaatccacatgtgatggagagaggcatctgtactactccattttcccaacatttatatccccaatgtcagccgtgagagtcacaaggctaggtgttgttccttgaacagctctgtctcaatgaaacaaaagggaaatcaggatttttcctcttggggctgctcatcaggaggtttcagatggcagagaaaggaagaatgtggctttcctgccaaagacttcaccaggggcttctgggaaatccatagccccatctggtt

SEQ ID NO: 60460 - DNA, 3398 bp, Bovine  19866880752169
  misc_feature (1)..(1): n is a, c, g, or t
naaattctgaagcacccaaatttaggaaaatcccttttatagaaagactatcatcttgggcaaactcccaagaggtgtcagtcccgtgaaagaggcaaagtgttcattagtaggtgaggggtagctccaaaggtacaaccatctattaaagctgacagccatctgccacgaaacatgcttctcctctgtccattttgtgaacctcatttagtcagcactcctgctctgtaaggaatcagtgcactaatgtgaactgctaccactcaaaagtaatggagtgagaatgctattattttaaattgtttgaagccatgcagtccctaacttcattagctccacttctaggaaacctatctaccaaattctgtggcatctacagaaatggaagaaacccacagaaatgtcattctattacaaatgccattctcttcattacaataactcacacacaaatgtatgtacatttgacttatggtaggtaggaaaaggattctgcaaatatgcccatgtcctaacccctaggatatgtcaatccgatgagattatcctagaatatcctggtaagctatggaagagcctgaaaagcagaagaggtgggaaaaacaagtcagaaaatgaggcagaggagaaggcaaaagctgataaacacaaagagagtccgtgaccatgggctgagggctgtttatccagaactaagagtagcccctggccaacaacagggaagcacacagaattctaccaacaacctgaacaagcctaaaagcagatggccccgcccctagacgacagcccaggcctatcaacatcttaactgtgacctcgtggccataagcagagaatctgagtcatcttgtacctagacttctgacccatggaaacagacaaataacagatatttttgtaagccatcaaatttttggtaacttgttactgcagtaataaaaaattcaagatttgtgtgagtaatccaagaacatcaaagatccaaaacgggtgagccttactttgattcattcacctaaatatctatttttggagtgtctcacctactcttgtcaggcacgtggtggtaactttcacatgaattaagctccctagtggtgaacaaaaataggcatctcctccactgctttcagtccagtgggggatagaaatattaagtgaacaacatttatataaatacatatgaaaatagtagccaaatggaggggaggtgctcggcagtaatagtctgtatcagaggttctggtagcaatgtgtcaactaaacttccctggcatattaaaaagttgaaaaggtgcagattgaggcaagaaagaccagtgaagactgtgaagcaagagaaaacagagcaacggtgagaaactgaaaatgctggaattgtaagattgggctgaagacagacataaaagctagaatgagagggtgttataaaccattctaaggattttccataaagaaaatacaagcaggaaccatgcttctaaaggaaagggactgtttactgattaatgcaaaggaattcttgttgattaataattctagaaactgttatatacatgaaatgatactcaggctgcccctgtgagcaaaattttaatccatggcttaggaaatgaagtacagagtctgtccttcaaacatcagctcaccacaggtttagagaagccctaattttggcattgtaagactgagaaaggcacagaaggcaatttattctctttgagattcagtttacttatctgcaaaatggatacttttatacaaataggagacacaaggaaaacttgctgaatcaagaagggaatgaattcctgccctgcctgactcaggatcacatgaaaaccaagtacacgaacatgttttgtaaagcggaaaatactttacaaatatgaataatttctattaagtaacatcttcatacaagagatcaccttaatgtttacaaagacggaaataatagttaccataaatggactggaaccaggtcagtgaaggtcaaggaatttccaccccacttacacctgggacagtggccatctgctgtagacagatcaggggactatgagcagagggacaagaagttattccagataaagcatcttgaacccgaggtttctatgtaaacttgctcaaattagaactagaaataatatagttgctgttgttgtttagctgcccagtcatgtcggactctttgcgaccccatggattgcagcgctccaggcctccctgtccctcaacatctcccggagtttgcccatgttcacgctcattgcatcagtgatgcattccagccatctcgtcctctgatgccctcttctctttcttccctcaatctttcccagcatcagggacttctccaatgagtcatctgttctcatcagatgaccaaaatactggagcttcagcatcagttcttccagtgaatattcaggttcccttctccaggggatcttcccaacctagaaattgaatccaggtctctcacaatgcaggcaaattctttaccatctgacccaccaggaaagcccaataatactggagtgagaagcctagcctttcaccaggggattttcccgactcaagaattgaacagagaacaatatagtaagtccactataaacgaaccagttctgatccaagagcgcattttaagtccaatgaagttagcctaggtatccaactaacacaactggctacatagtactgtaatataatagatttataatacttttcacacaagtaatacataaaaaaaaaattaaacattttaaatgtaaagtatagcaccttgaaaagtacagtagtacatacagtacaacagctggcatacaagggctggcatcaagtgaacaagcaaagaagagttactgcctggagaagggagaagtggtgggaaacggtagagctgaaggacggtcagcaataggagacagagggcaagcagcagtgtcactcatgcctgacattgatgacacgggttctggttcgctgctggaaccagacatgtgttcacatctttgaaaattcgcaacttgaaggtttaggggactttcagtacaactgccccagtaactctagggggttattaatgtaacacttagttatcattaaagtaaaaatctgcccaaaattatgatcatttacaagtttgactttctttaaaacaaaatgtttgtagggtgaccactatccttccttggaaacctgagaaaatgttatttctataggagctctgtttctgaaatctttctggccaagaatatcagtccaagcagtttcatatcacagagagaagagtgtagtattaaaagcccgaggtgtggattccaagacaactgtgttctgggtcacagctctgccagctagtaggaaagttatttaattccagcaca

SEQ ID NO: 60461 - DNA, 3084 bp, Bovine  19866880753372
  misc_feature (1)..(1): n is a, c, g, or t
nataacatatggaactgtattcaatatctagtgataacccataatggaaaataatataaaaaataatgtatatatgtgcatgactgagtcactttgctatacagcagagattggcacaacattttaaatcaactgtacttaatttttaaaaattgaaggaaaaatatttgtctttgtggccagcccaaaataaataattttaaaagtttatgatcaaataaatattatctatctatattttcatattggtcagcagtacagtactttttgcatgatagcagcagagctttgtcagggcagaaaccatatatcaggcaaagtctaaagactgatattgacatatattcactattgatactacatataaaataaataattaatgagaacctactttataacacagggaactctacacaatgctctgtggtgacctaaatgggaaggaaatccaaaaaagagggcttacatatgtaaacgtatagctaattcactttgctgtccagtagaattaacacaatactgtaaagcaagtatactccaataaaaattaataaaatcttttaaaaaatatttactatctggccttttaaaaaggttgttaactgttgctctaaaccatcagacaaattcttcccaaatagccacactctgcctggactcttcagcaactgccccttcagaatagctcaccatgggaactccaacagaatccatgtggctgggaaaaattaggtaatgctattcttggaatcggttacatttgcggttgatatcactaggaagctaatgattaaactcaactaatttcatttaggtctttctaaggacaaagtccttccatagctcaggctcaaagaactctttgatataaaaacaaagtttgtataatcaaaaatgtatagctccacagagtgatgtacttacacttgtgatctttcctctgccatatctgagattgctcattccttgttagtctgggagctcaaactaaatagtgtaccacttgtctccatcaagctccttgttttagaatttcacatattcctttcacccagaacatgtatctcaagtcatttgaatacacttgtaagtgtgattattagattaatatttgttctaaaaaaatctacaatatttatgataattgtcaccatgtcaatttcttgttacttaacagattccttgaaaggactgatgaagctccaatattttggccccctaatgctaagagacaagtcactggaaaagactctgatgctgcggaagagtgaaggcaaaaggagaagagagtggcagaggatgagatgctagaatagcatcaccgactgaggagacatgagcttgagcaaactccaggacataatgaaggacagggaagcctgccatgctgcagtcaatggggttgcaaagagtcggacatgacttggcaactgaacaacaattacaacaacacactccttccttaggaattccttatattcctgaagaacttagtacagtgtggggcacagaggaaatcctcaacaaacatcttttgagtgatatctattgtctatttagcaacaagtgtttattgctgtttaccccgcataatactaggttgcaaatttcttttgactcttctcagagcccatcaatggggaacgcatttatcagaaattcagtgactcttctttgataaactcaaagtccaatcaagtttgatttaacaacaaccaactctgctactcattttacagaaaatgatgttacccagcaggtcaaagaaacttggtggcagctgttatttcacatgagtgataatattttcatctcctagtcttctaaaataaaaggccagtagactgtaaaaacagcatgaaccattctactaccagaaggccactgtttccttgtcacccagcaatcacttctgctagattccaacagttcactttgtcttttctgaatgtgctctttagagacactgaaatgcagctaggaattgcaatggcaagtagcatttttttttttttagcaatttccatgttaataaaggtttacaaataggaccaccacaagggagatgagaataaatgatgctaatagtagcagtgagaaaggaaatgtagaaattatctcagtttttatcaaaatatctcccatggaatagtcacgtggtaagtagttccatgaaggaggagttctatgatcacatgaatttggggaaaatcacaaagaatgggaccatcttgaagatgggaaaagtgtgttaccatgttcaaaacttcaagaaactttctacagttacagaaatgtgacacaattcaactcaagaagtagaaattgctagtgctcattcacatctgggttttttcccacctttcctaagcaaaagaagagtctcaaccctttgccacagggtggaaacctaaggctagttccaatcaatgaaatgtgagtgtgtgtgtgtgattagtgtcactttcaagttgaggccaagagaggcttctgtgtgggcttccagatcagtaatttcctacaaggaaatcatgagtgccatgatgttccaaagacagagccgtttgatgggaatacatcatgtcactaagtcaccccatggaagctggctaccccgggaagttccccaagtaccacaggacttcaaatgagcaagaaaaaaaaatcctttttaaatttaaaccactgactcttcagaattcatttgttaccacagcatagcctaccctcatttatcaaatagttcttaaattgatttaactacagaattctttattctcaaaaaaatatatatcacacagaaaaattattacagggaaatgcgctgggaatcaccatgatatctaaaatagttttgttttgtttttttttcttccaggaaccatggctaaaaacattttgagcaaatatagaccaacctgcaagagagacagagggagaattcaagagaggaagttcaaaagtggaagagaggtatgacagcagacaactgggttgaaaatccaaaaaccagagtcctccctgcttctgcatcccctataaatttctcagtgttgtagacccagtgtttcttctttcaacaat

SEQ ID NO: 60462 - DNA, 857 bp, Bovine  19866880833915
  misc_feature (1)..(1): n is a, c, g, or t
naaatgcaaaatgtataatttttttttctactttccccctgaatttcctccagcattcacactgatagtgcattaaacaagcagtctacatggtttgtgatttttgtgctgagtcgtatgtcctcctaacgggtagcattaacaatgatgatttttctctgacaagcaacagtaggtttgggacagcatcatgctttattctcttccttgggaaggaggattattaaatttttatctagtgattcagatgaaatattaaatctctttcaaggaaaaaaaattcttcctaactttctcatatctcataatatgtgatacacacattttaatgacttatctagtatcactgccttcttaagaaaataaaaatgatattctgattgtagagctcaccatcattatcatcatagcaattgtttgttgaagaattcctatatattaggcagaattgtccatactaattaagacagagcattaagttttttaatttaaccattgtgataatgctatgagctaaaaagtgtgattactattattttatacaggaaaaaaacagatatgagaagataaagaacttgtcttaggtcatatagctagtaattcaaggagtcagattttaattcagatctcaatgactagagaacatatgtgctatttgctacattatcttatactcatttttttaacagaaaaaaatgttaagctataagaaaatcaactgatttaattttaaaaaattataaaccactgttcaggggctatttctgggctgaatgcatattcaaccccaatcacagctatcaacagtcgtttaacctagaaattccataacattcagaggaaattgaaataaaaat

SEQ ID NO: 60463 - DNA, 1375 bp, Bovine  19866880959152
  misc_feature (1)..(1): n is a, c, g, or t
natgttacataaagaaaataatgatcagcttactagttaaaacaggtaaataactctctgctgggggaaaaaatagtaaattgccaaaataaaaggcactaaacaaatactaagtactcctggtaaagaaatattgcttgcattagccaaatctgtttgtccaatttctgtgatgctttttcttgcttctctagaactctaatcgaaaaagcaatgacattcctcagtttggagagcctgtcacattaacatatcgatcagtgatggcttttccaagggccttatgtggaaatatccattcacaaggaccctattatataaagagcatgaaataaataaataagaatggccatctttgtcattttccagctgtcttcactgaagtaaggaatcagtttttgtggttaaaggtctaacaacttctgatcttaaccattagtaccagacaaaagattaaggctccactgatttactgccaaagcccagagaggtatttcagagatttgtctttaaacctccaaaccttgataatgcaccccattaatataataaatttgagtatatactccttaatatatgcacttcatggtaaattacacatatactattatatttgtatattatgcactttagaaaacatacaaaatgttaaaagggtgaaataaaagtatataaatacaaagctcttatttaagagcacctgaatagtcttactgacctccatgcaatatgtgaacccacataagagatttatcttctatcacatcaaggagctatatactactaacagtggtgggtatcacctgcttgtgctgtctgtcccaaataataactatgtttcatcctgtatgcttatgataatagcactcataagagacagacctcttctccactgtacacatttgttcattaccctctggatcactggggcattgtctgatgtccacatttctcagtgggcattgattgagctggagcctctggtgatttatcagtctttccagatgaaatagtcaacctcacatgccttccttctctacaatttacttttctttgggggctgaaaatactgccatttggttgaaagtacttgcatgcctttgcagcaaaatatttttactagcaaagagaaaagaagcaaacccagtatctgggactgtaacccaaaaggtagtgctaataaatacccaaatacatattaactttagaaagtacttaccaaatataattttataaactattaaatttcttggcaacttcctttttcctttaattttatattctgttctttactaagccattttaaattttaacacaaaagtaatgttttaaatgatgagcaccacataaatgaatgccattcagggagataatc

SEQ ID NO: 60464 - DNA, 494 bp, Bovine  19866880975669
  misc_feature (1)..(1): n is a, c, g, or t
ntgattggaggttgtcaggcccaccttgcaagacaactcctctctccctggaaggaggagtaccttgaaatctgtgggttaacgggaaagggaaaagtccttacgctggggggaaggcggggcaagccgaaacaggcatatctctcacccggggtttctgaaacccattctccgaggggggagacgtgacggtattcaaggatacttggaacctgtccctttggcggagacacgtagccgcctccagccgctactcgcggccgatcctgtgcagtggagctcccccgcccccggcaggctccctccgctttgcaaagggaggggggagctggggaagccttgcacactagtcttcctggagctgcagacgaggagctccgtgccctcccgagcctcttcagcggcttcccctcggctgcgcgggtgtgcaggctctcctcgccacccccacgcacggctcgccctcccttcctccctccaaccccgcggccgga

SEQ ID NO: 60465 - DNA, 1475 bp, Bovine  19866881077984
  misc_feature (1)..(1): n is a, c, g, or t
ntgtcagtctgttcaggcaagagagttaaaatcttaggagagtctggaatcacaagtttcttgcattcaaaaataatgtggcagcattttcagcccagctgtgaagtgctgcatgactaagaaaatacaagtcccctaggagacacactgtgctacatgataatgaaatcaggatgaggccagctttatgatctgtttggtcatctgagaggccagttttttttttgttgttgtttttaaaccaagctttaaatagaaatttcttcattgtaaatactcttttaaaggcagcttttctgctcatcactttccatcttctcttttttaaagtctaacttcccccccaaaacactctctccgaaggaacagttctgctcctgaataataattttgtaaaagtaacatgaaatgcttgcatttatagggtgtaggactgacaatatataccgttttggatgtgtgctaagtcgcttcggttgtgtccaactctttgcaaccctatggactgtagcccaccaggctcttctgtccatgggattctccaggcaagaatactccagtgagttgccatgccctcctccaggagatcttcctgacccagggatcaaacctgcgtcttctacaatttcttcattggcagcagggttctttacaagtagctccacctgggaagcccaggtatattttttagagcttaattaagaagatatcaccataaaagttctgggttgatctttatacttggtgagggctgagtctggacaagggaagcaaaatcaacatgaatttttatcatgtaagagttgaagtagaagccattatgtactacagttggttagcacatttcattggtgtaataatgacatcaccctccttgttaagggaatctagtgacacagtcgccatgtttgaagacggacaccatgaccggtgctgccactaaatcaaaagtttgtaattggtcaaggatttttaaaactgtttgtgttttcctccagtgttccatcccacctccactcttatttactattttgatgcagatatttgggctctggtccatctgaacgtactgattcagaactgctttctagatatgcgctggactctgcatttttcagaagccaaatgtgattcttatacataatagtatgttggaactaatcctttgacaaatgaaatcataaatggaacccccaaacacaaatgtactatgccacatgttggtcttttcatagatgtatgcattccaatcacttgtatgtgactggccctcccccagccatgaaaacatccaccatgaccttcagttcttcactctttacttcctggtttcctagcctgctggcctccaaaccttgacttgtgatagtaagctgatatttctctttctttttggtggccactctggacaagcttttcacccttcagatccatgcaccacatcacagggaagagacaaactggggtcacaggca

SEQ ID NO: 60466 - DNA, 1742 bp, Bovine  19866881097148
  misc_feature (1)..(1): n is a, c, g, or t
nccaagatagggaatatctttatgtcttagttaaacacaatttaaaaaattaaatggttctatcttaatgacggaagggatatataaatctaccatctcttccctgtacatagaaataaccctctgtcttttcacagacaaaataatatgatattgcttaaatgttgaattaaaaaaagaatcaaagtgtaatgaaaatctaattattagttttagaccccagctcagcaaaactcccatcatgatgaatgatatatagaatattccacagtagtcttagaaaataaatttacgatgatatgttaggtttgaaactactatagaaaatctctaagatcattgagtcatatttggaagtttcatggaatcagctaaggtggagtattgttttactttccagtagacttgcagacattcatagtataatttaaatctcttttagaaaatgaacaaatttgcttttcattacatattaatatggccctaattgctttattaccattagcaatttagttgtattatttaaagtgtgcatgcataaatacatgcttaatactttgattttttttcctgagtataaaatgcttaaatattaatacagtgacccaagttcttttgaaggcattcttattttatgttttattgagtattaattaaagactgtttgctaatcatccctcgttaggtcacatattaatagagtttttctgtggacaagacactggttaaacttactctatattagagaaatttcatagcctttcatgttacatgagaatgcagctaaattgtagtctgcatgaaaactcagagtaaattccatgggaattcttgaggtgcaaatcagtcttacactaattgtactaacctgaatttgcacaatgcttgataactctcatagctctttcttatctcaatttcacctctgatcttcacaatatgctcaagacggtagtaatataggtattataatctttaatttgtaaatgcccttgttcagttgcagtctatgaggaatctgcccaatattgaatcccacttcagaaacaaggttcaagtatacttgctggactttttccttgtagtatactggttttaggtccctgaagtactcactcattgctgacttctgtgcttttgattgtgttctatggttatttttatgccagtatctaaatgaagttatgaataatttttcattaaagaatttcattttggcattgacacaaatcttctctttagaaaatggtattgaatcaagtgtctaatttgctgtgagcaataagtattaaaatagtaaggcataatggtcttgactctttccagagcatgtcctggatttgattgttttgctctgtgccttggcacattttttaatctttctgaacattgtttccctcatctttaaaaaggatataatggtttattttttattcagttctgagattaaatgagataatgtatataagcataaatgaaataagtatataagatacataataagcattgaataaatgttagtgaattccaactctttcttttgtaaaatgtattttaacccaagaaggaagaggaaatgcagaatattgtacagataaagtattttacacacattttcttgtaatacaataaaaaacaagaaacctgctgagaatatgtgtacctttctgatataaatcagtgaacaaacttgtttttaattttttggcagacttatgaaaccaattagctttgtaatatat

SEQ ID NO: 60467 - DNA, 1438 bp, Bovine  19866881233002
  misc_feature (1)..(1): n is a, c, g, or t
ncactttttgaaaagatgcttgggaggctctgtagcatttggagtcatatgtgttgtctatatatccaagtaaactttatgcattctggcaggatttgatttcaaatggttagaaaatgctctctttgtggagccaattagaatagtgacatggatagtgcattattttttcttcctctgtagtggaactcctgtcagtattcctatatcttaattggctctatttgaaaggaaattttgaaatccccggctgcagtctaaatgtacttatttatcctttgaatttccatctggtgccgttgcagcagttgttgagaattacttgttttgctgctctttgggaaatgaggtgcagtggcacctgaattgatgagaacggtaccacctcagatgaggtggccttcgataatcatgggaggtggtggaatgtagttctgctaggtgcaaaggtgagaacataatttctagaagtatgcagttcagtgtggatgctttactcattaacatcgattttagagcaatgattctcaaactttttgtgttcacaagacactttggaatatgtagacctatttttgacctctcatttaaagggagtaaaagacaccaaatgacactgaatgagataacagtatatacataatcattttgtcttgtctaaatgtgtcacagactttgtaaaaacgcctgtgattatcacacttctgacttggtcattcttcagctcagtgttgttgttggaatattaaggtccactatactgatcttcctgtatgtatatttagaatgaaatcatagaatgagtttagcttgtattgtgtattcattttcttgagaggtaaaataaaactttaaattcactgactgatgatcttttaggcatagaaatggctctggacatcatctagcttgattttggcagaaatgaggaaactgagactcagagaaatcagatttatcaaaaatgaagaatcatttttggttatttcctgaagttttcagaaacttccaagaagaaaaataccttcttaatataggtttcttggagattttcctggtcatggagtcctatatgtcttcttaactcaggttctttggtaatttccacagcccagcaaaacctcaaataaaaagacgtggaaggaagttgctttatggtgtgattctcagtctgcctatgtccatatttttataaaccaaattataaactaacaggtattttcagttaattattccaaagctttgtaatcctcagactgcttgatcattcaggtcagtccagcttatcatcccagataaagaaagactaagaaagaatataattagtggtttatgcctgcattccatgaagcctggaaaatccttaaatagaggtccttaaaacagaggtcccatagggagggaaggttgagtaattacagaggtagggggtccaaga

SEQ ID NO: 60468 - DNA, 1177 bp, Bovine  19866881237981
  misc_feature (1)..(1): n is a, c, g, or t
nctaaatgataacatgatgcagttcaaaagctggtcatatcaaattgccatctaatcatttaattaaagccccatgctggcaccagccatcctcagggcccatttttcatttgggcacatttcattgcacttttcaaagcaaatttgccttttcaaaggcgaaaaatgcaaatgactaggtttgaaaggaaatgcataacactctgcataatgacagagattttcttggaaagcagtaatgcacagaaagagctatctttagggactgaggatggcttatcagccctataggaactctacatgatatttcattacagcaccaggatgcaaacagaagtgaaataccaaatacacaaaaactaaacagccatccccagtcttctttttcagcatcactgaaaccacattttgaaacaagatgcatcctttagaccggtaagaccaaggcaggcagtgataaatggaggacatttatagtgtggccaagaaaatgatgaaaaaactaggaggaattgacctgttcgaagacaataataggaacacctaaaggccaattaacataaagcgttagtgggcaaattcaagtacactcaaaaaaattctcaggaatacgaaaacacccactttaaggccgtgaaataatcacaataagggaatgaaagtgaccttaaccacataaatcagcatcttcctcttcggtgtggggaaactctcagaagcactgctccccaattactgcatcttttaccttgaaagatgaagctgcagcacaaattttatgaatctgcagatcccaaagtgagaagcaattagttcaaagaacagcgagtggcaaaaaacgaacacctgttaatttattctttaccattaaggagagaaggaaagcttaactttaggctgccagatagaccctttctccccatgaaagtgccaccagcatctggagcagcagcatccactgtgaagttgagagtctggataaagttcagggctgcagactattccgtttcatggccagagcacatgtggatatttcaaacaagagcttctgatcaggggaggttcactagtacttgaatcatggctggttagctcagccaaagcctccatcaagagtaagctaaagacctgattctattacttatatagaaaggatggccatccccagctgggaccc

SEQ ID NO: 60469 - DNA, 1250 bp, Bovine  19866881259149
  misc_feature (1)..(1): n is a, c, g, or t
ncatctcagagaacctgaaagagtgaactttttttaagataggaaaaaatattgaaaaaataagctgcaactcactaattgtttatcagcctatttcttttctctctactattggcaaagggaagaagaaaactgaaaacctgcctacacaagttttcccagctgtgctactcatcttcactgggggttgtctgttcaaggcagaaataaaaactgcaaaaattcagggttgtgttaagtacaaaaaccagtacatcctaatttcagagcccaatctcaattgctggcatttgaaatactttggagataggagtcataataatttcaaaaaagccttcccccgagaaagcagccagaccaagtcattcatctgcaatatcatagctgagggctcaaagcgagcccagagttcaggcatgtggtaattaggtctctaaatttactccactggctgggaaacctgtcaaagaaattcttatcacgggcagagttaattatacataaaatgacagaaaagacacgcgtgggagacaaaaggtgtcctggagagagagatggccagaggaagggcagtgaacggccgtgtttagattgggtccctgtgaatatggaaccctaccagcctacaagtacaaatgagtctagtgggattggaaaacactgtcttcagtgtccagacagatttatgttgagttcattcatggaaaggtaaaatacactacaaatccagtaaccgagaactttctactcttcaatttacttcctcaccagtacaagaagttctttacatttttctttcatttcattcatttgttcaaacatcactgactaatatagacattcatcagacagaaaacatgacgtagaatgacagacaaagccctcccctcgcaccactgacagtctgaacagaaacagagatcaaacagcaaaacacaaaacaaataggtctttctctactgtgatgagtacttcataggaaaagaacggtgcaagggaaggcatatttgggataaagtgtataatttgaattgtgaaggaaagtggaagggggtgatatttacatttcagactggaagcaaaatagaaatatgtacattaagaacaagcagaggagtgtcccaggttagagggttttaaaatcctttgtttcacttaggtctcttgttaaaaaaaaaaaaaaaaaaattctttatttacttgtactgggtctaggttgcagcattcaggatctttcgttgcggcatgtg

SEQ ID NO: 60470 - DNA, 1143 bp, Bovine  19866881291247
  misc_feature (1)..(1): n is a, c, g, or t
naacataagacatatcagaatagaattttggagctggaagtggaactaaacagcatccaatctaatcctttcttactgcaggcaaagacatgtgagttcaaagaagttaagttccttcctcgtacatagttgagccgggacatgagcacttacttttccactttttgcccagtgcttttccactatcaaaaagaattataatacaacaagcaggaccaaagttataaaacttccactccagacagggatttgcctcaaatgaagtttacttagcaattctagttctgtctcctgcctactttttcctccttaattattgttgttaatttgtatttattgattcatctgccaggtgaactatttcattgcacaagctagtattataaaccctcttagagattacacactaaaaaggacaaaatgtggctgtaatttaaaaccttgttttccaggactttaccaacatttctcttatcttctaaaatagatttttctttgtagcagtctgttcagcaccaatcacaagattcttggaaggatgagaaactgatttcttttcctttcctgttcttatttcattattacccctttaccttttcaaactctgcttcattacttcttttggaggatggattgactaggtttattgatttattcaataaatattatatttggtgactactatataccagtcttaggctgaactctgggaaacagaaagacaaaaaaagtactgagttcctgagttcctgtggacttatcatttagcatagggaggaggaaacctgtggcagagggaccgactgggatgaagtggcaagagcagtttcttgtcttttttgcagcatgacatagacagaaaatgataatattgtatgacaaatggcaggaccctggtggtagtttggaagcctgagaggttattcttggatagatgcaaatgagtggtattataatagagcttggctgtgcacagcccttagcacgcagctgttagtatgtgccattaccccacaccctgttaccaggcagcagttatcccgggactgttagtggtcctgcttagccattggttggtaatgcagtgggcccctcccccaagcgaccaactgtcaataaatgaccggttagtggtcctgctca

SEQ ID NO: 60471 - DNA, 1070 bp, Bovine  19866881316410
  misc_feature (1)..(1): n is a, c, g, or t
ncgagttccttgtgctatacagtaggtccttattaggtatctattttatataatagtagtacctatattgcccagggatcttaatgcacagccaagagtgatgaacacaacagtggtgagccacttgtttgctttgaaggcatgcttgcaagccttctgcatgtatatagcctggactttgcaaaatttcaagataaagctcatactgagaaggaggaaagagggactaaatgatttgcttccagggcaaatcccaagtgtcagagacatttctggaagagcatcctggcaggtcctacattggtaagcttgtggatttctgggattcccagtctgctttccaaacaaggaaatatgacctgacagggatcttcctttgatgttatcgagggtgatatttcaaggagacatggaagatgtatgaaagttcattgccaagcccctgacacaggggtgttggcagaagagcagttcagatcactcttccccttcctttttagtgcttttttttttttaaaagatgggcgcagtcaccttaggacccttctctctacctctggggtgccttggagtctgactaaatagaccagcctaaatatatcctcagacacagaactgtgtgcagtgtactctgatgttgttaacacacagatctttatcacatggtgtcaatattatggagacagttaagacacagatcattggtgcaatatattgtggatgatcctttggaaacattataattagtgctgacaaggcagtagaaatagctcaacacagcaccttccctgcctcccaaaaggcttgccaagtcaacccaaagtaacaagactttgattattcaaggagagaaggcacagttaagaattctctttgcccctcaactgtagtcattctgagattattggtgctgtattttgtattttttgttggggggtaattgatttacaatattgtgttgatttctgtcgtacatcaacatgaatcagccacaggtatacatatgttccccacctcctgaactcctctgccacctcccaccccatcctacacctataggttgatacaga

SEQ ID NO: 60472 - DNA, 804 bp, Bovine  19866881366658
  misc_feature (1)..(1): n is a, c, g, or t
ntagaaaaaaagagctttatattccattgattcattaataaatgatataatcacattttgctctcgtattaagaagaattttcagtctgaatagaatctttctgcctcatattctcagttttgaactattaatgttttccacttaaacaatattcttgttgattaacaattcaattttcaaatacttatgttctgtaagaggtattattgaacatctaatttgcttgagttgagtattatttttctattacatacatttattatcttgaccagcaatcatattttaagtgaaatatatggaaataaagacagtatgattaggagtaaaatagtaggagtgatatattttttgaattaaaatttaaaaataaatatattgtgtcagcactcaggcagagccccatctccagtgactgacctagaaggaccagtgaaggtgaaaagacaatcggaaaagcacccccagataacctgtcaggccctctaaaaatagatacttctgaggagcttaagttaggtcaattggtttgactgacagtgagacccaggatcaaaacaggtgcccagagattgttctgatgtgtgaggcctaagcttgcaacgcagcaaaagaagagtcaggagctgttatgagctaagttgtgtgtctcccaaattcatatgttgatgatctacgccagtacctcaggatggggttgcctttggaagtagaatcttaaaagaggcaactgagttaaaatgaggtgattagactccgatccaataagagcagtgctcttataagaagagatagacacagacagg

SEQ ID NO: 60473 - DNA, 1553 bp, Bovine  19866881404069
  misc_feature (1)..(1): n is a, c, g, or t
nttaaaaattgtctgaggataatgactgtctttggcaggtttgttaaaaaaaacaaaacaaaactttgtatttagtatagtaataacttttactgaatgtataatatatgccaggcactttgcatagattacttattttaaacttcagtgccagtctatgagttgggtatttctttttgttttatacaagaggaaagtggagctaagagaggttgagtaacttacctgaggtcacacagtagctaggggttaacccggatttgaaccaggctgtcttatttcagagctcatgtcctaactcttatatgacagcccttcactagtgtagatctaggatctaatagatgctagatcattataccaatttaccttatatgacaacaacataatcataaaggaaaattagatgataggaaacaattacaaaaaaataaataaactcatccataaatccactatacagtgataagcactgctagcatgtatgcttgaatcttttcatgtttctctctaagtctgcacatttatacatatttggattacactatactgcttatgtgattttataactctttaaaaaattaacaataccatcagcaatttttttgtcaatagatatactcatataacatcaatgttagttgtaatttattttctgttttatgagtatgccataatatattgaactgttcttctctagatgggcatctagaaatgtgcctggatactgagaattatcttaaatggcaagccactccagtattcttgcctgggaaatcccatggacagaggagcctggcaggttacagtccatagggtcacaaagagttggatgtgacttagcaactaaacaaacagatagtctgagaattatctgatctgtggatgtattattaacctgaagtatagaccttgaagcagagaactctgaattttattggaaaggataaaattcatgtagttaaattctcccatttaatagatgagaaagccaaggtccaggtaggtaaagtagaggtattacattcacaattataaactaggactattatcttctcatccatctattcatttatcccttcattccttccatccctccctccatccatccatctgtccatcaagtattagtgagtgcttatttatgtaggatactgttctgtgtacagcagtgaccaaaacaaatcaaagacccttccatcattggagcaaacatgatggaggaattcataacctggtctcttttactgccccacattgccagttttctagatcacttgtttttgtgtcatcctatcaaagatgccagccaagtagaactgctcgatgcaagacacagtcctttcctcactgagtttacaccaagggaaaactgtgtctttctaagcaaaacaaacaagtgtagtctgctcaaaccccctgcaggggcattttgctccactgtccagaggtatttaggtatgccctgtcaatttttaatggtcctcttctcctaccctactccttacacttgaagaaacacaatttgtttcccacaaaagactgcagtcaag

SEQ ID NO: 60474 - DNA, 2084 bp, Bovine  19866881503141
  misc_feature (1)..(1): n is a, c, g, or t
nactttttcacttagagtaacttttatttaataaaacctgtaacactggatcttcactaaagatgatcttgcttcccaccatcagtggtgtgatgtctcattgttcttcacagttcaagtcctagaagaggtaacatatagatgcagtaccaaccagcaccataagtacagcatggacttgcatgtgttaattgttaccctaaatgctttacatgtaagacttcactgaatgttcacaacaccaaaatgaaatggatgctgctaatagactcattgtctagatgagaacactgagtcatggggagcttaatgaaattccccgatgtcacacagaaaagtcagaattggaagtccaagtccttttggactccagagttcttaaccaaaatgaaagtataacaaacctttactgtgttgtgattttctctgttttcctccctctgggatggtttccattatctctcaggaaagatgcatgaagtgaatgtcttggaggtagaactttattttccaaataggagccactataatatctttcattccacctgctcctttttaaaaatatgagcttgataaagggagtggttggggtatggactccagattggttggtttgcatagaaaagggtaaggctctgctatctctaaaaactagctaaccctttgagggtagtctctcaagcatcaggaaggctctagatgtaaaatcttcagaaatacagaaaataaaaagacatcttccacagatggttccagacccagacatcaactcagttcaagacttaaagtctttttatttgaggctccaaacattttatagcagagaaaatatatccttgctgggtctagtgtgaatccctgactgacagaaccatgaacatactgttttattccatgacattttacagcagaacagtttgttatgcagcagtagataaccaatactaagttttggcttgagtgatgatcgtttcaatcagttctagttcatttcgccttgtggaagggggaattcctgagtatgctgtttctcttggcattacattttcaccaattagtgctcatgaatgatatgaaaatgtgttttaggttatttttccctctgcctgcgggaagagttctcacagattagggatgctaatttttcaatgttctcatgaaattttcccttattaaaaagagaagagacaagctgcaattttaaaatctgcaccacctgaggcagccccagtgaaaaacatgtatcctgaccttcctcagcaaaaatgagttgcagtcatttgtctaatttgtaccaaaccagagggataaattctccagagtgtgcacagaacagtaagaagggagcaagcagggtttgaagagggctctttcgatctgatttagcttgcatttcataataacagaactctggtctcaatgtaatagtagcaccgacacagaagaggggaaatttatgtattttgtgggaagatatgaaaattatatttcaaacacatacatctatttgaaaaaagaatctaagagctttgaagattcaaccccatgagatgtggaaaagtgacatgacaatcttcatgttaagataaagacagaaatgaggacaggaaggaaaataaattagggacaaagctgaattcttcttctgccaccttatcgaaaaccatgcctctgggaagttcagaatacagtcccatgttgagggggtaattttaaatgataggggaaaaaagccctcatagacttgactttaagtaaaagtagtcgcaggttattaaggcttccatcagaaagtaaggacaaatgtatgataatgtgtgacttccattttatcccaacataggcaactatatatttagtaataattttggtcataaaatctagaagttgctttgggctcagaacaaaaaaggatgagtcaaaaatgactgcaaagtatttctgattctattcacacttaaaatagtcacttgaatttttaccgaaacctactgtatccatggcactgaggtatgatgttcatgtcagacaacacaggcacacttcccagagtatatactcttcccttgaactaagggaactaa

SEQ ID NO: 60475 - DNA, 883 bp, Bovine  19866881608092
  misc_feature (1)..(1): n is a, c, g, or t
natataattgccaaggatcacatgtagtcagacaaaattctacctcaatccaagtaattaatcctagttctttcctccccttagtcagtggcctgggtcccaggatgacaagattctgagcagcttcttttttgtgtgtcagatttgaactcactgatctttgctacttctcccatttcttatccttttctaataatctacattagttattcagctgctttccgccataaccaagcaaggtttggaattttgtgaagcgataaaggtgagctctattggaaaataagattctggctgccagtggaacatttgaatgcatggttgttttataaatgactttttctgctcatagtccattgatactgcttcagggaattggagatttggataaatattttcttggcttaatcctttcctacattccaagcttctctcctttcttccctcagcctgcccccaacccctggctgccatccattcatacatccattaattgatttacttctggaatattaactgagttgctactacatagaaaaccttctgataacctctgccctatatttcagtgataaaaaatatccgaaccttgccttccaggttcaactcacaaactagtggaagaggtaagatacacatacaaccaaagtgaaagtgaaagtgaagtcgctcagtcgtgtcagactcttttctaccccatggactgtagcctaccaagcttctccgtccatgggattctccaggcaagaatactggagtgggttgccatttccttctccaggggattttctcaacccagggatcaaacccaggtctcccgcattgcaggcagacgctttaacctctgagccaccaaaattcaaggcaaaaagaataaatacag

SEQ ID NO: 60476 - DNA, 1743 bp, Bovine  19866881615306
  misc_feature (1)..(1): n is a, c, g, or t
naatcaggtgtcaaggatgtactggcatataagatatgttgaagaggtcagtgaaacaaaatagcaattgatatatttcttgtgtgtgtacagaatagtagaattttaaaatatatgattttttattagcatttaaagtttcaataatactattttttaaacttgacagtacctaattttctctttaatatatcttccaagctatgttctttctaggaaatatagatacttttcataaactattgtccatgaacatgtagatcagtttttaagaaaatcagaagatattgaactaaagttcagtagttaatataaaaaagtaatacagtactaatttctgtaggaaaaaaagatggattttgcgtttgttatatcaaatataatggatgggaaaatccccacactggtgagtagtttgcagaatcatacagagcaattactccttttatttataaattgtaaaattttttctgacagtcatgggcattcaagagacctcttttccaatagagggtgcttctactccataagttatggtgaaccccaacagatgaaggcacccaaaataattcttctaaataaatgcatcatagctagttagctacatgaaattatgagttctattcagttcgagcccaaaatgaagaattttaagccaaggggtcagaagtctacccattcattttttaagttctagtcttgttacatgctttatttcagcactttcaggttaaacaaggaaactatagttagtagtatagagaaatgtttagagagactcccaaggtgccctctcagagaaggcaatggcaacccactccagttctcttgcctggcaaatcccatggaaggaggagcctggtaggctgcagtccatggggttaggagtcagacatgactgagcaacttcactttcacttttcactttcatgcaaaggaaattgcaacccactccagtgttcttgcctggagaatcccagggacgggggagcctggtgggctgccatctctggggtcgcacagagtcggacacgactgaagcaacttagcagcagcagcagtagcaaggtatcctctgaatgaggtgtgagtaactttgcctctcaaggaacctacatttgccgagtgtgtttctatttctctttctaataattttagactatgtctacctacttggcctctggctacctgaaaggagtgaatatggactatatgatgatgaatcattcacgggaatggtttggagaatgaattttcttagagacctgatgctaaagcgtggaaggaccttagcctttttcatgcctccttgcatttgatatcagtgttctcgttgtgtgactgcccttgttgtttgtctaccgattgaatcctcaatcctcatcaatctctaaaagcagcacacaatgtagaattaaatattccttccattttactcccccagccacatttcttgtaattattaatggcatttgctttattttgtcttgtataattattagttgtttccatatttgtctcttctcagagactgaaaataccccctggggaactggcttttattcatctttgagctcttctggtaccaataggctgcacataaagggtccccagtaaacatttattgatttgaagtcagtgtttcttagagccatactacatgtaaatattgaacttagaataacaatcgcaactccatagactttttagaaatgcagttgtctgtatgtgttgataagaata

SEQ ID NO: 60477 - DNA, 1169 bp, Bovine  19866880107869
  misc_feature (1)..(1): n is a, c, g, or t
ntttattgtgatccacccccgtccaaaggctttggcatagtcaataaagcagaaatagatgtttttctggaactctcttgctttttccatgatccagcagatgttggcaatttgatctctggttcctctgccttttctaaaaccagcttgaacatctggaagttcacggttcacgtattgctgaagcctggcttggagaattttgagcatcactttgctagcgtgtgagatgagtgcaattgtgcggtagtttgagcattctttggcattgcctttctttgggattggaatgaaaactgaccttttccagtcctgtggccactgctgagttttccaaatttgctggcatattgagtgcagtactttcacagcatcatctttcaggatttgaaatagctcaactggaattccattacctccactagctttgttcatagtgatgctttctaaggcccactggacttcacattccaggatgtctggctctaggtgagtgatcacaccatcgtgattatcttggtcatgtagatctttttatacagttcttctatgtattcttgccacctcttcttaatatcttctgcttctgttaggtccataccatttctgtccttacacagatctaaactgtgaaaagctcaatgagatttaggaatggaatgatgaagagtcatgcacatttttggtgctaaattgcttcagttgtgtccgactctgtgcgaccccatagacggcagcacacaaggctccaccatccctgggattctccacgcaagaacactggactgggttgccatttccttctccaatgcatgaaagtgaaaagtgaaagtgaagtcgctcagtcgtgtcagactcgtagcgaccccatggactgcagcccaccaggctcctccatccatgggattttccaggcaagagtactggagtggggtgccattgccttctccaccatctcacctaattctaagttatcttcagcttatggtgatagttaaacaagacagcatccttggtatataagggcagagtgtggaagaaggccctggaggagttcaggggacttcctgttgggtttgttttgtttttttttttgcttgcttcacttgaccacactgacactctaacaataaatactcagaaacattctagcaaatgttcaggagtgg

SEQ ID NO: 60478 - DNA, 1445 bp, Bovine  19866880408170
  misc_feature (1)..(1): n is a, c, g, or t
natatatagtagtttcttagacttctcaaagtttcttcttagtctgtttcagtgataaagtggtaaaatatgaagtagagaatgtgtgatatatgtgttaggacccttcagtccatatgaaatttaactcttcaagagagatgagagaggattcgtgtattatggcagaaccttttaaatgaacatgcagaaaatgataaatatgtccaatggactaatttcctcacagccaggtaatattcaggaataaggccacactgaggtaaggggaagagtggtgcaaaaatggaaattgaggaaaaagatcacatggtggaatagaatctattatgcaagaatttggttggcatttttcactatccaaacagataatctctaccttttaatttggatgtttagaccatttacatctaatgtgactgttgacatactttggtttatagcagtcatcttgttatttgttttctttgttccatctggtctttgttctcttctagcattctactttaaaatacgtgtaaaaagaaaattttaaagcatgattgaatagccaaaggcacagattctgcctatggagtcagatctgcctggatgcaaatctctgctttcctgttacatagctttatgtaacaattccttacctcaggacttacacatgtaagatgagggaaatggtaattcatagccaaaaggttgtattgaggattaaataagctagtagaagtaaagggcacagtgtggtgtctggctcatcataacggtacactattatgtcgggtgttgcaatggtacttatgctattgacattatacaaatgcaaagttaaatatgaaaaacgggtcgagaaataaagttcttattttgaggcatcaagttttggtggtatcgtttaggaggagtaaaaatatattgcattttgaattaactaccgaagagacatgttggattataatcatctttccctgcctttagataagtgtccgcaaaagtcaaacttattaataagttgctgcaaatgttcatatgtatttcctgtcactattgctccttccttcccatctagaggtttctctgtttggtttgccaccatcactatgagttctccttaaactcttgtaaactgtatcctaagtggtcttcctgcggggttttcttctctcaacttgcctcatgcatgggtatctgaggagctcttctaaagcattccctaatcataactttctcttccaccataatctccagtggctccctgttgttctagcatcaactttaagcttcttggcacaacatacaaggctgtctctgttctaactcttcctgtcttcctttctagctctgtcttcactggtgtctcttcctcattttgtgctttggcataccaaactactctctgtcctccatgcatgccaagtgtgtcctttctctcctccgtgattttgttcatg

SEQ ID NO: 60479 - DNA, 3393 bp, Bovine  19866880460393
  misc_feature (1)..(1): n is a, c, g, or t
nctggttttgacactaagcagttggctaaagtctatgaaattagcaggctgtggttgcttatacatctcacccatcacaactttattgacgagaatggctaccagctgtcacctctgcctccgcctctgtgcttggtgattcagactgcgtggccacagcaaatcaagccatgatcctgctatggctcttcgtgttggggtttgaactcctggccaaatggctgttgctcagctgttatgctgccaatcacctgtcactgagggttaaatgtgataggcttacccatatcttccaactcttcagacatctcaaaggcaacttgccttccacagcaggaggcagcagtcttagtgatattcaactcctggattttagaattcctgacttctggggggcagggtacagaggaaacttgctattttacagaacaagctgcagaagggcctcaaacccatgagtgggaaaaatgatgtcaggagcatatcacctaagtcataccaattttgagatcactggaaaatgtatccacacaaatgaaccatactcttggcataatggatcatagctcattacaaaaagaaagctgcctgaaatctttcacatactattgctgtgttttaatttttccctgtcagataggcaaagacataagattcagaaaatcctctcttttataaaggttttattataattgtatttgagatctgacatgcactatctttttttacttccgtataaattttatttattttttttatttttttaaattttattttatttttaaactttacataattgtattagttttgccaaatatcaaaatgaatccgccacaggtatacatgtgttccccatcctgaaccctcctccctcctccctccccataccatccctttgggtcgtcccagtgcactagccccaagcatccagtatcgtgcatcgaacctggactggcatcttgtttcatacatgatattttacatgtttcaatgccattctcccaaatcttcccaccctctccctctcccatagagtccataagactgttctatacatcagtgtctcttttgctgtctttcctccaaaagtgagagaaatagtttcatctttctgaagttacaaaattattattctaatcatagaagagtatttcacagactcattttttttccccctcaagtaacttcatacttaggaagtggggacagagaggaaattgacacttactgaatagctgccatgtgccaggtcccatgcgggatactttgtgtaaattacctgctatgatcttcacaacagtcctgagaattagaccttaatgagtcccattttgtagctaaggaaactaaggttcagaagttaagcaatttcccctaaaccatatgacaaacctggtggtacagccaggatttaaagtaattttgactcccaagtccacgtgctcaggatggtatataaaactctccccaaagctttgactggtgccatatccaagatggaaatcaatgttagagctggtctactaaaaagagcattgggtgaagactcagaacagggctctgatatttgtcattaagcttatgtaacacataaggggagacaacttatgtagactctctgtgcttctgtttgatctgtttggggagaaaacaaaatctgcttttctacacacagaagtcttttgagggaaaaagttcaataattcttgtcacagcacagttaattttcctataaggtttctttactattacttggacagagtccccaaactaataagggtttcataaaatgtgacatcacattttatgattctatgtgaaaaaaatgaaatacataaatgcaattcaagagtgttgttgacatcattattaatcaattattgactacaatgctgcttcactcaatggtgaggtggtaaagataccatctgaagaactgcctttttgcagccagattctggagctctacatgaagtccataagggaggaaatgattcccacccaaagaggttctatccatgggtttactctgaaatttaatcttgagtcctgtgatgccaaccactgcaccaaagtttcatcttcagcatttccatgccgtgtcagtatgataccaggaaaaagcagacctcagttccacactggctttgcagcttcttctctaactgttaattaggttaacagtactttacctgctgggtgtttaattctaacatgggcaataatttgatttcagaacaaaggacattcctttgcatcacaagttactttatggtaagaattttactgcttgtgcccagtgaggtttggcagagcccatttcttgacagaaatctcgaggctaaggccagactctgtctctgctatacaccacttccctgaagccatgtttctggagctctctgtatgtcctgacccagctcacagacaaggcacattttcccaaagtaaatcacaatccttaaccatcaccccccaaaacattctccttctctaagaagttatacctgtggttatcagaaaccagttgcagacctttacctacagagagtcagagaaggtcagacagtgcaagtagactctgcaggaccctcacattgcctgaaaggcaccttccttcagttaatcagagcttggaagacagtggagctagcgtgagctctccattcacctcaagctcaggtgcaccagttaattccttcccctagatgttgttttactcttgtgtggaaatggcctgaaataccaggaatggagaggcagctggctcctgccaagaagagtttggaacttttcttccctcacattttgagaaatcacatgttttgtgcaaaacaaccaggaatatttccaaaagacagaaacagaacgagtgaagaaacaatggaatagggtggaatgatagagatgcatagaggagcatgcttgttttcctcctatctgtccaaagtggatattttccctcactgggtacattcatttgactttcctctactgtttgactcgtgatcaacaatgtgcttatgcacagattcatcaaactgaaaaacatctgcctaatcatttttaccttcaagaagcttgggccatttcaatgtattatggttggttgtttagtcactaagtcatgtctgactcttttgcaatcccatggactgtagcccaccaggatcctctgtccatgggatttcccaggcaagaatactggagtgggttggcatttccttctctgggggattttcctgacccagggattgaacccatatatcctgcattggcaggcagattctttactactgaggcaccaggggaagccatttcaaagtatatcctcagctatatatcacaatgattttgactctttggtgtttaatagaattcccttccaaggag

SEQ ID NO: 60480 - DNA, 4166 bp, Bovine  19866880499267
  misc_feature (1)..(1): n is a, c, g, or t
ntcgaggacatctaaagcctttttgaaatttaaatatttagtgcatttatttaacacaatttcactggcgttctcctatcaaatcttcacaccagctatgttaagtaggtgaaaagtataaaccgaaagctcagaaaggttacctgaccctggtcagagagctaggaggaaggagcaataggcaatccagatgtatcatgagtcctataagcaagttctttccaggagccatgcagcctgcatttcactgtcctttaaggtacattggtagttaaatgacgatccacctgggacagatagccaaaatgcagtttaatatataatatcccgatgctttcatttaatctttatctgagaataattgaactggcatgtattgagtacccgttatatgccaaatcttgggctttaccccctaatgctccatttaatcttcacagtaatctgttagatagatgttatcatcatcattagtagcatttttacaggaaactgaggtgtggaaatgttcagcacagtccaatggggcagtatttgaaaaaaacttgaagcttcagacagctattaacttatgaaatatgaaattactgaatgtctggaggcagtgtggaatagcctcagcaggaatttgcagagatatcctggatttcttggtgaaaattaacaaaacaatgggaaagatgatggtgagccttctgtttgaagaccacctaagccatcttttatccaaaagaagggtgcattaaactctcttgtcacaatctacatttctgttgtgattagtttctcagatgtgctaacttctgagagctggtactaaagcaaggaaccaagaaaaacaaactttttggagactgacaggcagtaaaaagtctggggtgtgttatgcaaaggcagccataggcagtagttctgactgctagaacctaagctaaaaaacactgttgataaaatagataactaactgatcattgactgtggaaggaggaaggcactatggggtgcttagcagctcaccaagcacacttcagaaaagaggagagaaaacatggtcaaagaggacaaagagggtaggagctgggacagaatctctttaaaactgtagttttttcatctgtccagtgagggcattgggctcctccatggggcctatgcctgggtttccaaggaccctcaatcagtagcttccttggcttttcctgaaccagcatgaaatcccaagactttatgtcctgaaattcagcatcctacattcacttccagatttggatcctgccaatcaacaaccatcaaaccactgaagcacctattcagtacactaggtctctccagttactgactactattctaacatctttattctgtttatatttaatatgtttgggtgacttagcacctttaaaaaattattagcaaattcacatcttttccccattatttatacttacaagctagatataacaagaaataattcttattaaatactgtaagagtttgaagttctacaaggcctccacagggtatttctgtcagtatacacttaataactactgcagacaagcctatgcattttggatcaggttagtttcttgttatatgtggtgatgatcctctcaacagaagcaaaatcagtcagcaaggaaatgtttgatagatttaattgaaatagtataaaaaaacttggttcagttcttgttttcactggggttcactcctttcccctagcaagtagacaagggggtaggttttgtcactgatgtgaaaaactagtcttgatttcacttcttgtcctacctgacctctccccgacccctatctgaagactggagtcatcaaaataacacaccacactacgggtatccttaggaataaaaggctggggacaaggtcatgattcataatagaaacacttccccatgaccatcatattgaaagctccagttgatcacattatgtgatggcaagttaaatgtataattcatttgtttttggggaaaccaatcctacaataatggtacattttatgtgtactgtgtcagctagtgctagtttggtcaagaggccatatcactaagacatttatagaaccagattcaatgaatcttagcaattgattcttctctttggtgatctattattactgtgaaggcagacaggctgatactggatttcaggacttcagaaatagactgaaaagtgaaaaaatttcagttgtccttcggacaattgtggtctgtgacacaccccatcattatttggctttttccagtagtatcagcatgttccccaagtctcaggaggacagagttcccagattgaaacctcaatttatcagtcttgggtttgggctctgtagacataactccataccgtaattcataggaaaaagagtggaaaacctttaacaaataggataactgcttgctaaattaaatttccctgacttagaatatataagattttatgtggttcacaataaaattccctctgaattctcaagatcttattcatgaataagaagagtcttatttgctttagtggcttttccatattaaagattcaggaaaataagacctgtcctcagagcctgagtgcagtaattcattcattctccattctcataaaactgtgtgtttattagtttttaatggaagtcagctatgaactacagtgcttttattgggaacagttttccttactggagtccattttatattagagagtagtactttatattgaataaagtatgattaccatttgaaaagctatataatttaggccttatacaaagtcagactgtccatagcacaaatatacatccattctaaagtaatgaaatatagctgtactagcgccttatactaaagtataaaataacacaaatgtttcagtgtgtagtccacaagctgaaaactacatgggaaacatatggaaaagaacatagaaaattgggggaagaacagatgattgtttgtccctaattcttaatagtgaatgtccttccctttggacttttctctgttattggataagaggagagagctccaggtgaaaataacaaggaataagaacagacaaggctaagatgaaagcaagtttgccaaccatctgccagatgggaaatacaattcatgagcatctgagttgcccaagatattttaaagagagacataagttgtacatagaagataaactggctgagtctcgaactcagaaaaatctctaagaccacctattgttagtttttttaatgtatgaatacatacatctccatttctactttatagtctgagctagagaaaatgtactgcagcattattatccaggcctcattacctcgtggttaattagctaacatttgtaaagtgctttgaagatgaaaagcatcatataaatgctaagaattattaaataatatgagaggaaaatcataaaatagatacattgttaacattaatttgtattttatcttttcttattatctgctccctagcatttgacatttggggctgaactatatataaaaggctgagggagctgccacatttattatagttgtgaacagcagtattaacctagctccaaattaatatctgccaaaaatgagtcctcgggtgaaaacaaataaactgtccagagagatcagcacttatactggttgaacagttaactagttaaacgttttgtctcgtccagcaattaaaagaaaagctgtattagttaattaagacacaattaataaacattactgctttattcaaaacaatgcaaaatgtactaacgaatagtaaggtcagccaaacaattttggtgtgaaacatatgattctactttgcacccactgggtagctgcagatcccgcctctgaatagcttaggatgatatattacgggtatattatgtaatgttgactgttccctacttttttgctgtcatcaaagcaagttaaacttttcttagagctgcatttctactctctatcatcgcacctcctccctcctccaatcctaaatggacagaaggacagacggagggaaaccggccttagacagtctggcagtctgccagggactgatcttgaaggaaggaaaagctatagtcaaataatcttaaaatatgctctatcaggaacgctttcgataaaacaggaaataatagatcaagta

SEQ ID NO: 60481 - DNA, 1886 bp, Bovine  19866880625473
  misc_feature (1)..(1): n is a, c, g, or t
ntgaactttgagtttacaaacataaagcaaactaagttaattcagcaaaataggttgtctatagagatacagacaaagatacaacaaaagaaatcaggataagaaagatccagcctcttccttccatttccaggactgctgacataaactgtgtttatttccagcatgaattaacatagaacataatgaatatacacacacatacatataatcacagtctgattattcatttaacagtccagaccagacataaactaaaaatatttactaccttttgtgtttattttcatagctgttcatgcaatcattcattcatttctactaaactttattcccataggagttagggatggcttacttcaaggatatatacttagcacatttagtttcttttgtttttaattttcttatcttaaaacatcatctgttttattattatgtctaccattaagacagggctgatataatagcctttcctttagaattggcatcaatctttccacagtattctacaaccattgttgtacttattagaagcaaaatattatgaaccctatgaatgacttttctgttgttcctgtgcccttttaagaaagtatgcccttaacacttcagcatgagccaggtgaccttaaatggctctactgtcaagctttgactcttctggtgatgcatctttgataacaaccagctctataaattaacaaccacaaaggtcctttaataatactggaacctgtttaattgctgtcctctacgaagccaagggaaatatatttctatttgtatctgacctttgggattttctgctgtcagtttaaagtctgtgggaggctgacagaaaaatttaacagctagctagaaagaagaaatgtattattataactaaaatcaaccaagctggggaggaaagggctggccaaactcctaggattacaaaagcaatattttatccagagtggctgtcccaagctaactcaagtgtcttgtaatctaatccctgaagatttaaacattttcacttatctcctaatcattcacctcctttgttggaaaggcaaaagaatctgtatattttacaaatttgatggcaaaaagcccagaaactatgacacaaatgtatcacagagtattatttgagcctagggtaataaatattttctgtcacccctggtatatatttaatagagacagcctgtatctagtatgataaaggcaatataatacttagaactatagctaataattgcaattctgcaccatggagaagaaagtgactgcaagaaaattgaaaaggtttaatttgtctgaggtacaagcaactacttacacaaatatattcctgtggcttgggggtaacctccacattcttattctcctactagacaattcactctaatgtttggaacaaccccagctcagaaaagggcagtgttgttttggtgtttgttatcaaagctggagtgaattgatgacagaggtaacagttcacaggtatttggcatttataaaagtacttctacatcattttttgtttttatttttaatacttctacttcaatgttccccttgggttttactaaaatgcagattttgatttatctgttcttggttagacctgaggatctgcatttctaacaagctcttaggtgatgacaatgtttctggtccttgggtcacacttttaagtagcaagaccttataacatgaccagcatggcatttgaaaagcatgggtactgccccaagttggaactttcaggtcttcattctcattgacccaagaatatgaacactttgagtttctttttgtcctggcaatcacttaccttgtcagtgaatcctataatcctgaagcaatgctgaattgcttcaaactgtcttctg

SEQ ID NO: 60482 - DNA, 3103 bp, Bovine  19866880638923
  misc_feature (1)..(1): n is a, c, g, or t
ncagccccttaagcgtacccgctcccgcctccgctgccatgctttctctttccgtgttatatgccatcctcactgcagtccttacctgcatgatcatcatcagcaagttcagacctgtaacaagtcctagagctgggattcgtacttaggtttttctgactccccctgccttttttcttctgcaacattccatgtttcttaaagcgtgggatgtagatctctgatagtttgcacgttgattttagatggtgtgtggctatgaccttaaataacattgaattgtgtaaaagaaagttattccttttacaattctcactttaagttcttcagattaaggagaaagtcttagtggtattagtatgtcttaaattcttctcacctgtctttttaacaaaactttaagaagcccagaacattctgtgggaaatagaatctagctcaggtgtaataatgttgttttattctcactgaatttactttgtgattttcttctatttatggcaaataacacttacaatagtgagtttccacttacaatagtgagtaaagcttcattttaaaagaagtgtatttaagttaaaaaaagaaattaagttgatttttaaaatattgaagaacagtacaggtgtcttgaatatagcaaaaaaaaaagtttatgtggcagctcaatgacggaagtttgaaaaatactttcctgcaacatggcaattttaaaaataggcatctccgcacctgttagccaatgggaactttcatctaccatttgattacaccagacaggcaactggtttttcagggtccatggttccaaagtccaactggttcctcaaaggtccagccaggacctttgaactttgttgctgctaccagctcaagaggaatcctgaaacacaggtgactgataaccatggacagcaggaaagggcaggcattcaccctctcaagtagttaatgaaatgcagatcaaaacaaatgatacgccatttttttcacctattgaattgtcaggctttttcttcaagatgctggtccatgatactgaaagccttcagaaacaagtcatctcaggtacaggtgacagaagtgtattttgctacgtacttcctagaaggcaattggaaataaaatttgtaaattttaaaaatatatataatctgtggccaataattccacttctagggacttatcctaagaaaataatgtgaattgtcaaagctcaaactatgagtatgttccccgcagcattgcttattattgaaaaacattgcaagcaacttctgtgcccaaaacaagaaattgtataagttaattatagttcattcataaaaagaaatagcatgcaactttagaattgatgccatttagataaatctggaagacagataagaaatatgttccaacatttactgctattatggcaatgggatcagggttttttgttgttttgttttgttttcattgcttaacttctttgaacatcatgttcattcattactttaaaaatgtaactcaaagtatgatactatttttaaattaggctaaataatggaaaaatatttatgactttactgttaagtatgaggaaaagtagtaacaaagtatatgaatgactaatttttttttaaagagtgaatatatattcctagaaaaaatattgaaatgattttaagaaaaaattacacatgaatcttgtttgttaaaggccattttcatcttccttgttggcagactaaggttccctagaggtatcctaggataagaaagtccttggcaatatcccaattgacagaaacaaagagtggaccacagaaatggaacaggccttaacaagaataatgaatagtcaccattcattcattatttggtgagtgtatgccaagccctgagctatgaaatagtttcaggagaagttattaccacttccctaactaataaggagaaaattccacacagacaatttaaaactgcaccatcttccacaggcactaatgtaactcaggggggtgttttctttgtagcaattttgcaattttgaagaagattgttcatgacataacatggcaactgggaaaatttgtagctttcctttcatcttagaaaggaagatctgaattacatgcaccccaggagaaaatctctctttctggttgtgtgtgtgtgtgttttacaaaaacctactgaattccttagtcttccctgaagttagatgtagtaagctgaaaacttgtcagaatgtctcagttaaagaacaagcatcaaaatacaggccatgacctaggccatggggttcgaatcaaaagacctgagtccaagcccaggttctgagcagaggccagcagaggggcccaagctccctgaccttcagaacccctagacataagagcagggagctgaaccacagagattatcatcctccatatcatgacttaaaatggaacatttgaacttccaaggcatgatttctcccctttgactccctatccagtatgtatggatatgagagttgacccataaagaagtatccagtacgtatgtagccagtacatacatactggatacttactgtacatacatacttactgtattcagtatgtatggatgtgagagttggaccataaagaaggctgagtcccaaagaattgaagcttttgacctgtggtgttggagaagactctcttttttatttatttattcatgtatttattttaattggaggctaattactttacaatattgtagtggtttttgccatacattgacatgaatcagccatgggtgtacatgtcccccatcctgaaaccccctcccacctccctccccatcccatccctcagggtcatcctagtgcaccggccctgagcaccctgtctcatgcatcgaacttggaccgatgatctatttcacatatgataatatacatatttcaatgctgttctctcaaatcattccaccctcgccttctcccacgtggagaagactcttgagagtcccttgggctgcacggagatccaacctgtcaatcctaaaggaaatcagtcctgaatattcattggaaggactgatgctgaagctgaaactccaatactctggccacctgatgtga

SEQ ID NO: 60483 - DNA, 1135 bp, Bovine  19866880645795
  misc_feature (1)..(1): n is a, c, g, or t
ntggcagagttgttgctatactgttatctcttcagaacggaggcacaaggagagatgaatgcatacatcgcaaggagcaaaggagaaagagagaaagaaatggtgtcaggtggcatgttggatgcgatttttgttttagtagagattgagatgaccgtaattgtttagctgattccttcggtctgcaaagatacacttgtgttggtgctgatggttcttgactaatcctgtttcaattacaagttggttatgtttttcctaaaagcttgtggtatttaaattcagggtttataactctctctctcacacacacaccccaaaacacatacattaaagtcaatccctactacactatctaatattccatactgagacgtcaaatcttctatatgcattctctccaactaatcaaatattttaaatccagaagaccaaaaattcgaacactagaataaacacctccacacgctgttcacatcacaaacttgggtcaaacagcagtggtgtgatgtagttattggtcctgataactttcaaaattcttactttctctttattttggggtattatgattggtaatttatatttttaaaataatattatgactagagagaatctattacaaggaagatggtttaccagggatttttttaaaagttgtttatgttagtttagtaataatccttggaaagcacatccacatagttttgttcaattctagaattaagattggagttatacaaacaaccacctagtagaactcctcaaattacaaagataaacgactttctcataactagaatttatcaagaccggtatcaaaacaggatcaactataaaagctaactggtacacagcttattagtttttcttaaagccagagatgccacatgtggcacaggtacattatcggatttagttgctctaccttaaagaaacaaaattttaaacataggaaattattctcattacaactataagcttataagcgataatcaaagaagtttatgcataatgactagtagcaaaaagttattttgtgtaagtttcaggagtaatctgtataatatacatatatttgactatatacttcctttacgttctagtaaatctttagctgtataaaggtaaaatt

SEQ ID NO: 60484 - DNA, 2575 bp, Bovine  19866880679922
  misc_feature (1)..(1): n is a, c, g, or t
nccatggttcacgtacaataaggagtattccctaaatcagacatgacttagcatttcctggtgctattgaaactccctccatatttcttgcattttctgacagatttatatccagtttattatagagttctgtgacaactcagaagagaagggtgtgttcaagatctcaaaaatgaaatcgaaaaggtgcagggggaaaaaatgtacagagattcttgaaaaggaaagagacctatgttaaatgcaaaccggtattcatgatataatatacttttaaaaagcacagtagataggtggcacccagagtacgggcttcccgggtggtgctagtggtaaagaacccacatgccagtgtaggagctgcaagagacacgggttcaatctctgggtcagggaggtgtcccctggaggagggcatggcaacccactcccgtattcttgcctggaaaattctatacagagtagccgggctggctaaagtccatggggccacaaagcacaggacatgactgagcatgtacacacaaacaaaacccaaagtattacaaactgaagtttggcttggcttacaagtatttatgtgaggcagaagttggctacttacagaatatgaacttcattgtctccaaagtaaataactcctattctaatgtatgtcttcaaactcaaattgcccagtttatctacataaactagtcaaatgaactaggaaattgccagataatcctgttgctttgtatctcttatgggcaaattgattggctcaaaggctaaaagacagggattcgtgcatccactctgccacttacagacttagtctttctcacttgtaatttctttatatactgaaagaaacaataatttttgttctacatgccccattattttttttttaatttttaaggaaaaaaatcttgacaaacttctcaaagtgcatacatacatagatttaatcagtgtaccatatgctattttgtgttttgtgtctttttcttaattttgaattttcatgtatcagtatcatagccatttttatcctcattggtgctttcatgacatgacatcatatttatatctcagcggtaatttctccccaattattaaatatttattatgattctagcttttttctgttgaagaaagtgttacatccatcttcatacaagtggtctttttgttctctttcagtttactttgttggaacatggtccttgaaacaagttgcttagcttttgttatctattgtcaagtcacttcaggagaggggaagcctatagactcatctgtgtatccagggccactgccacattgtcttttgacctttcaatttattctaatagaaagtcagtagtaattgttttaactgaagctctttgtcaaggtggctgaatattttttcagtatctcatttcataattgtatttcaacatatataaatatatgctagctcagttggtacagaatctgcctgcaatgcaggaacccaggttcaactcctgggtcaggaagataccctggagaaagaaatggcaacccactccaggattcttgcctggagaattccatggacaaaggagcctggcggactacagtctatggggtcacaagcgtcagacatgactgagtgcctaaaccaccaccaccatctttgtccttcctcagcctttccacattatgtataatatcgtgtctctatattttaatttgtttttaatctttctgttgcgctttctttcatcttaaggttttgttaatgttcatcatatagaatattttactttaatataattgaacccatccttgtccctattatcttcttccacagttaagataggtagtctatttcatttccttccacagttttcatggggctatttaaaatgtttaactatataacatctggaatttattgtggcctgtgagaatcaagaactgtattgagaaaagtaaaagatatagaatttaaaaagaactaatttgagatcagcagcaatagctatggccttaggcagatcactaacctcttaaggcacggtgtcctctactagactgaaggcaaggaccttgtcttatttctctttgtcttccccacgttatcaagcaaactacctcacatattgaatatgatttgtaaactctgtatttaagtgatatttttgcacactgctgtccagttgttgtaacagcagtaattgaatctgtttctcaatttagttggctgcttgtgattgaccatatatcactaatactcaattttgttccaatagcaaaatacctgttccagtgttttgaaaaacatcatgaaatatggaggtattaaagttaaaataataaaaattaaaatttgatgctaaatcagacaccaacttatgctagattgctagtatggtatcagatattaatattttgttttaatttatgggaaattttaaaaagagaaaattcaatgcaataactgattctttataaggatcgggaaaagaatacccacccatggtacagcaagttcatcaggagcaaaacttgagaaccacatcttgtattaagcatttctagaggataatataaataaagg

SEQ ID NO: 60485 - DNA, 783 bp, Bovine  19866880712491
  misc_feature (1)..(1): n is a, c, g, or t
nagtttctctaagtccctgactccaagcccatggcctcttgcacacaccagcatagaaaatgtacatctccaagcagataaatagatctgaatatcaactttcctgcttctctcccaattcttagcaagagctgagaacacagacccaagtgaggtctgtgacttcgacgacgtcattagtctcacaaaacatactgagatccacttacagtatgctgtgaggtatcataaataattaaaagagaactgcacatcttaaaataatgagctccatatacttgaacacgatgcagccttggctttccactgttattttttttcccagttctctctgatgtgcaccctggtagtcattagtcaggagcatctgtgaggttttcctgtgtcatgagatgttagcccatttttcctagagaatccatattatttcatggagctctctgaatttgtacactgtgatattcatgacactgtaaccagcaatggttagtgtcagcattccttctcctccacttcgtctgatcttgtcactttccttcctttgggaaattgctccccaacacatacacttcatgtggttctgatgaggctctcaggcaaattatgccaattcctggtctaaacttggactgtgtgacccaggcctggtatctcaggtatcccctcagccactgtgactggcgcagggtgggagaaatgccctaagttaggcccacttgtaattttttacatatggctgcctccctcccccagatcacatcctccggcattggcactccccca

SEQ ID NO: 60486 - DNA, 859 bp, Bovine  19866880747075
  misc_feature (1)..(1): n is a, c, g, or t
nagaatgttgtctttccagagactctaagagcaaaaataaaatgatgcaatgcaggatgaagagggaatgatttcagttattaacctaatgtttagttataagcttattattataatacgattatatatttatatggttagatagcatacaagatggttagagagcatcaccaactcaatggacatgaatgggagcaaatacccggaggtagtggaggatagaggacggtgggccacagttcatggggtcacaaagagttggacatgacttaacaactgaacaacaacaataataattataatatatttctattgaaactgtcattctgatgccaaaatcaaaactagatgagtgttaatgaaattaataagaatttcaataagatctttgtaaatttctgtaagtttcgcaactgaaaatgttaaatttctcccctaccaatgaattttaggtgatgctagtgaagattgtgggagattcaaagaatgggacttatagaaatatttgaaactctttggacctgaaagtgtgacattgctttgttcatataaagtcatgtaatgaaaggtttaagaaagttaacaggatacagacccaatcagagactgaagaagttttaaaccactgagcttcacttctgatcagcataagatgttttgtttggggccattggctgaagttggaaaggaatgatttgacttgctgagtggatgctgagatgcctccaggcagaaagtccaatggaaaagaacaacatagagccagagtcacaaagtgaatgccactgtgaagaaagccataccttttactgcttcttatggggaacagaaataattacaagtgtttggaaattagggt

SEQ ID NO: 60487 - DNA, 1295 bp, Bovine  19866880773251
  misc_feature (1)..(1): n is a, c, g, or t
nctgcagatggtgattgcagccatgaaattaaaagacacttactccttggaagaaaagttatgaccaacctagatagcatattcaagagcagagagattactttgccaacaaaagtctgtttagtcaaggctatggtttctccagtggtcatgtatggatgtgagagttggactgtgaagaaagctgagtgctgaagaattgatgcttttgaactgtggtgttggagaagactcttgagagtcccttggtctgctaggagatccaaccaatccattctaaaggatatcagccttgggtgttctttggaaggaatgatgctaaagctgaaactccagtactttggccacatcatgcgaagagttgactcattgaaaaagactctgatgctgagagggattgggggcaggaggagaatggggtgacagaggatgagatggctggatggcatcattgactcgatggacatgagtttgagtgaactccaggagatggtgatggacagggaggcctggcatggtacgattcatggggtcgcaaagagtcaaacacgactgagtgactgaactgaactgaataaagtggagtgggtcacaaagggatttaaaacaaacaagataaaatatgagcgtttcttgattcattggtatttgctatattattctctaaagttttctgtagctttaaaaattccccagaaaatggggagtggtgctggtggaagcaagaggggacctcaagggaagtaccttaatgagaattatgtgtctgatgctgaacagaaaataatgtgaggaagtactgtggttggcatttaagaaaagcagatatgagtattatatgggcccatttggcagtgctcctcaccgcagcagaaggcttgaatgctggagcacccctttcctctggaatttctgcagtgatgagagagggctgagggcttggactaggcttgctcttcctatcccttctctgaagtctctgaacgtgttgtgtgataagacagtggctgaattgttcttgtggcctagtttctgatatattttttactgccttagtactaatattctctggataaactctaggcatgaaaggatgcacaccaaaagaccctatcatgtggaagatgctgaaaaatactgccttgaggatgacttggtcaatatggaggtcctggatgaggtactaaatatttaataggcaattttcaccaaggacatttgtttcacacgactggtctgatctttctgtcgtagaccatgttctcctaaggtcacttgagacttggtttgtgtag

SEQ ID NO: 60488 - DNA, 954 bp, Bovine  19866880841701
  misc_feature (1)..(1): n is a, c, g, or t
naggatggtgatgtgggcttgcctggagattctgagctgttctccctggggtcacgctccttcccagtgtgtgagcatctgtgtacagtgaaagatgcacctgatggaggtttgttgcatgaaaccagtgtgagagcaggtaaaggctgagaaccattagctgagatgctctgtaaggtccttgccaactttaagatgctgtaactacagacttcctgccatttggcctcttagtacctcatctgaaaaatggacataaatgctgttgaccctactggcttgatggaatttaaagatgatcaatcaaaatacattcggggggttaaattctccataactacaccagaacttcattctaacacaattcagtcatttaaaatgcaatgctgcacaaggtggcctcatctgaacacctttctgggtcatttggttactgatggactaaaagaccacattttaagctcacttagtctttccccagacatgagcaaaacctgcaatttacagattaatgtcatacagctgtacaaacactcacccaggttcataaattctacattatttttacaaatagagagagcagtcattagtatgaatgagttggtctgagggagattatacacacaaatgactgacaggtatgtgtgtacctgtgggaaacagagagaatgtgaataacagaggaaaagaaatcacaggtatgatttttgtttgcattaaactaatgagatgcaaaagtgaaatcaatgtagtattagtggtgaaaaaatagattcctctcgttctctcagttttaatctccaaaaacccaataaaataggacgtatcttgggggagacaaggttaaatagaaaataattacattttggggttattttcctattttgtgcttcatgttggaaaaaaaattctttggtacactgtaaatgaaatctgattcaactatccagtaaa

SEQ ID NO: 60489 - DNA, 1667 bp, Bovine  19866880890969
  misc_feature (1)..(1): n is a, c, g, or t
ncttcttccctctcttcatctcctattaagatggtatagaaccctcaaaaatctaacgggcccttagagtcactattttggtgaacctctgtatgtatatcattaaaatatgttttttttctcttgctaatctgtccgttcaagttgaattcagtcatcaaacactgaacttaagagggtagaggaaaaaaatttttcccctgacacaggattgtaaaggattccatgatgatgtttcaaatctcttaaccccaaattcctaaatgcctcagtctctattctagacttcctgggtagtgggtcagataaaggaaactaatcctgcccacctaggatgatccctagggtgggaacgtcttgtggtccacagtactttgggtataaacctacaactcaccttgagtctcccagaactgaaatgcggaggcaaagatcttgaggctgctgttatcctggctcttgtctgggccaagttacctgtgcaaagaagacaaaaaattaaggcaaaggaaaagttaaagaatagtatgataagtaatttttccctttgtgtccctgtgtttttcagaatgttctaaatgatctgccctgaacttgaaacatttggaaaaattttgaaattcaattatataaattataagtaaaatataatatttataagctataatttgtaatataaattaaatttatgttagtttaataagcaaataagaaagcacaaagtctcccattcacttaacaagctagtgcttagtcgctcagtcgtgtctgcttctttgcgacccatggactgtagactgcctggttcctctgcccgtgggattctccaggctggaatatcagagtgggttgccatgtccccctccaggggatctttccaacccagggatcaaactagagattgaaggaaattactataacataagagaaccatatatgaaaatcccataactcatgcactcaacagtgaaaaattggaagtttttcctctaagattaggaacaagacaagaatgtccactctcaccacttctattcaacataatactggcagccctagctaggtcagttaggcaagaaatagaaattaaaggcatccaaattgtaaagtaagaagtaaaattatctccattcacagatgacatcatcttacatatagaaaaccctaaagatcatacacatgcactagcaaatgaattcaaagttgtaggatataaaatcaatatataaaaagttagtggcatttatatacactaacaatgaaaatctgaaaaggtagttaagaaaacagttccatttacaatggcatcaataggaataaaatacttaggagtaaacttaaccaaggaggtgaaaatttatacactgaaaactatacaacactcctcaaagaaaccaacaaaggcacaaataaatggaaagctattccattgtgagggagaaaaaaatatactttttcctctacctgttaggggaagcacactgattgaaaccgcccaccctggccaggcaccatagtaaccatttgcaagagttgttttatcacaggaggtcctggtaaggaacaggaaactaataagcctccaccaaccagaaaagtttgagaaaggtcaaaaagagacaccacctgtccgcccacctcccagaatccttctctctggcatccat

SEQ ID NO: 60490 - DNA, 2287 bp, Bovine  19866880904923
  misc_feature (1)..(1): n is a, c, g, or t
ntcttcgcatgaggtggccaaagtactggagtttcagctttagcatcattccttccaaagaaatcccagggctgatctccttcagaatggactggttggatcttcttgcagtccaagggactctcaagagtcttttccaacaccacagttcaaaagcatcaattcttcagcactcagccttcttcacagtccaactctcacatccatacatgaccacaggaaaaaccatagccttgactagacgaacctttgttggcaaagtaatgtctctgccagaatagttattatcaaaaagactacaaatagcaaatgttggcaaggatatggagaaaaggaagccctttgtatactgcttgcaggaatgtaaactcatgcagctattatagaacatagtatggaaattcctcaaaaaactaatgggagaactgcaatgtgatcctgtagttcccctcttgggtacatatgaataaaaattctagttcaaaaaatatatacacttcaatattcaaagcagcattattgcaatagccaatatttagaggcaacataagtgtccattatacatgaatggataaaaaagatgtcatataaatatatatatatatatatatatgtgtgtgtgtatgatatacatagcatatatatattatatacagactcataaatttagagaccaaactagtggttagcaatgtgaagagagaaggggagagggctaaaatagggatatggaattaatagatacaaactactatgtataaaataaataaaatatattttatagcacagggaaatatcactactattttttactaagtttaaatgaggtataatctataaaaatattaagtcactatgttgtacatccaaaactaattaaactgattaatacaatattataatttaaaacatttaaatatttactaaaataataactgtataggttaattgaaacatgtttctatacagagggtacaggcagtgcaaaggttttgatgcaagatctttctggccttatttttttaattgtgataaaatataactatcttaaaattgacttttaaatattttaagtgtatagatcagtgcaagcatcaccaacttccagtccacacactttcttgtcttctcaaacttaaattcattatctgttatacaataatgctccatttttccctttactcagcctggccaatcacaattctactatctgtctttatgaatttgactaccttgctgctgctgctgttgctaagtcgcttcagtcgtgtccgactctatgcgaccccatagacggcagcccaccaggctcccctgtccctgggattctccaggcaagaacactggagtgggttgccatttcctcctccaatgcatgaaagtgaaaagtgaaagtgaagtcactcagtcgtgcccgactctttgcgaccgcatggactgcagcccaccaggctcctccgtccatgggatattccaggcaacagtactggagtgggatgccattgccttctccgaccaactgagctatgagggctaaatcttctttggagatcatgaatctgacatcgttctccataagctatcagtgacatacccaaggtcacacagtaaatgtcagagacagccttgaaccaagaacagtccatgctattgaccactactgctatgctgctattttttttttttttcttttttgccgcaccatgcagcttgtgggatctcagttccccaaccagggattgaaccctcagcagtgagagccagaatcctaaccaccagactgccaggcaagttcctatactgctcttcttaaaacaaaataactttttcctctctcaaactaggggaaacttaatatatggaatattctcagtgcttttttttttttaatagacaagctcaattttaagggaactagtaatttataaaagtaactgcatattgttaaattctacctggtataaccaactccagggaatgggcatatctatcccaaagtaatcccaatccagcccttttctattgtgcttgtaaatatcttttaggttagaaatcaccatgtatcctttccttaaatagtttcttgccttaggggaggctgagggtaggaatggggagggatactaagaacaaagaatggaatgtagccataaaaattcccagagcctcctgtctatgctgcagcataaaaccagagtgagaaaatagggcacgtacactgcctgttttataactctggatttttcaaggagatattcagagattcttgctcccatcacagctccag

SEQ ID NO: 60491 - DNA, 1047 bp, Bovine  19866880956180
  misc_feature (1)..(1): n is a, c, g, or t
ntttttgttcattacttactgacatctcttacacaatggcctttattcatttacatagtgaaatatttaacatactatttcctaccagtttgtactaagtgtatatgtgaggagtaaagtccaaaattaaactttaactccagcaatgttttagattttaaaatcagtcactccaactctgttagtaatatgtcttcttgtggagtatttagagttttttatcgttgaagccctggatcatttcaaataatgctgggctgcaaattccataattctattagaaaaaagtcagaagctgttgctaatgttactgagcacaagtttgtgtgcctgacacacagtgaggccaaacaacaccgaaatgttaagagtgtacagcaaagaaaggtttattccaggaccaagcaaggaaaactggtggttcctgctcagaaaaacccagactccctgaagggtttcagcaaagcatttttgaagtcaaggtgagggaggggtatcccagggttgtggtcaactcatgcacagttccctgattggttggtggttgaaggtctgtggctacctgcttataatcttcaagtcgttgtttcttgcttttggtggtagtttttagcatctgaaaaacttaggaaatatgcatgagatcctataatctgggtacttgagagaggagctacagcagaggatatggaggaaggcctgtccagaggccctgtagagtcctactcggttacactaacataagttcctaatttcttgacattcttttactttgaggaatatttgagtgttaatgaaacctctacttattgaatattttatttacattagttattatttctccaatagggccattgtatgcttaagctaattagcattagatttttatttattaagaaaaatttctatgtttacagaataaagacaatgatactcttaaagatctactgaaagcaaatgttgaaaaacctgtgaagatgcttatctacagtagtaaaacactggagctgcgagagacctcagttacaccaagtaacatgtggggtg

SEQ ID NO: 60492 - DNA, 1124 bp, Bovine  19866880975323
  misc_feature (1)..(1): n is a, c, g, or t
nggattctgaagaaattcagtatctattcatctcttgagatcccaaagtgaagacagggctgtgtagctctccccaccaagggctaacatacaaagatcctttcttcctgcaacagtattagcatctctatcaccatcacaccacttttattattatatttcagatcctatgaaaataagtttgggtgaaataaacatattacctgctagtgaaactaattcaaacaaccattttgccctagagggaaaagcacaattgaatctgagaatagcatccttaccctcccaggaggaagaaactaaaaataaaagacaacaaaggtgcttcctgccagttggtaaatccaataagcaaagaagatgcctcaacctggcactgggcagttaacagtcagcctgactccctccattggagaatggccatgtggttctcagagctaacagctgccaagcagaacctctcagattaacccataggtggtgttgaaccacttcccattaagatatttgcaaagcaaacaaaaatgatagccccattctgagtgctgggagccggccaggagctctagctgttcttgttgacacaaagagctctccagggagggtctgggccagagtgtggaaggccactcctgcctgcctctccagactgtgttgatcttaagccattagaatctcggtatcaggggctgtttattatctaatttcccaatcacagcagttgctggagctttgtttcaccagaactctctacttctctgtctccctgacctacaccattcatgagggaaagaaaaaattcaactctcctcctgttatgtctactcattaaggagacaagtctgagaagttactaagatgcatacggagagtgtggcatcaccactgtcaacagcttctgtggcaaacacttgttagggttccttctgaatttaaagtaaccatagcaatgctaatgggaaatatgcttgcatatttgtgtcctacaggtaggagcaagctgctgtttaattcacaaaatacacttagagctgaaacactaatattttttccttctaatccagagggtaaaatgaaataaggtttaaaaggctgtggacacatgcaaaattaatcttctttca

SEQ ID NO: 60493 - DNA, 1325 bp, Bovine  19866880987646
  misc_feature (1)..(1): n is a, c, g, or t
ntatctgtatatggtattttataacagatcagtctgctaatggaatggacttggtgggggggaggggagcagcaaaggaacattccgcctaattcaagtttcctatcatcaaaatataagtactcctctgataatgatgatcagattttaaggatttatctttgaaaaaaatcttttctgaaaaataagtactgccatatgctgatattaacccggaagcacatgattttaattagcatattcattatttcaaaggcagttagagaagtctattagattattcttgtgatatttgcctttcgctctgtcattacagtgcagattaatcacttccaattgaaggttagatagacttcctcaagtgcacaattaaattgattctgaattatggaaacattctttgtgcttgcatcagtgtctgaaaaaatgctgctggaactgtagtttggggttggaaaatatattcaagcaaattcatgtgggaatgaagttctcattttgacaggatgagaactgtataaagcagcttgatgttacttgtaattcaaacatcagttaccactcaaagactttactgcagctaaatttcataaatgaatgctcttatgccttgtaattttacattaaattcatttaaaaatattttcaactccatacaaaaagttagtttccaaaaccaatcagtatttgataatagtgattgagggctgcctctttgttcagaaaaatctcaaactcagtcctaaaatcaaaaaactgcaataaaatgttaccactgctaagccagtcaggatattcagcttcgaacaaaaacgtgtacagctggtgctagttaagtccatgagaacaaatcgagttcactgttgaccatactgattctgtaacacgtaataaattcacatattttcagcaaagtacctgctgatgaattgtacaacgtataacagtaggctctgaacacctcacatttttacaagctttgtagatgtgtctaactaagcctctttctctttcacacgtatttttaccattatcagttgtagcacatcttaccagattccacttcagattgtacttagtgttttctcaactgtgaaaatatttttacctgaagttgttccacacagattattcacagaagctaatttttctgccacttcaaacttggtattgatgccttaaatcaacaactgagtaacatcaataaaatctgtggattcatcaagacaaggaaaaccattctaaatctttcgccttgtttttaaactgactattgatattgcttcaaatgtcctcaactcttaaatcaactgttcttgccaaaa

SEQ ID NO: 60494 - DNA, 1350 bp, Bovine  19866881034442
  misc_feature (1)..(1): n is a, c, g, or t
ntgttgaagatgaaaaatctgaagccccaaactaaatcccattgttccccttgagagtagctccagcataaagcagttacttaaccagtagttgaataagtgaatgaaataaagacatttcctaatttgaaatatagttgttctgtgcacctagggatatttctgggaatctagttctaggaaattattgcaacaacccagtcattgccaacccaccaacaatgctaaaggaatcaacctttcaaaattagaaaagactaggaggaaggcttaccctgagagaggtttaaaagttcaggcgttttaagtgttaaaacttggttctgccgtgatgtggggtcagacttttaaaagaagttaacctggagaagggggagagcctgtctggattctatgcttgctttcctctttggaaactacatttaaagcaattcccattggctggcgtcacatgatgtgcccaggggttccagctgcagctggtttaaaatgcctgctcacaggctcaagcaagagggcctctcagccttggcaggactgaggatgccgttccaaaaaccactccccctcagaaggcattagaaggagaaatggcaatagattttagtgctgttatcccctgtaggaccaaggaggggagtaagtaggaagctaatcagataacagagagaaagagaaaacaatttccaaagcactgaagcaattagatgagaaagtgctataaaccaatgggctcttcctgctcctggagggctaggggaagagaggctgcaagagccagctcctcctggagacaccctttgaagttccttcccagtccctcaggctccgctgtcactgagggcttctcccctgtgagatgaggagcctggcactttgttcttgcttaaaaaacagatcttgagttagaggggtaatttttaaaaattgtgctttcaaaaacttagagaatgagacattgtagacctttaaaaaaaattccctgcaggttgtttgttttgatagtatttactgaggaacgtatgcaattttagttgacaaaatctagttatatccattctctgaaagttaagaattcattaagaaaaaacaacaccaattacattagtgatgggtgacaactattggtttttacttctactatcccatctatccaaacaggaatatgtttgcaattatttttctgattaaaaaagtacatatttttaattgttttgttatgttttcccatagcaagagcctattatcagcattaatcaaaaataaacacacacacacacaaaaataataataaaaaacacaataaagcatgccacttctcaccaaggtgacacttgaagtcgtttccct

SEQ ID NO: 60495 - DNA, 1953 bp, Bovine  19866881070131
  misc_feature (1)..(1): n is a, c, g, or t
ntactttcggggtaaggagtcttcttgatctcttctctgcctgttttcagaaaagatgagtcagcccttcgcacaagaggcctagataccacagagtcactgaaaacaagagcaaagctcagagtcagttaggaaagatggaggtgtagggaaaggagaattataacagggaacccacccttgagtacagcgtgagaccgcaagtgtctacagaggggccctctgccactggcacatagtccactgaatgtgctgattctgttagtgtttcagctgcttcttggccttaaagctactggagtcagccactttcccagcatatttactgagaagtaaagtagttaataaaattccagaaggaggcttatcaagttcatgagaaaatatgtcttagcttcaactttattttcctagactgaattgacccattgcaagagccatttgcctgagcacaattatttcccatctctgttaccccaattcctgatatttttacctggtgaatgactcttttgagtgaaaatgttgtctccataaggactctgtcaaatgcgcattagagaggaaagataagagactgtcactttgtactgatttgcacagatttgtttattttcaaattatgaagcactgggattgggaacccattagagatcactcaccatggggaactgaggtccaggcaacttcacgatggagatgctgttagtccaaagacagaagtactgaaaccagggacaacaacataaggttgtaaggtggggttgccaaagtaagggacttggcagggacagtaagtcaagtggatcatgagctggagttgccaggcaggctggagggtgggcctgggagccagcatcatggaaagaaggttccacccaaagctagtgggttcaagaaggacctagagccaagaagtctgacctgtgctttagaggtagactagaatgggcctcagtgtatggattgtagggacctagaggtctttgggtccagcattccatcgatgtagtgatgcctgctacagcttctccaacaggtaggttttcagcccctgtttcatcacttatggttggacatttctaattgccatttatttcttatcctgatccccttagtggtttgattatactctcctagtttctgcatgtatgggatttgaaggctctaactataaggttatcctcaagatcctagagtccctctttcagcagaagaagccattggcatgcacttttcagaagcatatccataacaaacaattgggtgtcctcaaaatactagtccccaaatgctaaaaaaaatggcgcattgccaagctaggttaacaccattttggatcagtagcaggtaaaattatgaaataatgggactgattttatgtgtggcttgtaattgccccaaagacatgtccaaaagaagaactgctgctgtgaatgtctgtgagaaacagagagcacccctagttttccatgtgctctttctgctctctgcacaaccatttggtgtatgttaatttatcttcattagaatctccttttaccgtccagttttcttgttttctttgccctctttattcttctcattttgctttagactttctggtgattgttaggttaaggaggcaactgaccccttccctgaaagctggacctttgaaattacagatacagttgatggagcatcaccgtgaaatatcagagacaagcttagttctggcaacagagttatgggataatctaagcaaattcttagatggctgagtttctgccaagtgggatattgcttggccctaggtaatgtttaaagaaaatccacaggcagctataagtacagaacaatataagtcagaacttatattgttatttctttttgctgaattcttgtttagcctcaaaggttccatgagttgtttacaaggtgacaaactgccctggaagcctgggccagcca

SEQ ID NO: 60496 - DNA, 1268 bp, Bovine  19866881093456
  misc_feature (1)..(1): n is a, c, g, or t
naagtctgaccttgtttcttgttaagaaatggctctttattttccccctgattctggcagaagccaggctgggagattgcagcaaatggctgcaacaacctgtgtttaatgtggtgacactaatgaattctgagaattaatcttcagccaagaatgcatgatggaaggtactatgaatttcaaattaggtaatggattaatttctttcagggctgaagtttgcttcctttttcttctggtagacttttctatcatattctaaaccaccttccatggctttgtaaatccagctaatacatctcatggtagttttaattttttattcttttgttttgtatcttagcacagagataaccacacataagtccagatttttaaaaaagagttttaaaacatctggaactgaaagaaaaaattacttaatgattttgggggaaaaaaagcaatattttctaaatctagtccttgttcaatttcttttttccagagtcaaagattctgggaagaagttattttagagaatgtatttccccaggtccccagaagaccctgtcttctgcagaaatgcagcctacatgtatctcaaacatgctggtgaaaattaggggctctgagtgtctcccctcaatcagctgagatgaagactcagctgttatttgcaaaagtttggtactgatttctcacaatggagctttcaaggatgtcatttatagggccctggttccatgatacaaaaaaggatctgtggccgagtaagtttggaaacatgaacctaaacaaaattgaattttctttacctccatacttctaagaacatttaatatgctcatatgcactatgaaactccaggtttacttgatttagggaatcaccagtgtttcccaaccttttgaccagaagactagtttcatttttcagtggaatgtctcatgaatctattgtttcactcaacttacctcacattggccagcccctatattcccacacagatgtcaatgttttatgcatgttcttataaaaactgttgaatcccaggctgggagaaaatattctgcatctggaatttgcaattcctgatttaataagaaatcctgaaatgaataaacatattataacttccttagttttccatgtttgttctccacatcgttagaggatttaatcatgctgtaaaaaaggtcatggaagctgtcaggagttcttatgggtcttgactgtcaactctatatcaatccactaaatccctgccgaaaggagaataagacaga

SEQ ID NO: 60497 - DNA, 661 bp, Bovine  19866881110513
  misc_feature (1)..(1): n is a, c, g, or t
nataaagaaattttggaacagaaagatttaataacttgtctgtaagtggttgagctgggattcaaacctggcagagtcaggtttttttttaaaccactgcattgtaccacctgctgtgtgaccaaaactgtgcagaaaaaaaagtaaattgggtatttgcctcactcatctatgcacttaccccacttattctttgctttttccaccttaacttggaaactcacaactttaaatatattgaattaacagcatcaaacattatctaagaatttttctggacttaacaaacacctatgtagccagctccccgccgtttgctaagaggaagtaataatataggctaggtcgtaagatgtgtcaattacatgcattatgtttcctttagaattagttttactttctcctaaagaagtgcctgcttaaagttttgacacctatttgtgaggttgtatttttttagtgactttttcaaagaaacatacacttctgagtgaaactttagattacaaagaccctgagagaagggtctttgaccctatgaggcctttgacatcaaaagaattaacacacataaagagaaattagagggggagggggagagagcctggagccctggctttctatggcaaatggaggaaaatttttaaaaagaggacacaca

SEQ ID NO: 60498 - DNA, 1296 bp, Bovine  19866881190506
  misc_feature (1)..(1): n is a, c, g, or t
ntaaaaaatatataagggtatacaaacaacatgacggtattaatttgtttgaggctttttaatattggaaaaagtttatgttcaatgatactgacaactcctaaaagtgtcctaaggttcacctacattgtatttcttataatgaacaaaacactcctgtgtgcctgtgctcagtcactcagttgtgtctgactctctgtggccccataaactgcagcccgccaggctcctctggccatggaatttcccaggcaggaatactggagtgggctgccatttccttcttcagaggatcttcctgacccaggaatcgaaccagcatctcttatgtcaggttccttaccactagcgtcaccaaagcttaagtaaaacattcagggaggagccaagatggcagaggagtaggacggggagaacactttctcccccacaaattcatcaaaagagcatttaaacgtcgagtaaattccacaaaacaactcctgaatgccggcagaggacatcaggcacccagaaaagcaacccaactcttcgaaaggagataggaaaaaatataaaagtcaagtaaaacattcgtaataaatgaagtattctgattctacatttgaaagcaaaatatgtttatgaaacaattcatagccttttactagcagaggtcaattttgggagcaggttaaaatctttaaatggtgcttataaaacttttttcattataagatcatatttggaaaatatcaaataacccactgttttctttttgcacccattgttttcagagtgagtgaaaagagaaggggctaatagtgagatttttatgtttttaaaatgggggtatgagttaaaaaagttaaataccgtgttagaataaaaaaaattatgactatgaaataatgggatttcattttctcaaaataagaatgaagttgaaatcttgcaggatgtaatgtagattacttaggtaccattaagaaagagcacatctatataacagtagatatggtcttggtattgttttctatagaaataatttcacttactgtccctttatcctctaaggagaatacctaatactgcccagtatccagcaaatggctcagaagatagaggcctgttattacactagagccgcaattcatctcaatggcctttccttcaaaacttccatcatctcaaaatctctctcggaggaaattataaggaatagtgaacatgacattttccatgtccccatactgttgtgaacatcggctccagaatgtcctcagatatcccccatttcaaagagtatgaagtgca

SEQ ID NO: 60499 - DNA, 860 bp, Bovine  19866881281421
  misc_feature (1)..(1): n is a, c, g, or t
ntcatgatttgaggagcgtatttttgtctaaaggaccagagagttcccattgtaacttttaaacatgaaaatccacacagataaatttgaagataatcttcgatgcaaatacttctggaggcccaaaggaatggagctgtgctttggcattcagcactatgctggaaaggtgagttattaaatctgaattttgacaaggaacaagggtccacagtactctgtttgtggcattcatgaaattgcttgcagatttctttctccttttaattcttcttgaatacctaatcataattcttaaatcttctcagtggtattgctcatggaaagtagcccctggcaaaaaagcaatttctcactggggtggcccacagagctgccatctgcttctcacctgaggtttggcctagaagtgacagctctccagggagaaaacatgatggcttttgcagcgtttagtggtgaatgctcacattcaaaagtaatttggagatgtgtaggcaacgaaggagggttaatatcacagtggggctcaatttttagcactttgtagcacaagcatatgtctacagggcaccaaaagtgtctagataaaaagggggggaaattcacttcatcatccagatgttaaggttttacaacattaactgaaattttcacttttcatccattattcttcagtctcagtttcaagttcccgaacgaggttagtgagtgattcaggaaatcccctcctcctgtagccaacaattcattgctcatgttactctctaaggagccatgtgaattatggctaattggttccggcagggtctgctgaggccctgggcccagaaaatgggtaggagttcaataaaaggcat

SEQ ID NO: 60500 - DNA, 957 bp, Bovine  19866881309938
  misc_feature (1)..(1): n is a, c, g, or t
natccctttcggtaacccgttggttcagtgaaatatagagctgcaagggccaagtggcagcctcatcttccaattcagtggaaccactgttatatctccaggtggaaacactcctctcttggggaccaaggccttcagattaggagaggtagaagttgtggggataagaagcaaaaatttcatatctaactattttatttaggaagtaataaaaaattatagaatgggcctgttatctgatttattatccactgggaaaaatgtttttgcctttagactttaatctcctggagggcaaagtttacagctcattcttgtttggatgcctaatggggccttttttataacatctgtaacctgagaggcagtcaataaatgctggttgaatgtattggtaaatagatagctagatatgggctaattggtttgtatcagaagagtaaatatttttttttgttttcactttaatattgctagctcacacataaaagctaggtttcttcagtctctggatttaagaataaattctagtaatctgtgactcagcaccccatttatcagtattgggttgaagattactaggatgtgaatttcttcaaggagatgatgggtccctatttccctttggagtatcatggctttcaggtagtggtttatattactatgcactttaaaatggaatatcttaaatttttagaagattcattttcctgtgactttaaacagggaaatatttcattagctcctcttcccaaattctgaggagcttctgaaatgtgaagcaaagcagtcttccactgcctggagctccttcacaacatcaaacacttaatgaaaatgttttcctcaaacctcaagcatttccagatattgaatgtgaagaggaaagattttgctctaactgcaaagtgttccacaactgcagggtatgtgagaatgtctctgtgcgtgtgcacg

SEQ ID NO: 60501 - DNA, 1102 bp, Bovine  19866881345376
  misc_feature (1)..(1): n is a, c, g, or t
naaatcaccaatgcagtgaaaaggcggcatactgagaggaagaaaatatttacaaacatgtgcctgatgaagggttaatattcaaaataaagaaactcaagcaactcaatgggattaaaaatgggcagaggaagtgtatagacatttctccaaagaagacatgtagatgagcagtaggtacatgaaaagttgctcgacatcactaaccatcagggaaatacaaaccaataccacaataagtcatcatctcacatctgttagactggctactctcaaaaagacaagggctaacgagtgttggtgggggtgagcgaatcactgtgcattgttggtgggaatgtagattggtacagctactagggaaaacagtgtggagtttcctcaaaaaattaaaagtagaattaccatgtgatccagcaatcctacttctgggtatttatcctaaggaagcaaaaacactaactcaaaaagatatcgacaactccgggttcgtgacagcattatttacaaaggctgaaacatgaaaacaatatcagtgtctgtcaaagtatgaatgtataaggaaaatgatcctatgtatagaaggggaagattggacacaacagaagagaaaggattagtaaacttgaagatagctcaaaataaatcatttaaactgaaacacaaagagtaaaatattaggagggaaacaaagaacacctcaatgggcctgtgagtttaacacatgtgtggtcaggattccagaaaaagggagacagaaaacaaagttggaataatatttgaagaaattttaatcaaaattccaaatttgatcaaaaaagaaacccacagacaggaaatcccaaccagaaaagaaaatacacctacaaagaaaatcacacctacacacatcatagtcaaactgctgaaaaccaaagacaaagataagatcttataggtgctgggtcttgagagatacagattcctattagtattgtatccatcagcgagagagtaaaaaaagcaaaatgtggtgagggattattactcagccttaaaaagcaagggaaatcataagacatgatacaacatggatacattttcaggacattaatctaattga

SEQ ID NO: 60502 - DNA, 981 bp, Bovine  19866881380369
  misc_feature (1)..(1): n is a, c, g, or t
nttgcctgaccctttgccatgaatccttaccaacgttttaacacaatgattttgggacttttgagcagaggtctgattttagcctagggacatcatttccaagattggtacttgttcttcaatttacttccattttgtaaacctagtcatacatcttctttgactcaatagagcatcactttcacatatgggcaggattcttgtgtcaacaagatgaggatattctgtttatcagcaagtgacactttcccactttgtgtgtgctactaattatggctgggaggctgtgaagttttcagcatcctgtcacagagagcagctcgttaactaattatttttgaaaatcactggctccaatacaccgaaggctggcaggtgccagagggttagagtagcagaaattaattaacaaagaatgaaagctcttattagctgtaattttttttgctatcttccttttttccccccatttaaccagtttagagtgggtctaagaccttcaatctgcacggagagaaaagttagaaactgaatgttcaagacccaggaaacccaagtgtcagccctcacctaggaatggagtacttggcttgttttccaagtagtatatcactatcagtcacatttagtggacccgcaggtcagtgggatcccaaaccacctttagcttttgtcaatgtttagttgtttccaaatagaagttaacccttaaaagcatcactggaatccctctgcacagcagcctgttagtgccggatttcagtggcctatggaagttctcatgctctgtgaagatgtggctctttgctgttattttttaaacagcaaactagttagaatcaattgtagaagattcctctattaaatctatgcctggtctaatttctctcttaaagtaacttcccgatgtggtaaagtggcacactccaacactactaaaggccgtatcagttggcacagactttctttcttttgtacagt

SEQ ID NO: 60503 - DNA, 749 bp, Bovine  19866881497544
  misc_feature (1)..(1): n is a, c, g, or t
ntaattgaaccctatgaatgtgttttatgaccaactttcaaaatgcaatttttcatggaataaataattgattttttttcagtagatagatgattatgtcaggaaggactctgatggtttaccagaatcagtgccttgaacaaaacaggtacttaatatttagctactaaattgaaactgggcaacgattctttcaacaccaatctcttcaactagttggggtgattattttccttatttagtagtaattgttcttctcatagtaaataaaaatctgattttaaggtaaatattcctttaaaatgatattctcaaagaaacgagcaagtatcaaagtgaaacaagaatgagcaatgaaagttatataagtaaaattcagaatacttggcatttaagcagttgagaaataggtttgaatattatctatacccctacattttttatcaaaattcatttttcatttaaaatgtcctcttatctaagaaacagttgctttgactgaagcaaaagctaagtgctaatccatgcatttctggcctttcaaatttaattgggtgacaaatgattgcattatctacttctaattgcttaaaaggcatgatagatcagatgctcaaggagagacattgtcttactctgacattccttcatttggttcaatcatcactttttctgaaagagaagaaaaaaaactcaacccagtattttatcaataggggatgttcttaatagaaattcctgactggcaa

SEQ ID NO: 60504 - DNA, 1471 bp, Bovine  19866881551852
  misc_feature (1)..(1): n is a, c, g, or t
ngcagagcttagttgtagcctctgcttagggtctctcataagactgcaatcaaggtgttggccaggaccagggcctcatctgaaggctggcccagggaatgatacactgccagacttaagtgactactggcaggactcagttctctgtggggtgttggactgagggccttggttctttgttggctatattctggagacgacccacggtttcttaatacatgagtccctccaacatggccacttccttcatcaaaacatgcaagctgggaaggcaattaaaaaaaaatatgctaggaagatggaagtaaatcttttgtaatctcctcaagaagtagaagtacagcctatcaatattctgttcacttgaagaaggctactcaagagaaaggggttatataaggatttgaataccaggaggtgggaatccctggaggccattttagaggatgactatcatatcttgtgacacagcttgtcaaacataataaaaaaaataatggagtcacatatatagaccattaaggtttggacaaagagtttctcagcatcagctgtgatgcctcctcactggtgagagattgctaattatcccccagcatgcatcgttcctttcttccttatagtaatgcccaggttttagggaggcatatgactctctatctagagatgacatatcacagcctcccttgtagtcaggtgtagccacatgactaagttcccaccaatggaatgtgagcctgagtgatatatgccactctcagtaacatcctcaaaagaaagctgcatgtcctccccttcctctttaccccttttctgaggctggaatgcatatgtggtgggcttccaggtcagtcatgtagataagggcaacatcctaaaagaccttggaaaaataaaaaaacagaaggaataggagtccgaagaccatcacttgaagcagaacagcccaactttcctgggctgcctacctgctagacttctaagagagaaataaaccatcttgtttaagccattgttatttgctgtctgttacagtaactaaaccataaccagtatcctgacggatcacatggtgcttccaggggcaggcattagcagtgctcctgctgagtcttcctgtggcagttgtgaattacatcgctttaaaagatgtcacatggtgtcaccttaccagctcctcctagcctatgtctgctggagtcctcaaaatgagttctcacccgcaaaagggtattctcttaggctgttgctatggaaaactccatcactgctttccagctttgcccatgcttgggtacccagaggactttagtcattcaatgattcatttattccactatttatagggcttttctcatgtggcagtcagagacaggagcagtgaacaggatagataagctttctcctcttaggagactgatattctagtagggcagtaaagatacaatagacaaataaaccaacaagataa

SEQ ID NO: 60505 - DNA, 1561 bp, Bovine  19866881593379
  misc_feature (1)..(1): n is a, c, g, or t
nattctcctctggctctatgcagttgttttgaagttagtctatacacatttactcaaatctttcccattcaaaaatccaagaaatctcaacaagaagaatcttcaaaacaagaagagggaaatgaaagcaggggaaggtaaatggagatatgtatgttataattcaaatcaacggaaagttgtagaaattctaagacttttacagaattcctggaacccaagaactagaattctaataattttattctaaagctagctgcaaaaataatttttaaataaattaagccttaagaacattaaagtttagtatatttggaaggaaaatgaccaggtaacatgtcaaaatttaaagtgggattattttaagacatgcccgtgtgatgttaaaatgcgtgtaagtctgccttttccacacacagtaatgtaagttaaactcacaatctaataggactggacagtctgcactactgctgcaaaacacagctaataacatctgatggtaatcagcattattgtatttaatcagtaacaatagcaaaacacacaatatactctttaaatttgtttcactgaaattctaccattttggtttcatgtaatgaggtatttgtagaagtatttgttcacattttatgtaccatttaaattgaaaattatttttttaggagaaggggatggcagccagtaagtaaaaaacagacttaaaacttcatttttgaaaaacaaccaagtagctacccaactccagacttaataaattagtgtggtttctacacttatttcctctcagcatgcatgcactaaagctaattcatatcagagaaatattataaattatatgcaaaaactatacatttaccttgcagtgcttcttaaagcgaggagaccttggctactgtctaagggtaaaggaaatgctttaattttgaggatagaatttagaccaaaaaacaatttaagcctcaaaagctaattagagtaaaagattatcagcgtgactgaaattagtgataaatagaagtgtcccaggtaaagataacagttctcactttggctcagttagctatcttgtacttgctggggtagggacatactatcccaaagctgtgtcatttctgtcatttctttggaaaaactttaagaggaatagagggtctcaaagctggcttatcactcacacaccttggattctaaacagatgattacctaagcccagggaagcaattttattttatggcttattctcctcctcttctgcattctgacagtagcagtcacttccacttatttgaaaatgatatgataaaggccagtgatctaagtctgtacctcttcttcaatctcatgttagacatacacatccacttatatacctcactaaaattttaaaactgggtattttaattggggactttaaataacagttactataatgaacatagtatttcaggattcagaagggtgaaaactcaaacaacaaaactgaaaaatttgcagacagcacctaaagcactcaattaatgctaacattccattactatgtcaataatttttaaaatag

SEQ ID NO: 60506 - DNA, 1000 bp, Bovine  19866881722792
  misc_feature (1)..(1): n is a, c, g, or t
nccttatttttcctacatgtaccagatatgcctgtcttttcttttcattccttcctttctttttaagaaaagtgtcatagatggttggactgaaggcagacagctgagtgtccatattcagattcatggccaatttctacacattgtatcttacatttttttcccctttgaaatcagttgtattttactctacagccatttgttcagaagctttctgggaaagtgatagagttgaacttgtaggttgaaccacagaagacagaaattggccaggaaggactgaataagcccagggcacagacaggccttggtgtacgcctgtcatgaacagcctgctggggacaaaagaaatgtggtggggagagaggctatgggagaagctggaggaaaatcataaagcagagctgcttccacccctctaagggcccaggccactctgagttacagcacttacatcgacatgcagccaaaggttgtatttctcacatatatctgcaatctcctgtatcggatcaaaagctccataaacagtggtgccagcagttgcattgacgtagagagggacgtaaccctataagaaggacaggctgattagtctttctaacctcccctcctttccacacaacgaactgcagtagcattcatttccaacagagatcagctaagctggtgtgtatctgatactatatgtgggactactctccgttggtgcattcactcattccttcatttattcaaccaatatttttagtgacattcatgtgccaggccctgctgaggatgctgggaacacagtagtgagcacaaaagacaaagacttctgtcttcatggagtctgcactttaatggtgagtgactgacaatcaacaaatttaaataagaaaaataaatagtatgtttaagagtgacaagttctatggcaaacaataaagcaagaaaaagtcacaataaatgtctggagtgatggcgggtatctgaatgccatcggacaatactacat

SEQ ID NO: 60507 - DNA, 1312 bp, Bovine  19866881953360
  misc_feature (1)..(1): n is a, c, g, or t
ntcgggttccccttgtgtgtggagcggcgctcgtgcgtgttattacccttcagatgtgatcaatcaggaggactcctttccccatcaccaagggaacagaagctaggggggggagcgtatagtgggttggaaatcggacccttttctctacggaggcactcggtagtgtgcgccggtggagtacttggggaagctccgagcaggatgagaaaactgaagtgaaaaagagatggagtcctctacgggtctgcgagttctctcctcatctctgcgtcctttgcttttacaacgaacctggctcagtagagagccagcaaggacatgacccagggagaggtttccgctcttggaggcatcagaaagctgggggagccgcggggcaagtaacagacgcaaagctacagctcctgtcttctcgaggatatggtaatgggggagaggaaagggagggagaagcactcagcgaggcagaattcttcacagaatttctcttttccttctccttacccgaccctctgcctagctcaaaaaacagagcgtgttgagtacgttctggattactcatagggctttttcttttctttttttccgggtgcaaacccgtgatctgggtttataatcgccctataaagctccagaggcggtcaggcacctgcaaggagccccgccgctctgcccacgagctgcccccgcgagcagcggcctcgtgattcccctgctgagccggtccccgcctccccactccgcctccgcctcccccaaagccaagcagccgtctcttcggatcgctctcctctcttccaggagctcgcgtgcgggacggtgctagcaaaagagaggctgcatctggaggtgacgccgggcagattacgcctgaggcagagccgggccgagccgggcagatcgctgggcgctacgcagaagagcggcaggagcgcgcggcttgctgtctcccagcctaggtgggtacgcgcgcaaccgccgggaccttcccagtgcccagttgtgattgttcagctgggtcctgttcagccgcggtgtcatggccaacccccacccccagagtctgtcgtctataccctcctgaaccgagagcttcccgcccgccccagtcttagctcccggttcctgcgcgatgcagagacctcagccttcacaatcatcctatccccatcagcgagattcatgccccgaggacgcacagaggctgaggctcacgcaggagtggagagagagcgattttctcctccgcttcccggctgcgagcaccggtctcaccaacgggctcctggccagcagcagccgaaggcgc

SEQ ID NO: 60508 - DNA, 1099 bp, Bovine  19866881992899
  misc_feature (1)..(1): n is a, c, g, or t
natcttctgaactcgtagagttaatctatataccatctatctgtctcacagatttaacctccaggaattatgcagatgttgtctgcaaatatgagcttgattctcataaaatctccagtaatattttataaacaagaaaaaccttttaaaagatttaacctgctgtccttagcaatgtatgaccttttctcatgtgtataagcaattaactttgggagcaattatttgctcccaaaattgaaactagcaatctagaagttgatgtagatgtaaggtatttccactctgataaaggccacttcattttctcaaccaggggaaaaaaaatatgccagccatatctctatcttcctcaactagtgttcctctgaaactgctacctgcttcattttcctgctttggatactggaaaggtttggagagaataaagagaaaaaattatttactccaatttttatattttaaaattgacattaccctagattacatgtttattcaaagtgttacacggttttatatttatgcatttttagttgaaattattcaaaataaatttggtttaatttttttacagttttctagagttaaataatttgttgtcactggttaacagatgacaccacccttatggcagaaaacaaagaaaactaaagagcctcttgatgaaagtgaaagatgagagtgaaaaagttggcttaaaactcaacattcagaaaactaagatcatggcatccggtcccataacttcacggcaaacagatgggaaaacggtggaaacagagacagactatttttgggggctccaaaatgactgcagatggtgaccacagccatgaaattaaaagatgcttgctccttggaagaaaagctatgaccaacctagacagcatactaaaaagcagaaacattacttggccaacaaaggtctgtctagtcaaagtcatggtttttccagtagtcatgtatggatgtgagatttggactataaagaaagctcagtgctgaagaattgatgcttttgaactgtggtgttggagaagactcttgagagtcccttacactgcaaggagacccaaccagtccatcctaaaggaaatca

SEQ ID NO: 60509 - DNA, 748 bp, Bovine  19866881996675
  misc_feature (1)..(1): n is a, c, g, or t
nattttttattgtgatgaaaactcttagaactctctcttagcagttttcatattatgatgcagcaatgtgatattcacatttatagctgccgagagattgaatacacagacaatggaccatatataaaaaaagaactctgacccacaaactgcaagaacttgccaaggaaatcaaccctcttgtcaatcataaacagtccagccactaaggcagtcttttacaagtcagtcttgtagaagatagagtgttcatttgggtaacaatataggaagcttaacaatcacttctgtaacaacaggccccaaatgtcaaaggctcgattaataactgacaacttccctaattttttaccccacttccaagttaaggccaaccaaaaaaagccaaatatgtaccctaccaataatggtgctcttgatgagatgccaacagattcaccgcagcgatattctgcactcagggcacatgtggagcttctctttttctaaagctttcccactcctctgcctgcctttgtgtctctgccaaaatgcaagtaacagtggctgacccttttgctatcgaaagctctgaagaaagaccctttgcttccctcatgtggctgctctttgtttcattgcatagtgcacaaatatagcttcttgaatggaaaccaaaaccaacaatcaagtccataaaggtataggacatcacttgagtacaagtttcataggttaactgaccagggaccacttcatcatccatgac

SEQ ID NO: 60510 - DNA, 5212 bp, Bovine  19866880353924
  misc_feature (1)..(1): n is a, c, g, or t
ntgagaaactctgggctggaagaagcacaagctggaatcaagattgctaggagaaatatcaataacctcagatatgcagatgacaccacccttatggcagaaagtgaagaactaaggagcctcttgatgaacttgaaagaggagagtggaaagttggcttaaagctcaacattcagaaaacaaagattgtggcatccggtcccatcacttcatggcaaatagatggggaaacagtggaaacttggcagcctttatttttttggactccaaaatcactgcagatagtgactgcaaccatgaaattcaaagatgcttactccttggcaggaaagttatgacaaacctagacagcatattaaaaagcagagacattactttgccaacaaaggtccttctagtcaaggctatggtttttccagtggtcatgtatggatgtaagagttggactctgaagaaagctggacattgaagaattgatgcttttgaactgtggtgttggagaagactcttgagagtcccttggactgcaaggagatccatccagtgcatcttaaaggagatcagtctgggtgttcactggaagaactgatgttgaagctgaaactccaatactttggccatctgattcgaagagctgactcatttgaaaagaccttgatgctggaaaagattgaaggtgagaggagaaggggatgacagaggatgagttggttggatggcatcaccgactcaaaggacatgagtttgagtagactctgggtgttggtgatggacagggaggcctggcgtgctgcagtccatggggttgcaaagaatcagacatgactgagcgactgaactgaactgaactgaatttaaaggctccatcaccaaatccagttatcttctgaggtgctaggataaaaacatcaacataataattttggaagaacataatttaactcataatagaaggtatggagactattaatatccttgcttatatgcaatgctgtcattgagaagaaccctgagaataagttcagaaactcagctctaatggtgacctgcctgaattccatacccattctttatcttgtggttctctgttttggtaaatggtagtgtctttgccttaatttaccccagtcagacatcatggaacctagtgccccctctctcttgtcatcatgtttaattagtcatcctactgtatttatctctgctgtttttccagtgtaacatttttttccccttttcaacttccgctactttggtccctgcctcctcatctattatcacactaggtatagccctcaccacgtgtcattctcctgctttaaatcattcatggcttgcactgccctaagaagtaaatgcagtctccctagaatggcctacaagctacttataatctattaaaaacaaatgcaattccatctctcccttctgccccaaactccaattctttacaacatctctggccatattgattttttttctagcttctctaatgtgccacattgtgtctcatgacagcctctgaaaaagctataattccctctacttagaactcattctttccttttttctttcttattccccgctgcccaatttttattgtttttcaaatctcagccctatgtcatttcctttctaaagccttatttacctcaattgtcctgcataggtgactttcatcagtgctcctaatatgttgctcatcacacaatgtaggggatgcctactcacctgtttgtttccttcaatggactgaaaatgtatcaagattagggattataatttacttacactgcatttctgaaacctttccagtgtgtgacaacaagggcttatacatacttgttgaatgtacctcgtgacaagttgttgtttatatgaatccccaaatttgggaaatggagcacctgaatgccagtacaaatcattaccataatgtgacattctcaaggaagtaatttccaatgggagagaagtacttggtcttttctgaagaagttaaaaaattttatccccaaagcatgtggttttagaagtttaagtgtacttatggggacaaagggatagactctgaaaccatgatgggcactgtgccactgtagcacactattccacccctcaaacatctcaaccttctgtgaatctctcgagtcccctgcttcccataatcatgatgaatccagcctggcccttcctcctgatgaggtggcacagagaacattgtatccgcttgttttctcagtcctctgtagcaactcaggggaaagagcaggctagtaggaatccttgctctttcttggactctctttttagaatggtgtggtaactgggcctcagagaatactgaccaactcatacttgttccttgactttagttcactgtactgtttttcttatatagctgtaaatgccataaagtcagtgatcaaatctacatagttcaccactgattaaccacttcttaacagcatactcaataaatactgattttgaagactttagcttaaaaaattaggggattgtaacaccaataactaagaccagaaacaaaggaatgcacatctgacaagggaaattaaagcctgggggcagtcaaatcacagtgcaaacctagagcctaagaaatacactggcattagagatacataagtttattgtcatggaatactgctgatatttaaagctttgggaaaatagggaagtactcagggagaacatatttagcctatgtatataataattataatattaacatgtattgaacatttaccatatgctatgtacttttttaagtgcttaaaaagtatcaacctacttcattcttacaaaatctccatattgtaaatagtgtgagtctcttttaactcatgaggctgctgctgctgctgctaagtcgcttcagtcttgtctgattctgtgcgaccccagagatggcagcccaccaggctccccctgtccctgggattcttcaggcaagaacactggaatgggttgccattttcttctccaatgcatgaaaatgaaaagtgaaagtgaagtcactcagttatgtccgactctttgcgaccccatggcctgcagcctaccaggctcctccgtccgtgggattttccaggcaagagtactggagtgggatgccattgccttttctgaactcatgaggaaactgagccaaaactgaggttaaggaacttgtctaagctcacaaagcttttgagtgccagagggacctttagacgtagccagctggtccatgagccatgatgcccgaagaaagaagagggagggtagtggtttatcctatttcttccatcatattttagtaaatgttggagaaaaagtcatttttaataaaatgtggaggtaaattttagcttttgatagtttgtcgtaagtattgtgcatttattctaatgtacaagtctctgaactggcagggttttgtctaatgcttcaggtactgaaatggcccatagatagcatgatagcaaaaggctctcttttaaaagtaccttgaattgttcttggcagcttatccttcgaaaggaaggagcatcagaaaaatgaactgaaacatgctttgcattgctatgccagctgtctgtcagagtctaaaatagctaagactctccagaaagtgtaaaatcatcttaaaggtccaattacacttttagcttatttgattttcttaaaaagaaagtagtttaattcattcaatattttaaaaatatttttaataatattactatattttattttaaatgagttggcacttgtgttgactaaggggtttgcctcccaccagaccagatcagggaactgcttaagagccctcattatcatgtgtaagtcacagttgacatgtgcttttatttttatctctgtattttcatgttatattttgatgtacttcttgataatatcctagatgtttcctgttcccaggaaagcaataaatacactgaaccaaacgcttttttatgtatagttgaaaatgtattttttatagtatatctacttatcaaatttttaaagaaacagttttgctgaattgcagcttcaggtaagtacttgtgcttctcaataactgctttaagggaaaagcaaaaaccccctccaaatccccaaagactatgggcattttaaaataaaattcacagaatctgatttctgagcatgtgcctggtgaaacagactggctttgcacctcattaggagatttcagacagccctgcaccaaggcagctccagccagctgactcttcagtgaagtcatgaattctgaagcatcttcatgtatagattctattaaaattaggtttgatctctagttgggctttgtaatttgcagtttctagtcagcagtcagttttagataaaactgcatcactggatgtttatttaaagatttcattgtctatctttgagcatgtgtataatgtacgggtgtgtgtgtgagagggagagacagagaatgcaagcacaagtcttaacaaaagctgttgaaattgagaggaaaagtccatctataccttttctcactgttgcctcattttgcaattctctttgttaatacttaggagaacggagggacaactacccaaagagctccctccttaaacatgaatgtccttgcaatggctatggctaatactgcaagattcccactgtgtttttactaagctcagcttgctctttcctggggctttggagagaagcccatttattcacttgagcattctggatatcgttgacattttcttcaactgtgcctcaggctgttgtagtggtgaaggcttttaacaggagggttaactgcctgaatgtcagaaagcttcaacatccacatgctttactagcaaataaattcgtgtgctttgtactttcaagtaggtctgagagcaggtcgcatattaataggttatgtatgggaatggggaaggtgggctggagctttgaggaacatttctggcccttgctgctgtccctacacttgtgtattgacagtttaatcctgcctagagattatggtgatagaggatggattggtgctcacagaataatcttgataattgtgaatttattcaatattatagtctgcatacttcaaaacccaatattaaatccattgaatttacgttatcaggatgcaaattgatggatccgtcagaacttaactactcgatctccagattcctcctatagaaataag

SEQ ID NO: 60511 - DNA, 2989 bp, Bovine  19866880811450
  misc_feature (1)..(1): n is a, c, g, or t
naatataaggtaatattaaaatatctagctttagttaggttttgttcttttttagtttttaaaaatttgttttaagtatagtttatttacaatgtgttaatttctgctgtacagcacagtgattcagttatatatatatgtatatacatatatatatacacattctttttaatattctttttcattatagtttgtcacaggatattgaatatagttccctgggctgtgcagtaggttggaaagcccattttcttaagaagattatatagtgttagtgggagacttcactctaccttttgatgctagctatgcaggactcaaggagatccaaccagggctaaaggagattagccttgggtgttctttggaaggaatgatgctaaagctgaaactccagtactttggccacctcatgagaagagttgactcattggaaaagactctgatgctgggagggattgggggcaggaggaaaaggggacgacataggatgagatggctggatggcatcactgactcgatagacattagtttgagtgaactctgggagttggtggacagggaggcctggcatcctgcgattcatggggttgcaaagagtcggacacgactgagtaactgcactgaactgactgactgatgcgggactcaacactgtatatactaatgacatttactaatacagtgacatcttgaaccttaaccatgtagagtgtcattccctgcaaaactcaacagcatatttacaatctcaaacctagtctacagagaacagttaccactgagcttctcactgagctggcatcccacttttggggacactcctattgctttggtgaagggagtgtcatctgggctctcctggggaacataatcagctagtagtttctctgacattacaaaataaatgtgttataacatgctaacttctctgagaccttgggactcttctccagtgttttgccaaggtaggtcaagctttgttctttgcttatctttctagagctctttgtttgatatgactatattattgcagtaaagtcagtgatacttttatgggccttcaaatattttgttttactgataatgcatacagaaacaggaagctggcattgacattctaactcagtttcctttttcatattaattttgccttaatttcaaaaagttggataagttgcaaatatttaaatgaaagacaaatgctatgcaaatgatagaagaatgaatatgcattgggttagaacttctatttggggatttcaatttcatttttggcacttttcctttttaaaaaataagtttaatctcttttgccacatgatggtagtgttgcttctcttgttaagccacaaaaatagattcagatgccagttaaaatcataaaaaaatatatttctccaaggagatctaacaataaaacattagttttataaagaaaaaagactcctacacatttatgttatttttaaagagcaggaaacatcaatgccagtgtttcctgaggagaattgccatttcttccctaggaaacagatctttggatgtcaggaacattctcgttatctcctttcttaagtgaatcttgttttgggcattgtctttcaaattacttcccccttttaattgggctgacaagtataatttatttccttctaagttgatgtagatatttatcttggagaagagaaattttaaatggcacttatgttgattgtaatctacataatcttttatagcagatttaggattagaagccaacttcgaaagttgtctagtgtgaccctctatttgcatgcagtaatttcttctgcatcatccagaacagatggctgtgcagtttctcaagtgcctccaaggatgcccttcaaggcagcctctgttcattggcggactcctagaaaaggaatttgtttgctttatgctcagcagaatgtggtgttgcttggaagctgtgaagcttctgtttgcttgaattcaaaaccatttcatttgtctggaggcaaccatcttgttgagagaatgagtcacaggataaaattatgaaatgtagtttgctgcatactggagtcagtcacaatctgtccacagatccaaaaaatattgaagaaatatagcaagctacattttgtactctgagagatctgggtttaacatgtcagaaattatttattttcctcatgaccgtcatgggtttactgaaatattcaattatgatttttggttgctctgttctcagcagtacagtttccattaacattgaatttcacaatcagcagatttagtggaggaaataaattcctttgtcaccttgtcaaattaggtgatggtgtgtgagaaagcatacctgtctcagcagagccttagctattttctccggggacaattttctctacacccagcaatccagtgactctatagccttttgaaggtaagatagtaagagaggtttgtggaaagatttagactgagtttacagggatctgaatggcaatagggtcaccaggcatcctaaatgcattcttcagctttgtagatttagaaatgtcttatcatttcagcaagggactgattatgctctttgaaacccactagagtaactgatctcaaaagagagtgagatataagcctgaggtgctccattattataattcccatgagaagtgcacctggcagaatagtctacagtggtcatagcccatgctatactattttagtaagttttgtagtatcggctcctgagggtcactgtgtcaaggatagatgaatcaaaacctcatgaatttgctactttggcagatggctagtcacttctactttgtattcacacttgttggtgataatttcagaagatgatgtttctgatcttgactttaaattcttatctgagtcctgaaaccacctattcttgataactacatagacttttatgattgtaaattttgtgttgtctaaactagaaatcaaatatgaatcatatatttttcaa

SEQ ID NO: 60512 - DNA, 661 bp, Bovine  19866880813061
  misc_feature (1)..(1): n is a, c, g, or t
nacaatcttttattttagaactagatggcagagtaacgtgaagacccataacatggttttctctagatggagatctttgagtaatttatagattcacagactacttgtcttgtgtttacgggattatgtgtgtttgtttattcctgtttgggttagtcttcagaaaaagataatatcagtttcttttgcttatttatacttgttatcttctaacggcttccctgaagtttcaaaatgcccatgctgaaaagaaggtatttgacataaggagagaaaatcagttgagcttgctaatcagattctcctcttccctggggccttcagaattgatgttttctggtcatggggtaactgggcattgtgccaccatgtcggtgcctggactgtgtttaacaagaagcttcattagattgtcctcaatttcttgagaggtaatcctgttaggcagtgtttatcagtcattgtgtgctcttgtcattcctatcctgttcagtagcagcgctcctaggggaatatggagtgtgtgtatatgagtagtggtgtatgtgtacaaataatactgccagaattgttttataaaagagatatcctcccaaaagtagagaaaacagaaaagagactgagcagcaagcccctaacacacacacacataaataacatt

SEQ ID NO: 60513 - DNA, 654 bp, Bovine  19866881599715
  misc_feature (1)..(1): n is a, c, g, or t
naaatctgtacagagcagcttcttaagtacagggtcttgaaagcatgtcctctgagatcctaaacaagatgatcttgtttctttttcatcagagaagaaaaagaaataagaggaatacaaatggaaaagaaagaagtaaaactgccactgtctgcagatgacaagacactactcacagaaaatcctaaagactccaccagaaaattactatagctcatcaatgaattcagtaaatttgcaggatacaaaattaatatgtggaaatctgctgcatttctatatactaacaacaaagtatcagaaagggaaattaatcaacttaaggttataaaaactgcttttgtccttctgaattcttagcatctagaccctataatgtttgctcttcagtagataacctagatgaaatggaagcatagcaagattacacacttgctatgcatgaactcctagtacacaattatcctttaccagtgaggaaatgatttccctggtaatttgtcttataaaccccattccgcatagacacctgaaatagccaaagaaaaggctgaatatgcaagctttttttttttttaacaatctctataaattcctagcaatattttgaacaggacttcttaaatgattatatcttttttgctcttctaaacg

SEQ ID NO: 60514 - DNA, 2910 bp, Bovine  19866880442581
  misc_feature (1)..(1): n is a, c, g, or t
ncatgtgctttaagagactgagatacttgaagatgtgtttatttttagtggccccaagagtgtcctgccccatgtaactcattagcttcagttcaagtatccagagtttgactgtctctagggttcaaggaaagagggagtctctggagaggtgacatcaacatagtccatcttttccttccaaattgattaggagtgaacctattgtttccacttaactttcaaatttcaaatctcgtatattgattgcaaattttttttggctagtcttttaaaaaaaatatttaattttgtctgtgctgggtctttgttgctgtgcacaggctttctctagttgtggtgagcagggctactttctagctcaggtgcttgggcttcttactgcagtggcttctcttgggctgcggttgcacaggattcagtggttgtggcacacaggcgttgttgccctaaggcgtgcggaattttccctgaccagggatcaaaactgtgtctcttgaattggcagttggactcttgatcactggaccaccagggaagtcctagtctttacatttctttataagttgagatatcgttgacacttacattagttttgggtgtgcaccatattgattcaatatttgtacgaatttagttttcatgtagactctaattgtggtggaatgagaaaaaatactcaaattaccttactctctgtgtatatattgaaggtccatgtatatccttcaagtggatattcatttaagatgtgagattgtgaatgtggacttgaggaatctccttaatgtttaaaagtgagaattctttttctgctcaaatttctttgtgcactattttcttcagtaaagtgtataaactcttaagcatcatagtcaaggttctttttcttgtcctgttgcttccttattgtttagtttcacggttcagcttttcccctatgatgcttcttttgctttgagtgttttgatatagtgtatttctttcaaccgtcatacttcagttcaagctctggtttctcttcagattgagtaaatcttttgccttttacttttttttttttttaatttaaagtttttttaaaatttaaagcattttttttttcctctttgaagtgtgtcttcttccaggtagatagggaaaaattggaactcaaagggcttcaaaagaaagcaccagctctgtgattttggaaaaataaatgttattggacatctcagtaacttaataagtctaaaatgattcaacattaaaaaaaatgtagcttcccaatgtacttaatctttctgtaagttgaatgtgtaaagtgactaggggagaaggaataatatgtgatatttacaatataatcaaagattggcttgttgtactggctcagatagtgaataatctgctgcagtgcaggagaactgggttcaattcctggtttgggaagatgtcctggagaagggaatggctacctactccagtattcttgcctggagaattccatggacagagcctggtgggctgcagtccatgagtcgcaaagaattggacatgactgagtgactaacacaacaacaacaaataaacacatccatttatatatacatacacaatattttgtaaatattggctttctacttacaaaatatgttctttggagaattatggaaatcattctctttacagtagactggggaacaaggtaagtgaaatgggaaagagccaacatattgaaagcagatgggagaaaagaagttgaggggtgggaaagaagcgataaagaaattgaaaagactgagattttgaggggggatctctaactcaaacatccaacaagatagattattaataaaataaattgggcaaggtataagaaacaccagcataaaaaattaaaacataacagaagctatggtttttccagtagtcatgtatggatatgagagttggatggtgaagaaagctgagtgccgaagaattaatacttttgaactatggtgttggagaagactcttgagagtcccttggactgcaaggagatccaaccagtccatcctaaaggaaatcagtcctgggtgttcattggaaggattgatgctgaagctgaaactccaatactttggccacctgatgcgaagagctgactcatttgaaaagatcctgatgctgggaaagattgagggcaggagaagaaggggacgacagaggatgagatggtttgatggcaaaacaaacttatgcaatactgtatataagacatgaagtcataaaacttttagaagaaaatattattcctcaacgaagctggaagaaaataaaagaatagctattattaaaaacataaaggataacaacagttggtgaagttggaaaaggaacacttatgtactgttgatgggaatgtaagatggtaagccatgaagtgatgggatgatcatggcatctggtctcatcacttcatgggaaatagatggggaaacagtggaaacagtgtcagactttatttttttgggctccaaaatcactgcagatagtgattgcagccgtgaaattaaaagacgcttactccttggaaggaaagttatgaccaacctagatagcatattgaaaagcagagacattacttttccaacaaaggtccgtctagtcaaggctatggtttttcctgtggtcatgtatggatgtcagagttggactgtgaagaaggctgagcaccgaagaattgatgcttttgaactgtggtgttgggagaagactcttgcaagtaccttggactgcaaagagatccaaccagtccattctgaaggagatcagccctgggatttctttggagggaatgatgctgaagctgaaactccagtactttggccacctcatgtgaagacctgactcattggaaaagactctgatgctgggagggat

SEQ ID NO: 60515 - DNA, 1274 bp, Bovine  19866880513126
  misc_feature (1)..(1): n is a, c, g, or t
naatggaaagagctacaacagcgccttctctcgattattctcctgggcttctccaaccagccccagctggaaacggctctctttgcggtcatcctgatcatctactccttgagctgtttaggcaatggcgccattatgcttttgtcaacgatggatcctcacctccactcccctatgtacttcttcctctccaacctctcttttatggatctttgtttgactacttgcactgtccctcagaccctggccaactttaaggggaaggacaagaccatcacctatggtggctgtgtggcccagctcttcattgccttgggactcgggggagtagagtgtgtcctcctgtctgtcatggcctatgaccgctatgtagctgtgtgccgtcccctccactacatggtgatcgtgcatccccagctttgcttgcagctggttgtaactgcttggcttacaggctttggcagttctgtagtccagacagcactgaccatgactcttcctctctgtggtaaaaaccaagtggaccatttcttctgtgaagttccagtgatgctgaaactggcctgcaccaacacctctgtcaatgaggctgaagtctttgctgtcagtaccttcttcttggtggtgcccctgtcactcatcttagtatcctacggtcacattacccgtgcagtcctgaagataaagtcagcccaagggagacagaaggcttttggaacctgtggttctcacctaatggtagtgattattttctttgggacgctcatctccatgtaccttcagcctccttccagctattcacaggatgtgaacaaaagcattgcactgttctatactctggtgactcccctgcttaatcccctgatttacactttgagaaacaaggaagtcaaaggggcactaaggagacaaatgaggagaatcctagacttgaggccgagttaatgcagtgcttgcaggcccaggaagttctgcaacggaacacttctgagagtaaaaactagttaatttaaacacatccttataaagcaccaaccatgtgcgagactgtgttctagatacttgagatgtatcagtgagacagaggctaaaccattgagctaaaccttttgttagggagaatatatgttaaataagaaattctaaaaacaaactatgctatatcatgtactacacaataatgggaatgaacaataattacacatacaaaaacatgaatgattcctacaaacagatttacagtgagcaaactagatacaaaataattcctacag

SEQ ID NO: 60516 - DNA, 1832 bp, Bovine  19866880592728
  misc_feature (1)..(1): n is a, c, g, or t
naaaaaactgttgagtgataatagaattctgatttaactgtttggtgtaaccttttaaaaatttgattaaccacataatcttttctcttgtctccctcccccccccgccccttcccacccctttcctaaggcctccaccaagatgtttgatttaaaggcttgggctgagtatgttgtggaatgggctgcaaaggacccatatggcttccttacaacagttattttggctctgactccattgtttctagcaagtgctgtgctgtcttggaaattggccaagatgattgaggccagggaaaaggagcaaaagaagaaacaaaaacgtcaagaaaatattgcaaaagctaaacgactaaaaaaggattgaaggaatgaacaggctgtgcgtccagaggaaaattgttcggaaaattatgcatctttgaaaggacctattaaggtttctttttggatcttatgacagtattactaaatgaagtctgagtctgtggaagaatgtcagttctcacctgtactgtagcaacttttcagcttcggcatagaactctgttgacagttactgtaaattgggatttattatgctacagattcttataactgactttcatttgcctttttgcagcttatgtgtgaatactaaaatgaaaacatcctgtgaagaaaagtggctttagattatgaactctattcaaaaatggcttaaaatgtcctgttctggacaaagattaagaatgtaaaaatcaagagttgttctgagcagaaaagcgtggtttggcttaaaagatacatggtgtattaattacatctctttatcattattacttatttcttggaatagaatcatttctggtttcctcaaagcaaaataatattattcaatgagtacttctttattatctgtatttttcttattttagcttttgagatactggtaattaccagatagtctgcattttaaaaaatctaattttataaagaattgtcttgactatgtagaataccacctactggatataatcatttttgtacttatgaacactgccattttcttagagatgacttgagtagagtaacactatgatttaaagcttaagagtaaaaatgccaaaccttggaaccagttcattctcacttatgctaagtagaaatgtgaagtagttaacatgtcttatcagataatttgctgattatatagataccacttttgttttttattccattctttgttttaattcatgtggtggttatgtcctttactttttgatcagacagattcacagtgaaaattaaaatttcaactttcttttaaggaacttttaaagagttacagttatcttatatgtcataaatggtaacacaatatcctcttaatatttggaaaaattttgtttgcattgtattaattgggtgaaaaaggtgtaaattgtgtcaaaatgagaatgttataattagaaataaagaggtaaaggatatttccttcagttaaatagtataattggaactttttactctttaacatggcttttttaaatgcatggttgataattttgttttcagtaatagtttattaatgttttcctcacctctaataatgaattttaatttgcaaaaaattgtccaatagctttaatttaaaaatgaaactagatattgaaataaatttgatacttttttataaagaggtcctgagcttttttgggggggaagggataataattcaggttagatatgttatagaagttaaacctttcaaagggttatgagtttcatttgtagacaagcatatagctgaccctgaacacagggttaggagcatttgccctccctcgcag

SEQ ID NO: 60517 - DNA, 1302 bp, Bovine  19866880603685
  misc_feature (1)..(1): n is a, c, g, or t
nggagcttgtcaagattgggttcccagagtctacaaagagctataaatttcaatgtagggaaacccacattgtggtcactgcaattcttactaagccagacatatgttccgcaagaaccattccatctctcatccttatacatctgggggggcgggaaatgcaacattctcctgtttttgtttttcccattagcctggaggctgacttggaagaaaaagtctcatcccagaagagtactaatatgagcatctggtaagtgcaataaactttaattggtcaaagccattaagaaatgagtcaaaaaaaaaaaaaaaagaaatgagtcagacttgaaaatgagcaatatgtgactctatctctttctgcaaatctactttttccttcccaagctgaagataggtttcctttgctgctcagtccacacagcttgaagtggaaatagattaaattttaaattttcatatcttctctgcccaagaactaaccctacttcacctggccatcccccaccacccctcaaagacccctgagtgaaagggcagggactttgatgcaaggatggagataatcacagggccattttctcttggagatttctctttaagctgaagagaaggatctacacactagaagtagctactgtcaaggtagagaggccttctacactttatgtgcaaagtggtgaaagtcattggtgtttggggacccagaaaactcagggctgcatcaacattagtcacattggcagctctgagagcattggtgcctgacatagcatcatttttgtcaaagcaggcactggcagaacagtagtgatgagcgacttagatcagaagggaaagaaaatagagggttctatccaccagggtgagggaaaagggttcatgtgagaactttctggggactctagatagaaacggtggcaaatgataaaagcagagatttcttttgtgccagccagatgtagaggtgagggaaattacagagagaagaaacctcccaagaaagacttttaataattttcttccttctgcttcttgcaaagctcagagcctgccttcccctccatctttgcccacttgatattccatggtgaaatgctgtaatctccacagatattagagaacaattttccagtgaacgttgttgaatgccccctatgtggcaagagcaatgccaagtgatatgatacaactctatcctgtgtttcctgaaactgtatcagcctgaagcccaagagtgataataaacaacaggttgttttttcatctactgttacaatccctgcagtctaaggaaaa

SEQ ID NO: 60518 - DNA, 2004 bp, Bovine  19866880640235
  misc_feature (1)..(1): n is a, c, g, or t
nctaaacccagcttaaacatctggaagttcacggttcacgtactgttgaagcctggcttggagaattttgagcattactttgctagcgtgtgagatgagtgcaattgtgcagtagtgtgagcattctctggtattgcctttctttgagattggaatgaaaactgaccttatctggtcctgtggccactaatgagttttccaaatttcctggcaccactttcacagcatcatctttcagaatttgaaatagctcaactggaattccatcacccccactagctttgttcatagtgatgcttcctaaggcccatttgactttgcattccaggatgtctggctctaggtgagtgatcacaccatcatggttatctgggtcatgaagatcttttttgtatagttctgtgcattcttgccacctcttcttaatatcttctgcttctgttaagtccataccatttctgtcctttattgtgctcatctttgcatgaaatattcccttggtagctctaattttttgaagagatctcgagtctttcccttccaatgtcctagttcatcacatgatatgcttagtggcaagaacttcagggtcttgtttggtaaaccgtcaggtgcttgtctattctaggacattggaagggttcatttcattattctgaaacttttcttctctgaagcaagtggctccagcatactaaatgttctgttagacatataacgaaattttagagattactactctttcttctctccttctctttccatccccccccccctttttttggctaaagtatgaatttagaattaacatctggtctacacacacacaaaaatatgggtttttggttagcttgataaaatatattagcctatgaattatatacactaaaaatattgtgtactacaaaagccattttgtgatattggaatgaactatgacttgcatgggtaggatatgttaggggtggtggagcaagatttatcttgcaatttcccagtgacctttcacatcttaaaccagagagagcaaacaggccaatgagttctatttagcctgtgcatggatttttctcacaaagtatgattatctcttggtaatataaaattattgccactacttaaagagattttacataaaatctgactttccagattctcttagaaaaatgcatgatgtggcaacacaggcaccagattcccatgtgagaacaattgactaaagctgactattgtctagcgagacatggtccccactgccgcacagcttcctactgtcttacatacctccctttgttcattttgcctgtgtgacccctaccactgccttaagggtttctcaaggaggcttcagggctctaggtcccttaccaccaaaacagcttcactttaattagttttatatattggcctcccaaataagatttctctgaagattttctgcttgaggatttagattaataatttagattaataataaattttaaaatgtaacttttgagcacctgaaggtagaggaaagccactttaaaattttctttagatagaatttataggtaatcttggagaaggcaatggcaacccactccagtactcttgcctggaaaatcccatggacggaggagcctggtaggctgcagtccatggggtcgctaggagtcggacacgactgagcgacttcactttcactttgcacttccatgcgttggaggaggaaatggccacccactccagtgttcttgcctggagaatcccagtgaaggcgggccctggtgggctgccgtctatggggtcgcacagagttggacacgactgaagtgacttagcagcagcagccacaaaacaaattaccctgaagtgtagcagcttaaaataacaaacatttattatctcacactttctgagagtcaggaatctgattgcagcttaattgagttactctaactcaggatctcttacgaggttgcagtcaagctcccaggcaaagaatactaggcctatattcag

SEQ ID NO: 60519 - DNA, 1522 bp, Bovine  19866880689873
  misc_feature (1)..(1): n is a, c, g, or t
ncttacctgccatcagagttgcttcttcttgatgaggctcaaaccaaaccagataaccctctgtggtagcaccacaccagattttatagccaattctaatagatttaccattcagaaattggtcactatcaaagcactcacacattgtcttatcaaaacagtagtattcttcgaggggagcatataggagaaaatttttattcatttgctttatgagaggcctcagttttgtgaacttatcattctgatctagatggctattatctgcaaaatgcaggtatgagaaaatcaattcaaatctatcccttctgattgcatctctaaccaggttctggtcagcatcagacgtttcccagtacattccccttctgggacgctgcacgagtccactcaaaagcaggacaccaaacacacacctcacttcctgaactgtgacttccaagttgacatttttctgagaagcataattattggtttcactgacaatcaggttgaatgtttcatcatcaaaaaataactcaaagaactctactgggttcaacttttcactcttgagattcaaaagtccagaatccagtgctgaccagcatggaaagctgggtttaatatctcttttggtccagtgcttctctgggacacctggcccttttggccgttttggagcaggctgggtctcaggcccgttatcctcctccacatctgaatcaccagaaaatgcaagcccttggagcagttcactcactcgagctttgtctttcttcctccctttccgggtgatgtctcctgcagcatattccagggaggagatgtgcatccgagcccacaagtcccccggatgacggtccttgagagtgttcaaatgcacaagtgtcctttcagcaggaacaggggtatcacaaggggtctggggtacacagtctctgagaaagaaaaaacataggctgtaaaaattctcagtcttatttactgatacaggataaatccactgacacctaaagattcttctgtggggaatacttctcactcgtgtttctgtggggagggctctggccagactgagcatttctggcctcccttcttccaactcactcctcatgacttaactgttgaatctgggagaaggaactgggctgtcctctttctgagcaggctgcagacattccatgttccttcccccagccaagatggatcaggaaggcctatgcggaaaggatgcagccactatgcatccatttagctctgcctctgagtggctttattggtctagcttctgtcagtcataaagctgaggtttctagactatctgttttactcctatgtctctatcaattggttctgaatttagacaaagaaatgggtgattatttactgagccccctcatctctaacagactttctgaacaaagaaggatttagcctcctctagttctgcattcatctggtggatacactgttttggggagaaacaaaagagaaactcagactgattgccctgaacgatttttagggtttctcaaagaag

SEQ ID NO: 60520 - DNA, 1545 bp, Bovine  19866880698466
  misc_feature (1)..(1): n is a, c, g, or t
ncccccacccccgcccggttccaactgtgcttgaaccacagtttcatatcttgtgatgagatatttgttcttgtgagaacaaataacattggcctgatggggggggggggcgggcatttatctctatcttcaaagtggacattgtgaacaataaggtaaatgcatttttttaagtggttaaagcagatgtacatcttgtaaatcagactaacttccctatgcctcaataggtgaaattttcttccatcactatctactgttactatccccatttacagattgggaaagtcaggcacagaaagctgaaataatttaccaaggtcacccagttagtatgtggtaaagccaggattactcagataacttggcttgaaaatctgcagatctaactattatgccagatggtaaatgagggctaggaagaaacaagagcaaagaaaggagataacaggactagagagtttctggaagtgggaagcctgaaagcctgcttggctgagaagaagccatggaaaatagaaagggataacttatgtgcagagggggagggggagtggaaactttagttacttttgcaggagcaatctcaatggctttgctggcagtttgccacctacagtgtgttatggatgaatggaaattgaggactagaatcagagataggagggcttcctttcaagtttaatagtttagccttgaaggggaggaaagagagtggtaactggagtggggcagcacccaggggcagccactgtttcttcgagtaagggcttggtaatatgttctgcttctttgatgtttctgagagaaagggagtgacctcctgcctggagctctgagaaaaccctgctttctactgaactttagtgacagttttatgccagctccttagtcaagcttacatcagagcatggtataggccacaacagcatccttacacgatcgaaagatctagtcttatttcttatgattcagagcctgtcatcctttctttctcctcccctaactgcttcacttggaggtaagggcatggttgctaatgggttaactcggggacaaccaccgagaggctcttcctagagggcccgggaagtggtattgattcccacttgggcttcctgtgccccacagtctcaattcttctccagcatctggaggctgctcattgcaccaagacatctttggggatacttattgtgggattcaaggtgaggtgcagaggaggacgctgcagaggcgcggactgcagggggcaacctgtgaagctgctccccaggtgtgtcctcgcccctggacacgcggaaggggaccgctgcagttttacggtcctatagtgattgcccacgtttcaataattttccgaagacatatagctcccaagtagagtgaggctcaagtactgccttggtccacgatggctagggaatcgaaggaaagcgcagctttggacgcccagtctgcagaggaccggacggggatcctgaccgtgaaggtggaaaaagaggacgcctccgtcttggctgcatatgcgcgcgccccatgcag

SEQ ID NO: 60521 - DNA, 940 bp, Bovine  19866880776196
  misc_feature (1)..(1): n is a, c, g, or t
ntacctgataaccttgttataagaactgttgaaggaaactgaatgctttggtctaaagaaaatttaggtgtggtaactcttttaaaatattttaatgatggtcatattaagagatattaagatatgatatatgctcaataagattaaaatactttgtcttatgaataaggggaaatttactacttgataaaaagttattgattctcgttttaaattttccaacaatgaaataatctgcctatatgtttgaacaaatgataaacaaattatgtgcctgggcagaagctattcaaatattaaatgggttgtgagacttgatgtcttacatgttccttaaaaatcctgattttcaatggttttcagaaaataaagattaagaattctttattccattcttaccagttatacagatgatctgaaaagaaggcaatggaaaaatccaatgacagctcagagtacggttttatcttagtgggcttctctgatcgtcccaagctggagatggtgctcttcatagtaaattttactctgtattcagtggctgtcctgggaaattcagccataatccttgtgtgtatattagactctcgacttcatacaccaatgtacttctttctggcaaatctttcctttttagatctctgcttcagtactagctgtgtcccccagatgctggttaacctctggggccctgataagaccatcagctatgcgggctgtgttgtccagcttttctctttcctttctgttggaggagtagagtgcctccttctggctgtcatggcctatgaccgctatgcttgcagtctgcaggccccttgtattatacggtcattatgcacccccagctgtgcttacgactggtggctgtggcctggggaagtgggctggtcaatgccatcggtcatgtccccactgacaatgactctctccagatgtg

SEQ ID NO: 60522 - DNA, 911 bp, Bovine  19866880871675
  misc_feature (1)..(1): n is a, c, g, or t
naacacaagaaaagactctacacatggacatcaccagatggtcaacacctgaatcggattgattgtattctttgcagccaaagatggagaaactctatactcagcaaaaacaagactgggagctgactgtggctcagatcatgaactccttattgccaaattcagactgaaattgaagaaagtggagaaagccactagactattggctgtatagtggttaaataaatgtttgcagagttgtaaagtaacagaaaaatcacacatgaaaaaaaaccctggtgtgttttattgatatggaagacaatatttaagtatattttaagcatattctgtattaaatattttaaacatatgtattaactatattgaacatactaaaattatattaaatttaaattatatttaaaacaatatatttaaattaataaaagtattaaacttaattattttagtataaaataaacttttcaaagtttcaaaatgtcagatatagtgcattcccatttctatggtttgcataaatatgcaaagataattagagagtttgaagaaagtggattttcaatcttctaaattaaaaagttaatataaccatataaaaatgtaacatataaccatgagtatatgttaccttaacatttaaaagggataagtaaaattttggaatggaataaaagtaatttgactgaagtttaatatttaggttagtctctagaacaattgtaacctcccaaaaaatacaaacgcttgcatcacatctctaaagtataaaaattattacaagcagttgcagacatgtggtatagagcccatgattttgctttataaaacagaatcacattgatccagagctctaccgctgcccagatgtctgacccacattaatgtaaccacataattaaattcatcac

SEQ ID NO: 60523 - DNA, 953 bp, Bovine  19866880905120
  misc_feature (1)..(1): n is a, c, g, or t
nggatgactgggactctctcttcacatgatcttccatctttcaggaagttaggtaggatttcttcacatgatgtctcagggtctcaagatggcaagaggagaagttataaggctcttgaaccctaatattgaaactcccacaacctctctcccacaacgtcattaccacagcattctattggccaaatcacaaggtcagctcacatacaaggagggaaatagactccacctcttgatggtagctgctgcacaatcatattccaaagggacatgcatagtaggaatttgtgacaggacttggtgactgaacaacaacaatcaatcaatcaaacaatgctttgttatctcatttaacactaaaaacaacactgtgaatagccactattgatatatcttggtaagtaaattatccgttatcacttctttaccagtgttaatctgaattggtctgtgaaccttgttttgaacccacatttacctggtgggcagctcaaagtgggccagggagaatgtaagcactccaaaatgtagcagcagctgaaaaagcactgatagtgctgagcatttgaacacgtgccattataaatttttgtaaagccagagagctccatgtccttgtctcaggatgactctgataatgtttaagatagagagggtgagattaagtgacccacacacagactcctggttaaactccttttctgatactgagttcctgagtgtctgatgtatctacaggcagcatggacttaaagagagtaataagcaccttagaggaagccccgatgagtggagaaactgaggaaagcaggttcaaacacaggaaaatttccactgagatacgtttaaaaaccaagagcgtccacatttcacataaatgacaaatcagacgtagtttattactgtggaaacagtcttggcaagagacaaaagttaaattgccaaagtgtcgg

SEQ ID NO: 60524 - DNA, 1425 bp, Bovine  19866880942070
  misc_feature (1)..(1): n is a, c, g, or t
ntgtattctatctcatggtaggaagataaagagaggtagttttgaactcttagtattacttcctgaatacaatgacctggctgttttgacagacccatgtaggcaacaagagaaggtggtatgaaactgcactgtgactgggttggcacagagaaaaaaaccaaacctggctgacgtctctggtgaatgtgtgtcctaaagtgttaatcaactgatgtcacctcgctgtccagagattccaaccatcagggaaaatgaatatcaaggaaaatagcagaggacacaaaatctgcctcttttataatttcacatatttgacagatgactgatgatttcctagacctcccagttatcttagctctcatctttgaataatttagatgtttcacaaaacatgagattttctcttacaattgcaaaaacaacttttacatataaatatataatgaaaacttcattcagttacttaatattaaacataaatatgcaaattatttttcacttagtataattcataaccacttataagggatcatagagctaatgcagtaattaggcacattcttatcttttatggtcaatgtaaaccactatatttagtactaaacatctaatgtggctaagaaaaaaaaaaatcagtgtatagaagtatacattgctcagtttatacccaaaggttttaattatctactcaaacaataaagagaaaaattatcatttttttaacaaaattgacatggtttgtttaaattcaactagtctttgcctttacgtttcacatgatttcggctaaagaaaaacagaaggaagttgatgggccttgtgtctgtttaagtcaagttcaaagttaattcagttaaattatctcaaaacagtttatcttgacaatatagggaaaaggcaggtataaacaacacctgactttgaaaaactttagctctaaacttcaaaggcagtttcaaaagtgaaattaaatccccttttcaagatgggaacacattttgtttcagagtaatacatgactgctagttagcagtacaagctagctcagagaaagccatttaggtttgaagcatctcagtttccacatgctagtcagacaagcattgagagcttctgtgaataatttacattttattgccaactgcttcccatatattcataaatttcagttttcttgataattttctgctaaactacccattactaaaaacattcatagattaaaatttttctgttatgtaatactagttaaatctcatcatatttataaggaggtctagttaagacaactctgcttaagtcgtccagaggagggattgaatagaaacctgctactaatgcatttcttcccagtttactcttactgttgcaagtattagttagcaaaatctcttttgataatagttggctgtcatctagcaa

SEQ ID NO: 60525 - DNA, 1297 bp, Bovine  19866881029143
  misc_feature (1)..(1): n is a, c, g, or t
naaaaggctcatcagtgtaataaatgtggcagatgttttagtcaaagatcaattctttcaaaacatcaaagtctccacactgaaaagaagccttttgaatgtatatactgtgggaaaacctgccatagtgcagacctcactgaacataaacagttgcacaacagagagaagccttatgaatgtagtgaatgtgggaaaaccttcaggcagcgttcaaatcttagtgagcatcagcgaattcacagtaaagaaaaactttatgaatgtaaagtatgtggaaaagccttcactcagtatgcaggacttaaccaacaccagagaatccactctggagagaaacattttgaatgtcttgtatgtggttgagcttttagccgaagctcagaacttataatacatcacagaattcactcaggggaaaaaccttatgaatgtgctgagtgtggaaaaacctttagagtgaactcaaccctcatcatacatcagaggagtcacactggggaaaagccctataaatgtgatgaatgtggtgaagccttcagtcaacacttaggccttaacaaacacaagttaggaggaaagcacagaaaccgtcctaaactaagaaaatacacatgtgatgagtatgggaagaccttcacacagttaactggcctgagaaaccacaaaagaatccatactggggataagacttcccagtgtcctgagtgtggcaaggcctttacaaggggagagcatcttattgaacatcaggggattcaccttatcaatgtaaagagtgtggcaaagcctttagtcagaagacaggtcttagtcatcatatcaaaatccacacaggagagaaaccttttgaatgttctgaatgtgggcgagacttcagctgtaaatcaaatctcaataaacataagagagtccactctgaggaaaaatcctatacatataaatagtgtaggaaggcctattaggcagagagcattgctaatccaacatcagagaggccacatcctgctaagcctcagcagtggcgtgaatgaggtaaagcctagaagctcagctttgattagtcaccagagaatccactaaaatgactccttgccaagatgtctggtgacaacttcaagtagaattcagaatttttttcaattgagatgaaatgtttcttaaacttcattacttaaagaatgtcagagatactgtgttgaaaagttgtttaaaagtcataaatgctggaaaagttgagaatttgggaaaattaacattagcaagaaatttacctgttactacctttgttaaagtg

SEQ ID NO: 60526 - DNA, 2198 bp, Bovine  19866881338600
  misc_feature (1)..(1): n is a, c, g, or t
ncttttgattcccgtccctttactccaacctatgtctctctcaatctttactatctcagtgaatgacaaattcattttacctgatgtacgaaccaaaaaccttggaataatctttaactcactttctctcatatcctgcaacctatataaacacaaatcctctcaagctctatcctcaaaatgtatcagaatccaattacattttgccacttccaatgctattattctagtcaggcaccagcatctcttgcctggattactgcttatagctatagcctcctcaactggtttccctgcttctaactttgttccctatgttctccttccccacccccaggcccagtgtagaactttcgcaacatagaagctagagtgattatgttaaaattaaaaactttaaattggaattaaacgtcagactggggcttccctggtggtccaatggctaagactctgctctcaatgcagggggcacaggtttaacccctggtgaaggaactaagacctgcatgccacatggtgtggccaagaaaaaagagcagcaaccctctacacttttttcactggtgcattcccagtgcctagtaaacaacagatggccaataaatatctgctgaatgatgctgctactgctgctaagtcgcttcagccgtgtccaactctgtgcgacccatagatggcagcccaccaggctcccctgtccctgagattctccaggcaagaacaacggagtgggttgccatttccttctccaatgcatggaaagtgaaaagtgaaagtgaagtcactcagtcgtgcccgactcttagcaaccccatggactggagcctaccaggctcctccatccatgggattttccaggcaagagtaccaattcactttcccctacgatcttgaactcaggagtgtttccgttatactagtctttcaagcttgaaaatccctagtgcttagcctagaatagactgctgaatagagttctccattctttcttccttctttatacctccatctgtataattttcaattaatttcatgcaaagatgggctcgatgaaggacagaaatggtatggacctaacagaagcagaagatattaagaagaggtggcaagaatacacagaagaactgtacaaaaaagatcttcatgaccaagataatcacgatggtgtgatcattcatctagagccagacatcctggaatgcgaagtcaagtgggccttagaaagcatcattacgaacaaagctagtggaggtgatggaattccagtagagctatttaaaatcctgaaagatgatgctttgaaagtgctgcacccaatatgccagcaaatttggaaaactcagtagtggccacaggactggaaaaggtccgttttcattccaatcccaaagaaaggcaatgccaaagaatgcttaaactaccgtacaattgcactcatctcacatgctagtaaagtaatgctcaaaattctccaagcaaggcttcagcaatatgtgaactgtgaacttcccgatgttcaagctggttttagaaaaggcagaggaaccagagatcaaattgccaacatcctctggatcatggaaaaagcaagagagttccagaaaaaacatctatgtctgctttttgactatgccaaagcctttgactgtgtggatcacaataaattgtggaaaattcttaaagagatgggaataccagacacctgacctgcctcttaagaaacctgtatgcaggtcagaaagtaacagttagaattggacaaggaacaacagactggttccaaattggaaaaggagtacatcaaacctgtatattgtcaccctgcttatttaacttctatgcagagtacatcatgagaaatgctgggctggaagaagcacaagctggaatcaagattgccaggagaaatatcaatagcctcagatatgcagatgacaccacccttatggcagaaagggaagaagtaaagagcctcttgatgaaagtgaaagaggagagtgaaaatgttggctttaagctcaacattcagaaaactaagatcatggcatctggttccatcacttcatggcaaatggatgggtaaatagtgtcagactttatttttctgggctccaaaatcactgcagatggtgattgcagccatgaaattaaaagacacttactcctgggaaggacagttagaccaacctagatag

SEQ ID NO: 60527 - DNA, 1761 bp, Bovine  19866881415406
  misc_feature (1)..(1): n is a, c, g, or t
ngacgggggagcctggtgggctgccgtctggggtcgcacagagtcggacacgactgaagtgacttagcagcagcaacaatcacttagatcaagatgtagagtgcttatatcaccctaaaaaattccttcatgttcccaccttgttaaaatccccaaagaaaatcactgctctgctttccattatcttagcttagtcttttgactacctggaagttcatataattagaataatatggtatccatgcttttgtttttgacttcccatgcaacaggaagtttttgaggtccatccatattgttgcatggatcaatagattattcattttcattgatgaatagaactacatttggtgacttatcacattgtatctattttttcattgtagatttttgcattgtttttggttttgtgctctaatgaacaaaacctctgtgagacttctctcacatgaatcttttttatggacatttgttttcatttctctgaggaaaatacacaggagtgtaaatactcaatcatagaggatatgtgcttaattttattaaagaggtagccaaacactttcccagaataattaaatcactatatttcacgagcaacatatgagggtaccagttgctctccatctttattaatatttggtattttatgttttaatttagctattttaatgattataaagtggtatcttgtggttttaattttcatgaagatgaaaataacgagcaccttttcatgtgttttttgccttacatacatcttactttgtgaaaagtctggttttagcttttttccccttttcattcagttgtttgccttttcattatttgtacacattcttgatatattctggatacaaatctttatatatattgattcatggttttaatgattcatggtgttgcaaagagtcagacatgactgagtgaatgaactgattgttttattggatttcagttagatgaggacaactgaaaagaaggaaaaaagatgatttgaagtgttaaacataagatatattgaaaattaatttttacctaaatttacctgttatctaatcaagatcatatttggcctttatagtacatatttccaaattccattcatggaaatttttattgggttggtagaggtgtttaaataaattaaaaatttttactttaaaaattatttatttctattaactgaataaaagaagtaaccagaaaactggtcactgtcaccttactttgtagacacaagtctcctgagtgcaccctttacatccttatttctcagtgtatagatgacagggttcaacatgggagtcaccaagttgtagaagagggtaaggaatttcccttggtcctgagatgaattatttcctggttgcatatacatgtagataatattcccataaaacaaggaaactacagtgagatgggacccgcatgtgttgaaagccttcctccttcctgccgccgacttcatcctcagcactgcaagggcaatgcagctataagagatgaggatgaacgacaggggcaccagaacgatgatcactgataggatgaaaacagcgctctctacagccactgtatccacacaggcaacttttatcagagccggcatctcacacaggaagtgtttcaccctgcatctcccacatcgtggcagtttcatagtcactggagacataccagggagttggagaagtccaactccccaggccacagacaccaacttccaacagagctgagggtgcatgaggacagaatagt

SEQ ID NO: 60528 - DNA, 1068 bp, Bovine  19866881462730
  misc_feature (1)..(1): n is a, c, g, or t
nggatcattattccagttatgttgggaaagttgagatttgatggtgtgcatgatgttgttgggtaaatcctcagggctgctgagtagctcttagaggcaactgtaaagcaaagggaacacaacagtgatgggagctgagtcatgttagctttccactgcagtcggtccttaactgactgattctccactaagacgtaaccctagagattgctccattttgtgagtgataatgaaactcagttgaaactttttaataactgcatgcagcatggggaggccatgttaatcagctctcctgttcaaagagctgaatccctgtggacatagagaaaacaagatcatgcttatcagtagttcaattctgtcattataatgagatctctagggtcttgttttccttccaacttgtgtaaagagcagcagaaattgaaaatcactcttcctcttgctctagttttaaacagtactcattgacctcatcatgaccataagaatcccttcagattctctgtaatccagagggaaatacatgagtgaatgcagccatgtttgactattacaagaaaatagaaatggcctaagagaaactacttttctcaatagatccaaacatttcacattcttcagttttttcaatctataatttcatctcttctttctgatctcctttagaacataactgttaagacaaataagtcacttgttcagtgaaataattggcaggttatattttcttttcacctagaagacaagaagaaagtaaatgactcaaacaaaagcctgcatttcttcttggtttggatttatcaattttatgttcatataaacaactgcaaaatatttaatcatagaaagcaatgtactagtacatctaaccttttcccaaacttattcacactgttaccttgaaaaataccaagaaggaaatcaagctaatgtgttttcttttttaaaaaacctagccatctgtgtaaaaatattttttgtttacaagttccatttgagcatacagaatcaaagtgaagtttaatttacagggaaagaaagtttttagtgtaatagattttt

SEQ ID NO: 60529 - DNA, 1232 bp, Bovine  19866881477386
  misc_feature (1)..(1): n is a, c, g, or t
ntcatgtctctcttctacactgtcattatccccatgaccaaccccctcatatatacgctgaggaacagggatgtgaatggggcaattaagaaggtgctttggaaagactcttgactccagatgatggctgaggacaatttactggaaggacctggaatgctagtgctctttagatgtatttgtgtattccacacgagtcatctaaaattccctgtgagaattctgaagggaatttgtttacttcattactgttgaaaagtgagtgttcagattctaagttcatatactcatttcaacttccagagacgctgattcagtgttgtgacagcatctgctttgtagttactgttttaaaaatctccaataacttttcttgtttgtactcccatttgggttccacataactccacatctatttgcaaaaagattgtatgtgtctaaattacaagaagcccaaataagatcataaaaccactgaaacactatatggaatattattaattaatattttctaggagttactctaatataccattcattctcttatttggatcatggctctactaaaattccatggtttgatgtttttcactgatgtaggtggagcacttgtggggaaaataaagttgaatctcaaagaaaatcttgctgcattaaccccggtaaagccattcagacatcaggtgcaactgtaacctcagcagtgcagccgccatattgtgtaggatcatttcagagaaggccgcgcctaggactcactgagcgaagggtatgatgcactgctggcggtgacactggtagccctttgttggtaagaacaccaggtagttcttacatgcatttttgtacacagcaggagaaaaacaccaatgtgaggtacaaagttggttattttaattttgtgaaccacctagttcctttctaaaatgagatttttaaatgaggaattttcgagggcattatatctgagcagcatatgacccaagttctactgcatattctacacattttacctcctgtgatgaagcaaaagtttcaaagggtaaaatatgtttagatttttctcgtcatgccattttataaactctttgatttaggcatcaattggttaagaccttagaatgtctactctggcaaacgtcctgtgaaattcagatttagtgaagtataaaaatattgaaaattgccccgattcccaggaaatcccatgtttggggagatgtcctcagact

SEQ ID NO: 60530 - DNA, 988 bp, Bovine  19866881477387
  misc_feature (1)..(1): n is a, c, g, or t
nctcccttccatccctgttcctcagcgtatatatgagggggttggtcatgggaataatgacagtgtagaagagagacatgaacttttcctgatcctgggagtcgctgctgctgggctgaaaatacacagagatggctgtgccaaagaacagggagaccaccgtgaggtgggatccacacgtgccaaatgcttttctctgccctgcagtggactttattcttaacacggccctgacaatccgaccataggagaacatgattaatgaaacaggtgtgagaagagtgatgacactgccaaaaaaggtcatatacacattcatggtggtgtcaacacaggcaagtttgagaaaaggagggatctcgcaaaggaaatggtctaatttatttctcccacaaagtggtaaaaggaagatgagcactgtctgtaacaaggaattggcaaaaccaatgatccatgaagcagaagccatcaaggcacacagacgagggtgcatgattactgtatagtgaaggggcctgcaaacagctgcatagcggtcaattgccataactcctaggagaaatacattctgtacatcccaaacccagtgagatgaacatttgaactacacaaccaccaaaggagatggatttgtctgctccactgagattaaccaagaactggggaacaatgctggtggtgtagcacatgtccaaaaaactcaggttagagaggaaaaagtacatcggggtgtgaagacgtgggtccaagtaggacaatgcaatgatggttgtgtttcccagcaaagtgaagatgtagaaaatcaaaagaattaccaagaggacgagctcaagttgaggcctgtcagagaaacctagtaggataaacccagtgaaagaacttccatttttctgttccatcctttgctggcacaaggctcctgtcaaaccaggcatttagcaatttataaaaggtattttccaagaaagagcagtgttaagaggaaaat

SEQ ID NO: 60531 - DNA, 1421 bp, Bovine  19866881725139
  misc_feature (1)..(1): n is a, c, g, or t
nccttcagaaggtaggagaggcaggacgctactctagaccttcagagagcaggccctgctggttggtcctactggtgtgcagtgtggtagtcagcacccttcacaaccagtccctttatctttaccacagtgaagactaagaggccatttgttgtccttgtagacatcagtgaagactgaggaagcagcgccgctccttgtctcagaggaatggccagttccgagtctggctcaggaggaggctacagacgtcagtctcatgggtgaggacaggcctctgactggtgtccacctttcccgtcattaaccctgactcagccatcatgaacccacatttcctacacacacttctttccccttcttctgggctcgatctccacacttctctcagcctgtcattttgtatccctcacaatcacagtaccttctattactagacactcagcctactgattcttgctgttctctgatcatccctctgtattgcctgattccctcaatgtctcctcctttgctcctttttttccccctttgcaagggtcccatataatttgtcattttcacacatcccttaatatctggaaattccacaaacacctctgccttattccttcttcacatcagaggaagttctctttactctgagaacactaaaagttatgtgtaattttctttaaatagtctttgtcccattaggccttctcccctggaaactgacctttcttactatcttcccacactccaccacgtttttaggattgctatgagtatgttcctgggacacctgttgatttttggttttaatttgaaacatcctattccctaccctggagatattttctagattcaggtggcaatgacatttgaattatcaatgtgttattttagctgaagaagttgtaactaaagatggattttttaatgcaaagcaagaaacttctgaagaaatggaacgaggtgctgaggcctcaggaatagtgaacaggtgagtgtccacgtagaatagctcctacaaaagtaaaaaattggaatgaaaccagagaaaccagttggtaaacgtctgcttccctggaataatacagaaaaagtaacactcacttctatgatcagaggaggccccacgtcaagacactgacctgtcggtatatcataattacacaaaaccttcagttggcacaccggttgccttcaagaatcctctcagttccttgcctgatcactgttcccctggctcccttatgtttttgtggagctatagatactgaagccagaaaaagaagatagagaaggcagaggattgagataggagagtgagggctgcagatgaggctgttgtcatgatggttaaagaaatatcagatctggaaaaggacttaagacaggaagataggtagggtattttcagcctccattaggggagt

SEQ ID NO: 60532 - DNA, 983 bp, Bovine  19866881803796
  misc_feature (1)..(1): n is a, c, g, or t
ntgctgatgttaggtaagatgtgagctaaggataaaggttttgatacgttctttacatttataaggcctctctccagtatgaattcgctgatgataggttagatctgaaattttgaataaaggctttgttacagtctttacatttataaggtctctctccagtatgaattccctgatgttgggtaagttgtgagcgattgataaatgttttgttacattctttacatttataaggcctctctccagtatgaattcgctgatgataggttagacttgagcgttgattaaaggctttgttacactctttacatttataaggtctctctcccgtatgaattcgctgatgtttagtaagatttgcgcgctgaataaaggctttgttacactctttacatttataaggtctctctccagtatgaattttctgatgtttagtaagatgtgagcgctgaataaaggctttgttacactctttacatttataaggtctctccctagaatgaactcgctgatgtttagtaagaagtgagcgactatgaaaggctttgttacattctttacatttataaggcttctctccagtatgaattcgctgatgataggttagatgtgaggaagagacaaaggctacactacattctgtacatttataaggtctctctccagtatgaattcgctgatgttcagtaagacttgaactgtaaggaaaggctttgccacattctgtacatttataaggtttctctccagtgtgaattcgctgatgttgagtaagatgtgagcgacggttaaacgctttgctacaatctgtacatttgaaaggtttccttcctgtatggattttcctatgtttacttagattggatgctttactaaagacatttccacatatattacacttattttctttctgtggattctgaaccgtctgctgttgaataagttctgaagactgattagaaaccttaccatattcacgacaa

SEQ ID NO: 60533 - DNA, 845 bp, Bovine  19866880282342
  misc_feature (1)..(1): n is a, c, g, or t
ntaaaatgagattaattccttacaattttgaataagaaaatgacaagagaatgccctgtagtctttagaactgaacagttatacacccaaaaatctcctatatatctcagaaattgttggttttgtggaaaggacttgaatctctccttcaaaggtcatttagcaggtatttattgaggctgtgtgggatatgagcctagtgttcagttcagttcagttcagtcgctcagtcaagtccgactcttttcgaccccatgaatcgcagcatgccgggcctccctgtccatcaccaactcccagagttcactcaaactcatgtccatcgagtcggtgatgccatccagccatctcatcctctgttgtccccttctcctcctgcccccaatccctcccagcatcagagtcttttccaatgagtcaactctttgcatgaggtggccaaagtactggagtttcagctttagcatcatttcttccaaagaaatcccagggctgacctccttcagaatggactggttggctctccttgcagtccaagcgactctcaagagtcttctccaacaccacagttcaaaagcatcaattcttcggtgctcagccttcttcacagtgtggggtgctgcaaaacttagttagtccttaggttcacatggggagctttgtagaaatgttcactttagacttactgaattaggatttttatgagtggagcccggagaaggcagtggcacctgactccagtactcttgcctgggaaatcccgtgcacggaggagcctggtaggctacagtccatggggtcgggaagagtcagacacgactgagcgacttcacttttacttttca

SEQ ID NO: 60534 - DNA, 3308 bp, Bovine  19866880593954
  misc_feature (1)..(1): n is a, c, g, or t
nctctactaagtaatgcccaaaagaagaagcaaaaagggactctacttgccctttgggtcctgtaacaatccctcttctgtggccccttcgtctaggctgagtggacttatttacaagggtctagttaatcatgtccatctgtaatgtaaatgtgcttctcattatgctaatgcaagcactagacatgcaaatccataagcatttgcatgcctaatgcaacagttcttgtccatcctgttctgttgctatttactatctagtttttatgacttatggatttccaaccctttaaatttatatcagcaccgtgacatatctgcaagcagcgacagttttacgagcactaaaaaagctgcaacacaccgccactaaatactaatgacataaatggtagctgtaatggcctctatttttattacaataccaaacctcaatatattgcaattacctctacactcaagccagacccagccacactgtacaggagccagcccagggagagagatgtgaccccagtagagttcccgggtcaagcctgtctgtggcgctgaggaggtacagtggcaggaaatgtcctctgagggtttactggggatcagagatcctcatcaggaagagatgcgcctggattctgaggtgggtctcacaaacctcagggattgcttggagatggttcacaggttttagccctgccacttcctgccttccccatgaaaaagaaaagaacagaggaaaagctatcagtactaccaggtcccagtctcaactgagccaacaacttgctgtgtgaccctgagcaatccctgccctctctgggcctcagttccccattgggaggggaggaactaaatatctctaaggatgtttccaactccaacattctgggactgactctgtggaaaattcaagcccaagacatagacattaattttctccagaatgaaaatacatccatcaggacatttttatgcccgattttataagttctgattttacaccttaaaataataacaccttgaatttattttatggcattttccatctgaaacacttttctgtctgttacggcattcattctgtgtcctgggagagtgagccagacaactattctttccattgtgcaggtagagaaactgaggtgtggaaagaagacagttatataatatacccgtgccaacatatctaaaatccatatctgtggatggccttttacaaagccatttctccacgcttccagtggcatccctgacaaaatttgtaagaatgacaccttagtacagtgagaaggaagacagaaaggatccttgaaccagcccgtcagcaatgccttcaactctaccagtgggttgtttgtttttttttttggctcctgcgctgtgttcctaggagaggtagttcaccagttatccatcactaccctctcagtgtggactagtatacaggatcacttttcctggggatagatagtcaagggcaagcttgggggacagctgtagggtatatcagttagtaagttacattggttctgtccatgggggcactttttgggagtaggaggcctgaatggaaggtagtgtatggccagaaaatagcaggagtggaacaggccagagagagaaggtcagtgaggacaaaccacccagtcgaaggccagttgtccttttgtttgtgctccaggtcatgatctatcctcagggtgagaggagggccccactggctcagcagagtagctggtacagagaaggtgctcagccaatgttcactgagtggaagaacttctcctgatcaccactcaactaagacaattaattaaaatctatctgaaatgaaaagaaattgccaggactggctgaaaagtggtgttatagactgagttatgtcctgcaaaattcatgtcgaagctctaactcccaaaatgactatgtttggcactagggcctttaatgacatggttaaggtaaaatgagggctcccctggttgctcagactgtaaagaattcacctgcaatgcaggagacccagattcaatctctgggttgggaagatcccctgcagaagggaatggctacccactctagtattcttgcctggagaattccatggacagaggagcctggtgagctgcagtccattgggtcacaaagaaccagacatgactgagtgactaacgctttggtcacttcagtctttccttaaggagcctgcctgaaaaaaggggagcctcaggttaaaatatctcagatttactatctgttcacaccactctttcatcccaccctttcacacttataatctcatatacttctctaatcttatattcttacttctactctctaatcttttattcttttctctatgaaaaaaaaaaaaaaaaaaccttttgagaatgacctcagcaaaatggccaaataagacatccctgacatgaattcctccttcagcaacactaatttggcatcgacccaagagatttcatgggatctgtggcttccagatacacatgtgtataatgcagacaaatttctttgccgttattgttcagtcactaagtactgttcaactctgtgacaccatgggctgctctgtccttcactttgtctcgtactttgctcaaattcatgtccactgaatcagtggtgccatctaaccatttatctttattttctgcttccccctgttctctttcccttgaatctttcccagcaccaggatcttttccagtgagctggctcttcacatcaggtagacaaagtattggagcttcagcctcagcatcagtttttccaatcagtatttagggttgatgtcctttaagattgactagttttatcttcaattcaaaagtgtcaattcataagtgctcagttctttatggttcaattctcatgcccatgcatgaccactggaaaaaacatagcttttgactgtagtatatatagagagtcaaatttctactacgtatttttttcatgggtacagtctgaaatgtaaaaaaatagcaatgatagaaaaaatgaaggatgtttaaaactgaattaatttgaacatcagagcagcacatatgaaaaacattatgaatgcataacatatctagtatagaggtaggtgtattatgacccacagtcaaaatctgttttacttgcatgttttgccaaataagtaattttgcttcacacctgttattattcatctacagctacttttgtgttataagagtagatttgagtagttacaacagagatagtatatcccagaaagcctgaaattatttattggctgaaactttatagaaaacaattgctgacct

SEQ ID NO: 60535 - DNA, 1814 bp, Bovine  19866880615887
  misc_feature (1)..(1): n is a, c, g, or t
ncgctagttgatcttgccgcccaggcacggccctgagaaggctcatggtgcctcctctgcctgcttcctattgtgacagaactcccctggctacaccgtgcagtacagagcacactttctatgcatcatctcagtcggggctttctaccagtgggaaggcaggctgggccaggagaagtgtctggtctaaggccacacagcagcgaggagggacagatgtaagattcagagctgggtggtctgactctgaagtcggtggaggaacttgggatccaaagtgaccttctagaatgagcatggtggaaaaatgaccagaaagagggctgcccaggtctcggcctgtgagggagaagccctgaaggaaggaaagtgggaggaggagagaggttggagcctgctcctgccttgatcacctgcaaagatttgcacaggacgatggggctagaagagattcctggggtcaggaggtgacctggcaggccccaaggggcccctgttggactatgctatagagcaaagctgtgtcagatgatgattttgaccaatcctctcttaaccgggggcctggaaaactctgtttatcattagtggcaaaactgcttttagcagcatgacaaaggcagacaaatagagacatacagaggcccacgcagacatgcatggcccagacacagtcacccacacacacacacaccaggcacataaacccagctgtctgcttggacacacacacgcatacatggagacaggccccccgtgcatgagcacacacgtgcacgcaccacacacacccacacggcagcatatggagcaaccctgccttcccccatagtttccaggaggctcagcggggggtgcgagttccacatctgactttccttgtgttcgttagactctcggtgtaattaaacgttacattgaataatccagcacgggctcagggatggcagaggcggctgtggtgggcccggcgatgggggcctggagggctgtctcagcgtcgcccttctcctccatgcttctcctggcctaggaccctggagcggaggaccccttggccgcagggccacgtggccaggccttgaacaaggatgagagtgggatggtggtcctgggagacccttgggtgtccttagcttaggagtcccttgtcttcctctctagtgaggtggaatcccctcctggctctcaggggcagaggaagggtacccagacattggggaggccctctgtccagcagaacggccaacttgcccacttctcctggggagaggaagcaagaaggcctcccatttcctccctctctttccttttaaatgggccactgatgctcccagcctgcaaggcaggagccctgtgtggtggctcataccacctgcatgagtattacttgctatctgtgtgacttggtgtgacattcttcccatctgtgagctcggtgtcctcgtgggtaaaataggggtcatgggaggactcacctcatgggtttcttgggggatgaacctggctcctaaagcagtgttcctcagatttgctaacaatcatacctggcccagcagttaagccacaatctgtgcgtgtggctctttcccacaaagctgatttgggtcacacctgctcatctgctgaaggtgagattttggatccagtgtggatgacatcatgattccatcttggtccccactctgagcctcgactgcctcatctgtggaatggggttgacagctagtggtacccagcatggtggcaaggatggagcgggcttctgcaatgccaagaaccagacaaactgctggctgctgtgtccaggggca

SEQ ID NO: 60536 - DNA, 1216 bp, Bovine  19866880735711
  misc_feature (1)..(1): n is a, c, g, or t
ntgcctggagaatcccatagtcaaaagagtctggcgggctaaagcccatggggtcgcaaagagttggacgcaactgagtgattaggcacacaagcagaccatggaagtggagttggtttcatctaaagaaaatcaaagatttcccaaatccccctcctctctctgactcagtgtccagctgggtgttcagcccaacaaagagttttctggaatactcagcttgccagcagcaatctgcttcctcaggtgaggctctaagagcccttcattccatcatcagaaattgcctgctttcagggaaatttacacagagggaagagggaattaaaaggagatacaactgggcatcgtgtcctcctcatttaaaagggagccgtgtgctcttcccagatcctgtattggaagactttcctttgtattctgagaggctcaaaaataaactccccaaagtgtacttccactgagaagttcagatgattttataatgactccaaatatggaattaaaatgcagctgatgaggagcctacaattttactaactcatcttgatcaaagttggtcaatttaagtctcagcaatgttccaaatgctcactcactctctctttttgaaggagttcatttcaggtagacagattatttacttattctgaagatgccaagggaaagggtgtgttagcaatatcaattgagctgtgggtgcaggcttgcagctcagccttcatgtggcatctgagtgtctgttgtttttccttcttttccctctgggttctctgtgcttctaagtgggactttgccttacaggtctacctaaattacctccagcatcagtatgagtgacagtggtgtgttctgaggctgtgaagtttgtagttgtttttcttggttgcctaaatgtgtccctatctcttgtcataagaagttgggatccaggctgaggacagaagcacgcctgttcccccaggagggagaccatagcacctccagatgtgacctctataggggcagtgggggtcttcatgtctgaatttccaccttacatctgtcaccagagtcctgtcttctagcctcagcctgcagagaaagccacctggtgactagctttcaaagctgtcacatggatcttctttgggcccctcataattaattcttccctcggtagccagagtgagcttctcaaagcataaaccaaaaaccacactgtggaaaccacctt

SEQ ID NO: 60537 - DNA, 906 bp, Bovine  19866880936017
  misc_feature (1)..(1): n is a, c, g, or t
ncctttgcacataccgctccctccaatggggcacacagcccctcactccgactcccgtctgttccctgaggcctcctgtggcttccccatcccccactttgaagcaggggcctctcccactcacccttagcccgccttgacctagtctttccctgtcgttagctctgatggcttctcccctgcatcttcccagcacccaaggtgcctcacagagatgcggggcgctgctttgctccccttgtatccccgacctctaggtaaaacctcctcacctggcttgacgcctggcctgggctgccaggtaaccagggagactccgagtaaaggcccgacgtctgggtgaaccatcccggcttctccccagcgcacaatagcacctaataattaactctccaattaggcccgtaataaaggcttaatctggggctcgctggtaatgaggctgttcacagccggcctttcatcctgggcccaggccggggcccaggctggggctccacggcccccaccctggctgcgcgtcagagccacccccttgttaagcagggcctcggccctctccctaccctgaacccggagcccggagcccagggctgtgcacctcacaggaaagcctctgtctgtctgcggggccaggaccagctgctgggaacgtgtgcccggtgggcagaaggccctcctcgttatggagacggggacacaccaattggcacagcccatgaaagacttcaggtctgcgaatgttaagacttaattgccttatggacgctgaaagaatggagcggcttctccaggggagcggtcctcgcctggcttctttccccctccctgctggatcatgacagggcctgggacagactagaggaagggagacaagctcccctgttgcaggctagtgacagggtt

SEQ ID NO: 60538 - DNA, 1001 bp, Bovine  19866881059212
  misc_feature (1)..(1): n is a, c, g, or t
nggcagcctagtgacctagccggctgaaatgacacgcctgagtagcaaatgagaggagaaatctcggagtcccactcctttggtggacttttactggatggcaagagggcccaacgcttccagcgcggatgatgtgcagcactaaggagggtaaccctttccaccagcgtctgcctgccagcgtgcggacagaggttccttctgccaagatgaggaattcagcctcccccttttctgccatccagtagcctccgtgtggacatgccacattggtttattgtggcgtcagcatccttgtcgaagggggatgttggtgggtacctgggtaaataagtataaatagttttctttctgatatgtgaccggattattttccagttgatttcaagccttggccccaagtggcccacagatcaaaaaaagataagggtcagttacaaggttgagctcattctcggtcgccatggcaactgacctcaggcaaccctcagaggactacacccagctccccaggtgatatttttactgtccacgccatcaatcccaagcctttcaaaactcagactgcctaattgtctgggctctgttttgaagaggctctgggtcccccgtggggccccaattcaggctgccagagctcatttataagcctttctgaaacacgggggactgtgggatgggtccctcctggccagagaggcctgggaaggtgctcctgaggggaggaggaagggcacagcccatcctccaggattaattaaggaaatgggggcccaaaatgggggcagtggtggtggggcatgccttcatgccttcaagccctggctgcatgttctggagtgatgggaggtgctgggcagccccgagcaccctggcactggggaatctgcagccatgggggtgctgaggtagcctggggtctgtcagccacccacccaccccagagtcttccctccaaattcaccctcatcattttcatcccactcatgataacaggaaag

SEQ ID NO: 60539 - DNA, 1665 bp, Bovine  19866881165968
  misc_feature (1)..(1): n is a, c, g, or t
nacagccactgtttcatcttcccgtctcccctttctgtgccatttaaactttaacctggtagtaactttgctgccttgattcccgattcaaaggctggcagatgaaaagccctccccttggatgtggcttgaaaacttcattcccagtctctctctgtctttgaactgccttggagcctttttgcccaagccgttttattctccctgggcctcgagctttcaggcctgggggctcgggaaaggcagcaataggggcttctcagttggggcccaagaggaccccaagtgcctagaatggacaactcctgtgcccgcctgcacacacccacctccccctacccctgagagccaggagtctggctcaggagaccttctctggcctttccgggcccagtccctgccttcacccagccctcccccatctcagcttcccttcacaagccccagacccacagcacttcaaggcttctagccccaggtgggtcctccagaaactttttccttttcaatgccaggcaggccacttgctgtttcagatatcgggcaaggcacaatgacagaattctgccatcacagaaaaattcaggtaatcaagaccaaattcgacagtgggaaaatgaaccagagagagtgttagaagtcaaccccaaagcagacctaacttctcctcctccaagcaggctctacacatccaggtggtggccacatcactcgtctcagatggatttccttttgttcgatgctcggcggtcttgtttgtctacgaggacattttccccaccacccctgtatctgctggcagaactaaagaacagtagagtgggttgaatcttggccgtcaaatcagtatgtccacatccctccactcctggaatctgtcaactgacctcatttggtgaaaggctctttgcagacataataaagttaaggatcttgaaatgaggagagcatcctggattagtcaggtgcacctaaatacctttttgagaaacacacagaggagaggaggagcccatgtgatctcagaggcagagagtggagcagcatggccacatgtcaagaaacatccagggccaccagaagtgggaagagataaggaaggaattgtcccctggagccttcggaggaagcacagccctgctgacactttgattctggacttctggccccaaaactgtgcaagaataaattcctgttgttttaaatcactaagcttcccaagtggcttagtggtaaagaatccacctgccagtgcaaggagacactagagatgcatgttcactccctgagttgggaagatcccctggaggaggaaatggcaacccactccagtattcttacctggagaatccaatggacagaggagcctggcaggcctgcagtccacggggtcacaaagaatgagttggatgcaactgagcacacatgcaaaaaaaaaaaaaaaaaaggcttatagtaatttgttacagcagcttcaggaaactgatataagtatgcaaagatgtggaaggaaattttcataggctttcaccagggtttggtgctatgggggaaatgtgccgggggactccctcttcttcctcagggtgtgatcatctttacctgcaactccacacagccagcctgagggtgaggcaggacagaggggaaagggcctgcacaagg

SEQ ID NO: 60540 - DNA, 1050 bp, Bovine  19866881205214
  misc_feature (1)..(1): n is a, c, g, or t
nctcagcctcctgtgacagcacccggcaaagctgcatgagtgtgaagatgcatcacaggaagcgtgagagcttgtgaggttcctctccccaaacctggcccccattcttcctctctccctaagcctggcctgagctgactgctcattgcgagaaaatttgcaggctcttggcctcaagctgcagccttgcaaacatggctacataggactggctccgcagaacagtccccggggtgcttccgctggggcccacccacgagcaggttcttctgcatcccctgttactgctatttgtgctacctgcttggcccaactactaaaatagtttctgggtcccctgacacaaggctttttatagttcagcaccgcaggcctcatttaaatctattagctcatataaatggcaattcatttaaactttggaggatttctgtttgccttggtggcgaagacaatttgtctgtggctctgccatgggcaaatgaccctgggcaaatcatttaacctctaggagtctcagtttccacatcagtcaatggggagaaggaccccagtgaagacagtccacgcaagacgcttagaagagggcctggcccacactaggcatccacccagggggcgactgttataactacttcctggccagttctgcaaggagcctgtccacctgtcagaggcctgctgtgtatggctgggaatcggtgatcccccttacagacccccttggtgataacgaagactgagatgcagtgaggctctcaggatggcgagaaggaggtgccgtctctgccagtgtctgtgagcagagaggtgtctgcggggatcagagacagctgggctgggcgggcggagtgcacctctcccctcaggtcagctcacccctggcaaagggcccacagggccccagaccttcatctgctgaggcctgaggctggaaacgcaaggccaacagccttgacatttttggggtgtgtggtttacaggcttatctcacgtccccaaccaaatctgcacgcctccctccactgagccccagcacagctgaggaaa

SEQ ID NO: 60541 - DNA, 1600 bp, Bovine  19866881216474
  misc_feature (1)..(1): n is a, c, g, or t
ngtgcatggtgctaatgaattgtgagggtcctggagccctctgatttcctgtccacgtgagatttccttttttttttttaatagtccatctaaagtaccaaaactgacacagagatatgggccgtatctatcagtactccctcattgtcctgtccctaagtgctatcacagtgcctggagcacaggaaagactccataaacagacacagggaatgggtggcatgtgcagagtcagacttcttggagcagacaaggcttcccatgcaagtgccaagtatgaagtgctcctgggggtcccctgtaggggaagcagaagtaggcaagaaagtggggaggggaagaacaggagcaggatcaaagccgggggcagtttccagctgatacctcaggaacttgacccagggagctgggctttcctacgcccactcctcagtctctgcctggggaccactccagggggacagaaaactcagtgccttcagctctcaactctcacagttaaagtggttccagaagcacaagagtggcacctgctgaccactggaggcaagcgtacagcgaagctagccgaagggtatgcagaagtgatgaaagggattgaagagggtctggatatggtccagcaatgggggccacagggtagataaatgaacaggcctagagcatgtccacgactgagcctcaaacagcaaaactgaggcagctttctggtctacaaatgctcccaccatatccctcctctagccagaggggtcttttcctgctgcccacacaaggatggctaacagaagcccccaactcttattaagattctctttgcaaaacatcaaaagccagatcataatttgatgatgaaatattgattatgcatctgtatttgtatgcagaggtctacagtgtgtagatagaacacccacactgtaatatcttctatttaagtcaatatgaagatggatgttccccccaggctggttttgataaaatacttgtgtcgatacaaagagacattaatgccaatgcaaatcaatacccacttattggtttgggtcgcttcttcttcacgcagcagccgcccccaagaggggctccaaacaccagcagctcccagccctgtttgcatatttcttcatttacaccatgtgagtgggaaatgtcaggggaatgtggaatggcagggggctgcccacgcctgctcctgaattgaatcgggaaggaaatgaaaataaaagcaaacacaacctgtaaacaaatctgggagatgctttattactgtcattagcaatgtgcttatcctgtctccctttcaaaaagagtaatatcaaaacagcagaggagccaagaatcatctcatccttgccaggttctcagcatacaaaaggaactaggtctcatcttaactgtggacacttgctgtgtctgcccgcccagcacttgttgtcacctgaaactccatgtatttagtactttctaaaaatctcacttattctctgccttcgccaaccataaagtgaggttcccaaagggctgagtttttaatttgctttatttccaatgtgtagatgtgaatgatttctttcgcttcattcattcacccaacaaa

SEQ ID NO: 60542 - DNA, 1386 bp, Bovine  19866881229857
  misc_feature (1)..(1): n is a, c, g, or t
ncagagaaggaagggatttctgggcacttggaatagtgcaactatccaaaggcaagactatgcctggctgatttaaggaacatgaaaagggggtggcagaaatggattgagcaatatttggacagctggactagatggaggatgttaaggcttctaggggccaccttgcccctaacagctgccacatggggagaccccatgaaaagaatcatacagagtcccctggatccagccatgcctgaagcaacccctactcaacatcttttctgtgcctgaaccaatatattccttttaaaagtcacttgtaactgaaagagtcctgataaaacattctgaaaccaagtgcctaggacgcttgagttgctgtgccaacagtgggtctcaaagataccggtgggctggctcaggggcagtgggaaatcccacctaggggagtgaggcctgggagccgtctgtgcaggggaggcctggactcctgacaagtgagaaggaatctttcaaatttgcaattttcaagtgtcagaaggatgcggtgccgctcctctgacactctgcacgttaggcagattctccccatttccatcaacacgtctagtgtgcgagatgcagcctttgcacccccatgacccggaacccacaactgagaatgagaacgccaggtgttggtttgtccagcaaggtacattcaaaggaccagacaggcccttcttcctcaattaccaaagtggacgcagtactttcaaaggattctattcagttcagcaggcgctttgaacagcttcaagatgctggggagtcagagaaacacacagcttggtctgtccccttagaaggtaatctagtgggtgaggggccctttaatttacttcattcacatgtagtggcttattcgctaagttgtgtctgactctttgcaatcccatgggctgtaacctgccaggctcctctgtccatagggttttccaggcaaaaatactgaagtgggttgtcatttccttctccaggggatcttcccaatccagggatcgaacacaggtctcttgcactgcaggcagattctttaccaactgagctaccagggatattccatgctaaaggcaaaacagggggtgctggggtagaaactccccaaacaggggaaggacagacatctgcagatgatactggtgtgtgatcaccctaccattattcattcatcagaagtgaagtgcttcctgtgaacccagcactcttgggcattaagaatacagcaaaacaagatgagcaagatccccgcccaagtggaggatgaagacaacaaagtgaaactaactttttaaagaaaggctttctgaaactggtaagtgcagcaagaagaatgtaccaggaaaatatattccaatagag

SEQ ID NO: 60543 - DNA, 1189 bp, Bovine  19866881256765
  misc_feature (1)..(1): n is a, c, g, or t
naaaaagtctgcacagaggtcactctgtgaagcaactcagtggctgtcattactgaaatttattttgctctgtcaggtcttaattttagcatgctcaagggctcagtagttacaggacaggggcttagttgctcagaggcctgagggatcttagttccccattcagctattgaacccatgttccctgaattgcaaggcagagtcttaatcactggaccaccagggaagtcccagtagctgttcctgcaatgtttaaataaacatggacattcaaattgtggtaattgctcagttgtgtctgactctttgtgatcctgtggactgtatcccaccaggcttctctgtccatggaattctccatgcaagaatattagagtgggtagccattcccttctcccaggggatcttctcaacccaggggtcaaacatgtgtctcctgtatggcaggcagatttttatcgtctgaccccattatatggttatcatgtatttgatttactttcccgatggagcattgaataatacatagcagaagcagcgagaatctacaaacccaatgttggagaaaggaagccaggggcatctttcaacagtgggttcccagcctctcctaggataaggccccaggatgcctaccaggctccaagggactcaaggactccagatgtcctgcagcacatttggcctcaatgtttccccatctccaagaaactcatgagctgctttaaatgagtttccaaatgtgtgtttaggctggatttacgtctgggtggctgcatattaaatgctgattattaaaaacatttgcatggcgctttaacaacgatagattatgtatctgttacctaagtctcagtgaaggctttattaattcattattattttatcaacatacaataaactgttctattaaatctaaattagacagatatttggggagggatcatctagaaggacctcagccgagactatccccagggaaggacttaatgaagtttcaaacagttaataaccctcagttcataaataaaccatgggtatttaaagacctgcaaaatactaaaataagatgttgagactcaacagaggaaggataagagagtacccttggaatcaccctccttgctactcacaggtaaaagctctattttaggcaatatttcttgaattcctgggaatatgtaacatt

SEQ ID NO: 60544 - DNA, 1597 bp, Bovine  19866881656540
  misc_feature (1)..(1): n is a, c, g, or t
naagtgtttgaatactgtgctgtgaagggaacagtcctgcagcgaggcagttgtgatattagagcaggcgtcctaagagatcccctggctctgagctgtgatccacacaccacattcgcagacagctggtcgcccagcgtgggctgcgcctgccgctccgagctggcacactggcggggaccaggtaatgctctaatttccctcgtgcagatgcggccaggaatatcttaatttattggtgtgctggcatgcaagagggaatgctgccggtgcagccttgcataactattagcaaaaaatggagctgaataggggcttgacttttcctaaagtgggtttgaaataatcatcgccttttgttgtgtttggaagggcttgaacaattcttaattatttaattatagatatgcaagtaatacactgggaatggccctgccattccagggatactgagcggaggaaaatgtttagttaccggagggggaaaaaaaaaggtggtaattaaatggaagtgtggtttgtatcatgccacgctactccattggtgacgtgggcctcaccgtggaaatcctgacgtaataattgtgacagaggcagcaatcgccaccttcctccgggcgaggcctgcggagtcagcaacgctgtttcttctcgatttgctcgtgttgtgccaggttagggttctgagagacgggtgctcttcttcccattttacagatgaggaaatggagtctcaggtttgcccaaggtcttccttcattctgcatttgaaaccacagcttatgtggcggccggccttcctgccctgtcaccggctaagcctgggggttcacagtggccatgcgatgacttttctctctccgagtgccctagaccagcctctacaacttgggtgattgtttgcctgaattgtgtgtctgactctatggcagcttctcttgacggacaccttgtaattatcccatataagcactcactgtattcatatcattaattttgtttgggctattacatttgatagatacattaagcattatatagttctctttatacatgaaattgaactgcctttgaacagtcagccagctaattgccggtaatttgtgttgctaacgagagcagaatagtggtataacattagactcaacagtcagttaacaaatttgccgattcagattgcgaagcatgccctccgtggcagaggcaggctgcatctcacacgtgaatagacttttaaaaatgcctacgactgaaaaccaaccacggcgaagtcgccccccgccccccacccccgactgtgcaacactgcctggctgctcaggagcgatggggtgaccgtgggtgcctgggtctgaaggatgggggatttcaggggaacctgggtggggatgggaggggcggttttgactgctccttcagggggcttcccaggtggctcagtggtaaagaatacacccgccaacgtgggagatgcaggttcaatcttgagtcaggaagatcccctggagaagggaatggcaacccactgcagtattcttgcctgggaaatcccatgtagtctggcgggcacagtccatagggtcacaaaaagtcgaca

SEQ ID NO: 60545 - DNA, 831 bp, Bovine  19866880819006
  misc_feature (1)..(1): n is a, c, g, or t
nttaaaatattttttatctgtgttcaaactggataatttatattgatctctcttcaagtttactgacactttcctctatcttctttattatgcaatagagtccattcagtgagttttaaaattttggttattgcatttcttcggctctaaaatttacatttgtttcttttttatattttctttttacttgctgaaacctctctctgtccattcatttcaagagtgtttttaatactttctttaaaaaaaaaacatatattttttaattgaaagataattgctttatagaattttgttttctgtcaaacctcaacatgaatcagccataggtatacatatgtccccttcctcttgaaactccccttctcatctccctcctcatcccacccctctaggttgatacagagcccctgtttgagttccctgagactaatacttttttttcccaacatcattgtgaggtaattctaacgtgtgtcatcttggcattgaagtctgtaaattttgttctcctatttattggggttctagaggttcattgtaatgctgaataactttgtattgaattctggacattcttaatattgtgttataagactctgggtcttatttacattttgtgtaaaatattggtattttaacttatcaatccagagagttcaggttgcaagttctgaccaactcttctggtgttttgtggtttcaatgtcaatttcattttcaaagcctttgcattgctatcttggtctgttcccatgtgtttgcaaccaagtggccagtctgagatctaggtggtggtctataatttagctcggttctcaaatctttgtt

SEQ ID NO: 60546 - DNA, 1147 bp, Bovine  19866881175028
  misc_feature (1)..(1): n is a, c, g, or t
nccttctttttttttttttttctttttttcccaaagccttataatatttttgttttgttttgggcttctgtaggcaatggcaccccactccagtactcttgtctggaaaatcccatggatggaggagcctggtaggctgtagtccatggggttgctaagagtcggacacgactgagcgacttccctttcacttttcactttcatgcattggagaaggaaatggcaacccactccagtactcttgcccggagaatcccagggacgggggagcctggtgggtttccgtctatggggtcgcacagagtcggacacgactgaagcgacttagcttagcttagcttatgctgattttaaacattattgcatttagtgcccctttgtatccaggagattttttgttttacattattgtgcatttcatttattctcacgccctatttaggacattgttgtttcagccataggactgacccagatgttcagaaacggcatccagagagagatacctccaggcactgttggcacataatcgagttatggttatgctttgtacacttatccttgggcatgttctcaggatttatttagagtaagtatatattctttccagtgattttgcttttatttccttagttttggaaatgtgattatgcatttactaatattacaggaatgattttctcacacagccgtgaatattttatctacctaaattgtcaatgaaagtacttttcaactgttaatgatttacaaaaagccttttttattgtgtgtaattagaggaaattaaaacaactctcttaatatgcaataagagttaatttaattagttgcccatttggaaataggttattgattcacttttcctgtacacagaaaaattaaataaaataacatagtgtatcttcttttacaaaggagaaaactacattactctaggcatatattttgtcccacattttgtgttttacaagtaactaaatgaatttactctttaaaaagtgagcattaaataaatacagtgacaggcgagtactttgtatctttctcactgttgaataataaaaaataaatctttttaattgctttttttttagttacatttatgctcctgaaaaaaaattgtgctaatatatcctttcaattt

SEQ ID NO: 60547 - DNA, 3856 bp, Bovine  19866881316807
  misc_feature (1)..(1): n is a, c, g, or t
nctgatagagatatttgttttaaatatttacattcatgcactctttctcaggaagctagtagaaggtgggctctaccaaagtgagaatgtaaactaggaaatagggagatgtccgactctttgtgaacccgtggactatacagtccatggaattctccaggccagaatactgtagtgggtagctattcccttctccaggggatcttcccaacccagggactgaacccaggtctcccacactgcaggcggattctttaccagctgagggaagcccaggatctagaaactagctctaatagagaagagaggcaaaagaaattcccaggttagacctgaagttcagtgcagattaaagcaggggcacacgatttctagtgggcataaccacaggaaaaaacaaattgttttataggtttgactttaagaaaaattatatttataatgtttttagagttcttggagtatgggggggaagatttacccaaagattgaaaaagaacaataaagtgcatgcaaatcaattaaaaaaaagaaaagctattacagcagggaaatataatttgtagtatagggctttaatcagtaagcaatatttacttagtcattataaaaacaattatggtaatagccgcaaattatgtttcaagcatatggggtggaggagatgaagtggatataaagtgaaaattctcataccatgtaggataccaaaatataagtatacacacatgatttagaaagcatggagctaatgccagaagcataagctgaatgagcgtaatgtgatcacatctgggaatgagagagccttgatggtggggtgaccatgagagagtttgctaaaggacagctgtgtttttaagtctttttgtactacttgactgtatgtatgtattactttgacaaaagtaataagaaaaagaaagctcagaagtagaggaattctgaaactttctatatacttagacttttttgaacagtgttttttcacatttgcacttttactttactctttctgaaatgttgctcttctttttgtctttctggacaaatcttattccttccatatcatttggctaaagtgaagccatccattatcttcctaagcagagttagggtttcccttcttggtgccccagaattttgtgcaaacttcttttatatcatttatcttttggcagttatttgtttgcaagcttatctcccttctgtctgtcagcagtttgagagttgggaagtgatggctttaatttttgcctcctctgcagcacttagcatacagcctgatcatagctgatgctcagtgaaagttgaatgaagaatggatgtaggatacaatcaggaaacctgtgttcagatttggcttttgcctttgcccctttcctgatcaaagcatttaaaaaccggatgtgatgagcttcaagttctctatgaatttgaaaatatattattattttttttattaatggccctaaacttgcaattaaaaaagctatgtataataagagttcagttcagttcagttgctcagtcgtgtccgactctttgcgaccccatgaatcacagcacgccaggcctccctgtccatcaccaactcccacagttcactgagactcacgtccatcgagtcagtgatgccgtccagccatctcatcctctgtcatccccttctcctcctgcccccaatccctcccagcatcagagtcttttccaatgagacaactcttcgcatgaggtggcctaagtactggagtttcagctttagcatcattcgttccaaagaaatcccaggactgatctcctttagaatggactggttggatctccttggagtccaagggactctcaagagtcttctccaacaccacagttcaaaagcatcaattcttcggcgctcagctttcttcacagtccaactatcacatccctacatgaccacgggaaaaaccatagccttgactagacggacctttgttggcaaagtaatgtctctgcttttcaatagagtacttcttaactaatgggcagctgctatatataacacagggagcccagcctggtgctctgtgatgatctggaggggtgggatgggagcagagagggaggtgtatatataataaacagggaaggaatgtatatatcattgtgattgatgcacagtgttatatggcaaaaaccaacattgtaaagcaattatcctctgattaaaaaaagactgcttcctacatctttagattgcagtttgtaattattttatattttcagttaaaaaatctattttctctatagacagtatgctttcagaagacatgtctgtcttgtccagaatatttcccagtattttatttaattgactaaatatactagttttaggtgtataatatcatgatttggtatttttatacattgcaaaatgaccaccatgataagtcttgttatcatctgtcaccatataaagttattttaatattatttactgtatttcctatgctgtacattatatctctgtgacttatttattttataactagaagtttgtacctcttaatctccttcactctgtttcactcatcttcccatctccctcctctctaggaaccaccagcttattctctgtatctttgagtctgtttctattttgttatgtttgtttgttttggtttttagtttccacatatagatgaaggcttcgtatttgaagacaaatatggtatttgtctttctctgtctgacttattttacttggcctaatagcctctaggtccatccacattgtcttaaatggcaagatttcattttttgtttaaatggctgagtaatagtccattgtatactatatatcatatttcttaatccatttacgtagttctggacaattaggttgcttccatatcttggctgttttaaataatgctgcagtgaatataggggtgcatgtatcttttcaaactagtgcctttgttttcagaaaaatacttacaagtgggattgataaatcatatgatagttctaattttttgaggaacctccatactcttttgcatagtggctacagcagtttacattcccaccaacagtgcaagagggttcccttgtttccacatccttgccagcaactgtcatttgttgtctttttgctaatagccattctgacaggtgtgaggtgatatctccttgtggtcccagcatttgatagagagacttgcatatagagacacacagtaagcttttgtttagtaaatacataatgacattaattatgagtgctctgaagatcctatttttctcacagacattttagaaaaatatctttaaatccaaaatctaataactgagatttgtccttgtcagctattatgtaataccacttctgtctgcatgcttggttttacattttctgtgtattcagtgctgtttcactcctttaattacttcttcaaaatttctttcatgagggctttctgagttaatcttttcttccaaggctcagcaacttagtgtttgagtgttgtgatttatgtaagattttttttttttttttttctgagttaaactaaacaatttggggcagtttttgtggcttgataaaacactatacattttaacgagtcaaaatctaaatgattcaaatctacaagctggctttccctttaatacatgcaagtaaaaagtcaaggacttgtcaaaatttattttagattttgccaaatctaacattttgaaatgcagcttaaatgtttaaccaaatgtttaaccaaataccaaacatcactgcatttattcctctcctgctgtaagttgccatttggcaagagacgaatgaaagtctttttctaacattcagatttctaaagaa

SEQ ID NO: 60548 - DNA, 976 bp, Bovine  19866881324242
  misc_feature (1)..(1): n is a, c, g, or t
ntgagagtggaagcatatatagtccagataataaaaggagtccaggtccaagtccatctcacagttggcccaatgggtctacagacccaccatctggttatgtatctggcccttgaacacataattgagatggaaatatttagcagcagccaaaacccaaacattggttctttgacctgtgaaataagatccattatgatagaaagggacaaaggaagcccctgatattacttaccctttactctctttcaggtagtaaatcagaaggaacaatgtagccatgtaccaccaaaaaaaaaaaaaaaaattatgcaactctcaaagagtggctgctgcagaaaacatacagctcacagatggatccatttgatatgttggtacaagataaaaatacactattacactatagcccatgcacgaatgaactacttcagtgttacttaacatgtggtccacagatgaaagcaagctcacaaactgttttttatcattccacaacaagttatatatatgcaagtataaacagtgagagtacacagttgaaaacatttatatcaactttcagttcagttcagttcagttgctcagtcgtgtccgactcttcgtgaccccatgaatcgcagcacgccaggcctccctgtccatcactaactcccagagttcactcagactcatgtgcatcaagtcggtgatgccatccagccatctcatcctccgttgtccccttctcctcctgtccccaatccctcccagcatcagagtctttttcaatgagtcaactcttcagatgaggtggccaaagtactggagtttcagctttaacatcagtccttccaaagaaatcccagggctgatcttcagaatggactggttggatctccttgcagtccaagggactctcaagagtcttctccaacaccacagttcaaaagcatcaattcttcggcgctcacctttcttcacagtccaactccca

SEQ ID NO: 60549 - DNA, 1566 bp, Bovine  19866880902195
  misc_feature (1)..(1): n is a, c, g, or t
ntctttcttacctttttcgtgattctgcagtggtaggaaatcaaagaaaactttcatgggggaaatgcttccagggaagcatttgtgaaaagggaagccactggtgaaataaagagtagagatctcaccagtgaaaggcaacatcagtagactggcagtagacagatgtctggggccagggttgttggtgttgggagggagcctcctgagaccaaacagaagttggcctcctttcccactgtcgtcaatgaaattcatttaccagacactatcggagaaggcgatggcacccactccagtactcttgcctggaaaatcccacggacggaggagcctggtaggctccagttcatggggtcgtgaagagtcggacacgactgagcgacttcattttcacttttcactttcatgcattggagaaggaaatggcaaaccactccaggttctcatctggagaattccagggatggggaagcctggtgggctgccgtctatggggtcacacagagtcggacacgactgaagtgacttagcaacagcagcaatcaggacataaagtgggcctgaagaacaaatggtttttggttgaaatccactgtctgtatggtggtggaactcctggcctttgcctatgaacagacttttaactactgaacagttcatagacccctagactccacagtgcttttagacttgacatagggcagaccacttgtgatatatgcaaacttgtcctcaactcattgttgctgctcagatataagctttgtagaaagatggaggaggacaaaatctgaaagtgcttcagaaggctctcttccctggtgctcaggaaaccagtattgatttctttttgccagtaagaagaaacagaactaagaggtggcaaaataaatccttttggaaagtctattttgaggacactttattctgtgggtgaattaagaacaagatttgtaattaagtgcctaatctaataaatacatagcaccatgaggtgtgtacagatgaaagaggagccagttaagctctgccctctaggagctttcacaaagaagcccatatttcatcactttctccctcttcagtttctctctgaggctgccactaagtgttggcaagttctctaatggaattagactatcgagaggcccttgcacgcagtctggcctcaaaaaaaaaaaaaaaggtgtttgtggtttaatatatgattgcagaatttgttatacacaggcaacccagataagtcttcagttatctttattagaatcattatttttggcaaaagtaatggctaataaaaagaagtttaaatcattgttgaatgtccagtcagttggaaaaggtggcttggtccagatgcagttctgtggctctgagttgttccacatgatgataaaattttatcatgtaacaacagcaaacattatgctatttaaaacaatttatgtaagatatttgaataaaagtaatttgaaacaattcatagtgatgctgttaaattttccctaagtcagtgctcctggaaactgtaaaggttaggaaactgcctttatgttcctagaa

SEQ ID NO: 60550 - DNA, 1857 bp, Bovine  19866880361472
  misc_feature (1)..(1): n is a, c, g, or t
nttctaagtcttttggaaaccggtattctgatttttatagaagccgtgtctcctagtgatttaaggcatgggctctgggtttgaatctccacccatcatctgctggttggatgagttggacaagtgacttaaaatccctgtgcttctgcctccccatctgtaaaatgaggttgggagcacccattgctggtgtcaacagaaaaaaaattgctcaacctgaaagttgagagctatgtatttttcctatttaaacaaaatcttgacgtttgtcttggagtatagccgattaacaacgttgttaacagcttcaggtgaacagcgaagggactgagtcacgcatgcgcatgtatccatttccctcaaaccctcctcccctcgaagctgctacataacattgagcagagtaccctgtgctatacagtaggtccttggtgattatccattttacatacagcagtgtgtatgtgtccattccaaactccctaactattcctcctcgcaggcaactgtaagttcattctcttaagtctgtgagtgagagctgtgttttagttggcggatattcttaggacttcaagccctggaggcagcatctcaagtaatcctgagaaaattgctccgaggagacaaggagggagctagaatacatagttttccaacaaagggcaagtagtctgaatgtcaaaagattattgtgaattaaaggaaaaccagatatctccagttaaggaatttagagtttttctaggtatgggaagatgcaagtgtctgggctcactgaagtcgttctttggatatgcacctcagctattgggccagtgttcagtcttttcccatcctaagtttcctctggggtcacgtgtggagtcgctatagtccaatggctgctagttggcaagtactttttgatcccttcctgagtccttgtcaggactcactggctcaccattggaggtgcctgcaatcgctgatgactgtaacatcttttgtttactgatatgccaggcagtattttacttctcactggattttcatgagtattagatgaattaaaacatgtagagtttgctagaactgtgtctagcatggtgcaataaatattagctcttattacctattattattaataaacttacttacctgccccatatcctcatcacttttaatactgtagataaacagtcctcccctcaaaagagcctattatttatttagctttgcagcgttcaagaagaagaaatggccacagtttagatgtgtaaatatatgcttttagtgagtatcttttgctccttcccgattcagattgagaactcggcagaggagtttgcactgtatgtggtccataccagcggtggtaagtataaagaatacaaagcgcttaaaacttttaattaactcaaaatagcaagttaaaaacagaatctctccctcatttgcttagttcttggttttggaaacctccaaatgttgtttgtcttcaaggcgggtgggctccctgggtaagttcactggggaatgccatatatggtcagtaaacaaaccctaaaacctaactgcctataaaaaaaagaactggattttctcaaagcacagagaaaactattttctccaatgcagcatcttccaaaaggcttgaggcatggaaatattgctgaggggtaggagagcggcagcagttgctttgaacaatacctgttgaatctctcatttacaaatcagtttcctgacttgtatggccgcatctcctaaggtgtcgggtccatttgaacccctgagttgacagctacttatagtaagaaagacctcaggcaactcagagctgctctggctgtgtgggttccagagaaacagaag

SEQ ID NO: 60551 - DNA, 1167 bp, Bovine  19866880363922
  misc_feature (1)..(1): n is a, c, g, or t
ncaaacatttactttgttgatcaggattctgcaggctggtagcagtcattctgctctagatgtgggttgacttcagggggctcaatggtaaagaagttgcctgcaatgcaggagacccaggctcaatacctgggttggggaaatcccctggagaaggacatggcaacccattccagtactcttgcctggagaattccatggacagaagagcctggtaggctatagttcacagggtcacaaagaataggacatgactgagtgactttcactttcactacattgtatgtcttattcagaggccaagggttcagaggcagtggctacttaggtatgcttcctatggcagatggctggagtgcaaaaaaccatgtaagctcatttaaagcccccacttggatttgacatatgtcacatccacatacatgttccattggccaaagcaagttgcatagctgagcccaacattaacagggtgaagacatatacttcttgcatagagaagagctgatagagcagggtaaggactcgggtgaggaccgaagagtggctggtgggggccactctctcacttacagcttctcaggaggaagttcacatttggatacctgtttgagacttgaggcacaaatcatcattctgaacatggttccttaaattcttttaggggagatcagaggggtttattgaatattatgagttccagtcttctctgcatgactgagtcaagagaaagtgcttttctgtgtttgacattacctctcgtggtattgaatacatgagataaaaatgagaagtcatgagataatgtattaaatatcatgtagataaagcgatctttatcatggactctgcccaccttgagaagaataacacttggttcctgtctttgaggaaatcctgaattagcacagaaacagatttcccaagcctttgtgccatgagagagatgccccaaaaagttggaatagtgctgataggggtcttacaccccagacttactttttcctcctcaggtggctcagtatataaagttcgagatgcctgtccttaaaagcttcattcagaagctccaagaggaagaagatagggaagtcaagaagctgatgcgcaagtaagcatggcccctggggtggctggttggattctcctgaggcctcaatgagagaa

SEQ ID NO: 60552 - DNA, 1143 bp, Bovine  19866880566837
  misc_feature (1)..(1): n is a, c, g, or t
ntgagaagccacataaacccaaaggatcctaagaaaactaaaactaccctacattctaaaataccctcaaagatcctaaacaaaactaaaccctaaatcctaaacaacacaaaacatcctcaagtttcttaaatgatgcttaaaatcttaagccccaaattacctaaactaactcaaacaactctacatgacctaaggatcataatagactctaaaaaatcttaagcttcatacctccctaaagctccttaaaaaattcacatttgctttaaatctattttaatgaatttaaatctattttaatagatccaaaccctttcagtccaaaaggccattaaaaaaaccccaagaaatcctaaatatgcttatattctagattccctaaacaattctaattgatccaaaattatcctgtgcttgctaagtcacttcagtcatgtctgactcttagtgagtccatagtactatagcctggcaggctcctctgtccatgggattttccaggtaataccgaggtgggttgccatgccctcctccagggtatcttcccgacccagggatcaaacccgtgtctcctgtgtctcctgcattgcaggtggattctttaccactgagctaccagggaagcccctttgtaagtgcttgctgataggatacaacccatcctcctcatctaggaacctggatgccccagggccctaaaaggtggggaggctgcagaacatccctctctcctgagcaggggagtgcctcttctctacaaggaaagtcttgtaggcgtctggttgcatggccgaccaaaggcccaagtggtccttttcacatcagtgactccatactggctacacattctggcatcttcaaaccaatgacttggtcagctttgacaggtcctgtcaagagctaatgctctatctcttgcccatttggagcttctgttaggaccagcaaggtcattttgctcaggttcaaattaatgaagtgccttaaatgtctgcttttgacattatcactagatgacacacaattgtgttttagtttggattcaaacttagtttgggagttgattccgcagacgaggtggaataggaaagtgtgataggaaagggaaggaaaggaaggaagccaatatacggtttgtta

SEQ ID NO: 60553 - DNA, 1637 bp, Bovine  19866880608732
  misc_feature (1)..(1): n is a, c, g, or t
nacatcctggaatgtgaagtcagtgggccttaggaagaagcatcactacaaacaaagctagtggcagtgatggaattccagttgagctatttcaaatcctcaaagatgatgctgtgaaagggctgcactcaatatgccagcaaatttggaaaacacagcagtggccacaggactggaaaaggtcagttttccaatcccaaagaaaggcaatgccaaagaatgctcaaactaccacacaattgcattcatctctgctgctgctgctaagtcgcttcagtcgtgtctgactctgtgcaaccccatagacggcaacccaccaggctcccctgtccctgggattctccaggcaagaacactggaatgggttgccatttccttctccaatgcatgaaagtgaaaggtgaaagtgaagtcgctcggtcgtgcccaactcttagcgaccccatggactgcagcctaccaggctcctccatccatgggattttccaagcaagagtactagagtggggtgccattgccttctcccatactactacatacttaaataataagtaaaaaattttactttgtttggttgccttttttcccgctgcattccctccacctcctattttgtttggttttaaaacaaaaagagcactgccagtttttacccatgttcaattttcagtagggttgcttgcatctaagtgttccaggaaaacctacttaaatttattcagaactttacagtaaagtcttgctctcatagcaaactccagttagtaatagcttcattacataaaatagataccaacaaattatttcataaaatctgttttcataaagcaagacagaaactaccaactcctttggcagcagctattagtatttgttgggtgacttcgggcactctaacttctataaattttactgcctgacttgaggtcttagtaggacccccaaaaagaccatttatcttttgtttatgttgcctacatccaacatactgtacagtacaaaaaccctcactgctttatatgtgttagctgtctgctcatctatttcactcagtttaattaattcagcacctaaaaagctgctgcttggagtgaaaactaaatatacaagcattgatcggtggcactgataaaaatatagtcttggttgttatctttttctagaggccaaattatgctgttcattctttatgctccatgaccagatattctaggacaactgtcagtcttatatttaaatgttgtaaaccaactacacaacctctctctgtgttagagttctgcagagaaacagaaccagcaggatgaagatatatatatagatagatacatatatagatatatgcatatacatatatatatagagagagagagagagagtgttactttaaagaattgactcatgcaattgtgggagacgaggaatccaaaatctcaagggtaggctggcagtctggaggtcagggaagagccagtgtcgcagctgtagtccaaaggcagactggaggcagaattccctctccctctccctcagtgtttttctgttaaggccttcagttgattggatgaggcctactcacattatagacagtgatctgctttactcaaagtctatgatttcaatgttgtgtgcatgcc

SEQ ID NO: 60554 - DNA, 832 bp, Bovine  19866880696332
  misc_feature (1)..(1): n is a, c, g, or t
ntgaggctctcaagccctgaacccagtgtttatgaaacttacctatcaaccaactacacaaaataccccaggggaaatatgtttgatacaataagtcagattcttggggtcctactgaatgggaatcccctggctagagcctaagcatctgcattttacccagttccctgagtgactctgttgtctactcaagtgagagttaccactgtcctcatcccctttgttccactgaaatctttgtctttataatgtagttgtggggcttttctttcttttttttttttaatattggcgattctcaggaagtaaacatcctgttacaatacaggagtggttccttttccaccccaaactagctctgcctcagtcagcttccagctctgtcagcagttccaccatgtcccagtcacacaagcaggtaatactgccatcatcctttgcttttctccctgttctacccccacccacacaccccctttgccagatgcagccctacaccaggtcctggcaatagtccctccagcctcatctcttggcaagtcatggctggaccatcactatgctcctctaacttgtctcttcacccctataggagatcctgactgccccctgaaatccatactcatccataataagcatcagaatatcaccattgaagagactttctaatatgtttcattccttacaaaacctccaaaagtttcaatgcctgtagaacacatgccaaatcctgagtctggcacctcgtagtctttgtagtctgatgccaatctgtctttcagtctcatgtatggggacacagatagtcttttccaaaggacactgtatttta

SEQ ID NO: 60555 - DNA, 2691 bp, Bovine  19866880742015
  misc_feature (1)..(1): n is a, c, g, or t
nttggcttgttcatcattgcattctcaactctggtgtagcatctggcccaccatattatgcaataaatgtttggtaagcagataaaagaatgtgccagggaccataccaagcacttcataatgcttcctgacaactctctaaggtaggtgtaataggtgttattctcttggtatagatgagaaaattgaggctccaagaagtaaaacagaaagtatcagccataattcaaccctggcttatctaacccagatttcctgctctgtacggttatacttttggaaatacgaaattactgatgctgatggccatgtttttgataatttattacatggaagttaattaattagtttaattaaagtaaggtataataaaggaaattaagctaaaatataaataaaatctagacaaatgtccatattgcctagtaaggaagtattaccatcttgattcctggagtagtctagatctatggcacaaagatgttttttcacaagaagtataagtatttgctacttgcatctctgaagcagttaatgtatttaagaaactatttctaaatgatgaatttcctttctaatgttcctccaaccctgtgtgcatgtttttaggtatacatgcatctttaaatatatcccctttatacaggtgctccatacaatctccggtcattctcttactgccactttggtgaggggccatcatttccacgaaccacttacagcttcaaaaacacaattcctcagtagaaaggttaaaaatgaagtatatctttaagaagatcaagtaatgaattcatacatgccataattaggaattatcattagttaaactacatttatattacaaaatatcaatacagtttaaataaaaataatgaatctaatactctaaaagatgcccccagaggctctctgaggatatgctcagagtacccagcccccaccctcaggagttgttgaaacatatttggtgataaaagttgctgaatattatcaattggtgaaaaaatgtgcattgtcaggcaattttatccaaagtattctaaaatgtgactgttgataatggtaccttttgttctgatctccactgctaatcagtgttcttctcaaggatacagttggaaggtttttacatagaaagtcagtggaggacttggaggccagacagtccagcaccttcccctgggtgtgagggatacctgcctccctgccctgacagctcagggagctcctatgcaggagttcctgaggaactcccacctctgtggctttcacgctgatggcactatgctcatcttccacagtcctggtgagttctagatcagaaactaagactaaagtccagaacacatacaggttatttcctacatgtcactattttaataataacaatagcaataacaacaaagtacctataggctgatgttaaaatttcaagtcccggctctcctgagtttaattataagggcacacacagcctcgtaagtaaaatgacttcacttcttatgtgaaaacactcagccgtgatgtagtacgttttctataattcctgtctttcttcatttcattaatagttccagaaaccagatttaagtgggtgtgtagtagattggtatatagtgatttaaatgtcaaatttattattggaactttaaattgattccatatgtatttgaacatccttgctcatgtttatgaattatgagataaagtcaaggctttgtgagtctagtttttcactttagcaaaggtcggtcaagtgcctactatgtataagacattgtgaaggatttctgaattattcttgatggagtcattttaaaagtgaataatttcaccaaccattgatttcttgtcccttctaagcattcattttaaaaatatatttattgtaaaaatgacactaaaattacaacagaaatccaaaaccaaacattgcccacagttccaggatctgattgtcagtgttctcattttgccctataacctcctagtccttaccatttgcatatacaaatgtacatatttgcaatgataatttaagtgatcatttatattctaaatttttgctcaactttgttctatgcttttttcatttttctatgatttaggggtttttgcctcctgctgccttccccaacccactctccttcctgcctgagatgtagcctccatgctttcattgtactcatatagagagttatttgtttgatcactttttaaaaatactgtaatcatagaactcgcatttattcttctgcaatttgtctcactgtgttatcaccttcaccctagtgcaacagccacctagttagttaacttgtcctttaggatgtggcatgatattctataccatggaccagaccctgattgatttaatcgtttccttgttgatggaccttcattcggttttttgccactgcaaacaataaacatcaatgtacagacaactttgcaatctgttacttttatttctgtggagtagatttatacatgcaacatttccagaacaaagctacggtataatttaagtttttctagacatgactagattatgttcctaaatagctggagcaattctcatgctaccccctgcagtatactgtgctaactttaaaagtctctatgtgatttaagttacagcacctgccttttctccaaatggtgcttgagcatcttttctactttgcg

SEQ ID NO: 60556 - DNA, 4732 bp, Bovine  19866880899705
  misc_feature (1)..(1): n is a, c, g, or t
ntgttaagaaaaaaaaaagagagatatactaaatgactgctcaccacttctagtaataaatggtgaatcaaagatttacctttagtgaagattatctcatcaatttaagacagcagttataagttcatatttaattaaaatcagtaagtcacatgtctgcggaatctgagatagtgtgtcaagactaatgagtgaacttgtgaatattttgaattatcactgggcttactatgaattcagtataatttccagtgtctggaatagctacataaggttctaatttagagctagtgaatttccaagtggaaatttattattaataaacctttaccctacaaactataaatttcctaaaatggcagtagtataattttaatggaaagaacgtttgttccagacttgccactaaattaccttgtagtgagtccctcagaccattgaggcctgcagtttcctcatctgtacagatagttgaacttaacacctgatcccactcagctctaaaaggttcaccacctctgttgctaatagtgtggtctgatagttattgtactgtcttctggcatttgtctaccagttttgtccttacggtagtttgggtttctcccactgcatttcctacttgactggttgtattttaaacttggcatagtcagcattttgctagaaagccttctcagggaaatggcagcgagatgcaggaagagagagggcacagtgctccggccacatgccctcccctcttcgtgtccaggaagtcctgcaggcagtggttcccctcaactaacaggatactgtactaaatttattctgaaatgtctgtgatttgatacttaagattaatcatactgatacttttctatttcattttctgtgttgtccttttctaaccctggtagccttcaaactttctgactggcctgctttccccttctcctctctgtagtgttgtctcagcttggctctgccgagaacagacctgagcaaagccttcctcagcagagactccagctctcctctgcctttcaacagcagcagcaacagatccaagtaatccagcaacttcactctgcttacatttttaaagacactttgctccaaaagtacttcaaaataccttacttcagttttatgttactgtcttttgagactatacagtaattggtaaataatttagcaaatttatttaaaagtctgacaactttagcaagtcaacttggagcactgcatctattttgtacatttaagtcatactctctgcctaatttaaaatctttcttgaagtgctggtggcacattaacatacatttttagattcctttatattttgaaatagtcatttgtaagtgccaatggttaactccttaatactgtactgcagaaaaaggcaagtataccagtgttcctatttgtaaattgtcctacctgttttagaaaggtgttattccattcttaggaagtcagaatagtatacttgactatctttaatttgcagggtggttttatactgctataaactatcatacaacacaatggtaactgaagttgctgagttactgcaatatagactggccaggcaaagtaacagagcttcttctcaagtttaaaagccctgtctttaaagccctcagcaggcttctgtaccactggtgctgtttgactgtgcattgtctcgacgtggtatagtccctttttgttatcttggtgctctctccctttcagttttgttctcatcactctcaggaaaatcatctttccatacctacctacgtttaacctaactagatttttttccctctctttgcagcagttacgattcttgcagcatcaaatggctatggcagcagcagcagcacaaacagctcagctacatcgtcatcggcatacaggcagccagtcaaaaagtaaaatgaagagaggcacgtcaaccactccaaaattctgagtcttgaatagttttcctttttaaaaacataagagcattgaatcaaaaggattcggagtttctacttcatttttgttttttaaaatgtgtcagtattttacattgttagacatacaaactttatacagaaatttgatttttaaataaaaacaaatagtttttaaataaaaacagggaaatggtttaacaaaccattagggttggtttgcctaagtcattgtttcttaaaaatggtttcacggtacataatacagaagtgacctgagaaatactagaaacatctttcaaaagaatgtagtttggtatttatttagtataaaaggtttgtgcacagtgtaacaaatacagtttttataaatctgttttgaaaacgtggttgctcatttgggtttcatactcttaaatacttcatccatcagtttttttacttctttgtgtcttgtaactgctcggctcatacagtcttgaagtttagctccagtcagtccacttccacctgaaaaattgtgccaacacttaattcttacatgacctatatcatgtcaagttagaaaacaaaatttgaataatataaaccagtgatatggtctcaagatttgtaggtatgtattaacaagacctcctaaagtttaagaaccactaacatataagatgcaaggcatcttgagtaaataaaacatcccacattccatttggccctccctaatgtaaggaagctcactctgggttttcatctacatgtttagtactgagatggaagaaaagtgcgtgcctggtttgtgaagacaacagagcctgccttcctcgtccattacaactgttagggttccagttgccagatgttcctcctcttcagtaggatcaactataagcagagtgctattttaaaaataaaaaggtatacattatcaacccattagacacattttatgttagaaaagtaagttaaacttactacctgcattttagcttagatgggagctagacagaaccggtagaaaccagaaaagctagtagcaagctgaaaattgtacttgtaagaatctttgcccttcagttaaatacacaaccttttgattaacttactcatcaaacacagcaaaggaagttgcaactggatgagttctaatattcaaacaacttttcttctttaaattaacttctgctaaagcagtttcttcatttatagtaacttcaggcaactgtactacaaaaaggcaaatatgttaagtcagtttctcactccagttaaacagggcattctatgcttgattaattcacttttccctctgtttaaacttgtccagaagtattttttgttttaaactttattttgtattgaggtataggagggcacggcaaccctctccagtagtcttgcctggagaatcccagaggagcctggtgggctgcagtccgaagggctgcacagagttggacacgactgaagagacttagcactcacactcacacaaccaattaacaaacaatgttggcacagtttcaggtgaacagggaagggactcggccatacatatacatgtatccattctcccccaaatcccctcccagccaggcttccacattaatactgagcagagttccatatgctatacagtagcagaagtattacttaacaaaacaaagcaaatatggtggatacaaatactgtttttctttaatttagaaacatgtggatagataagtcctcacaaaaacctttagaaaattttaccaaaacagaacactggcgtttaagtaggaatattcccttttattaaagttgcttaccattttttaaagctgctaacaaagcaaaggtacaagcatccaaaatgtttccatcatggttgaggcaaatgagatcacagtacaaaacccaagcaagctaaaacggagttgacaaagaaattaaagctttctgataggtataatgtggtatttgtttctactcacaaaccacatccttggttaaacaatcaacttttgaagcaaaaacttaaattaacctttataaagtaaaaaagtgagcaagtttggtaaaagctggcttctaactaccaaaagctgaacaagtgaacatctccatttcccctcaagggagctacagatgtaggaggaatttccattcttactgctaaattagcagatgagggaattgcttctgaaaagcccaaatgagactcaaaatgtgttctaccacagaaaccttaatacatgaaatttttaggtctcacactgcttaataaatcaatataatcaaacatgaagagcctctaggtacttgtcaatgtagttcaaagttttcagacagacttgaaatttataatgtggattcaccttaaacatgttagctgatcagatattaaccatctgctggaaaaaaattttaaatgactgcattattagttgaaaaaagattacatcagcttaaaagatagtttctagccaggcaatgaagtaaacaaaatttactgggttttttggtgaactatatctagacagttacagagtaggagtgattttttttttctttaattccatctagaaacaagatatctgtatttaaggcttctgtgttttttatattttccccaccccaaaaaacacttcagaattaataaaagctcacagcttctttactccctcttacctttcctgaagagatgcataagtcttctttctgaattatctgtgaacttgatttaaagacagcacagtaaacaaaagttcagaaactctaaagtgaatgacagtcaaactttatcacgataatcttacttttca

SEQ ID NO: 60557 - DNA, 2560 bp, Bovine  19866880940330
  misc_feature (1)..(1): n is a, c, g, or t
ncttatggcttcttccttccaggtatcttccttctgctattcctctgtcttccacctgtccctctcttttcatcctttactcaaaatctcttcctttcatcatgaaaaaccatcagttgtccaataccttgactgtcaaggattgaccgtgggaaccctgactggagctgtcctcagtagtggtgctgaaagcataaatttgaccatctgctagccagaaattctgggaaaaatggagaccccaaacaatgaattagaacagcttttgtgaaggtcttttttggtatgtccttcaggtccctcaagctttacagtccaaaacaaaattcattttattccagactctctgttctccctcttacattccttaagtccagccatccctcttagtttttaaaaccatcttctctccattcccacggccactgaaataatttcctatcttgtttctctcaaatatcttgatactcaatgacttccattaattctcatcccaagttcatatagaattcaattcaagtttgttaaagtaggagtaggtacagcaaagcactccagaaatgctggcaattaaattgtaaatatcaacccattgtagatgagaataatacatacaaacattgccttagggacaaagtagctccaggtctagaaacagaaagaataaacaaagcttgcttgagtgagccagatcaatcctaggcagagtgaaggccgtgtccatactcaaagatgttcaataaagaaaatatgttgttcacaaggggtgagggtaccatcttcaaatgataggagggtgagtttgcaacaaggaagaactgcaactctttgtactagcactgcttaggtggccggtctgccccttgtcacagaagcatctctgttggattaaacaggatgtgccggttattctcagttggcccctctaccctgctctggctttgggaggctagccagaatggactgcatccatgtatttccttgtcctctggctttgcattaaaattagttaatatagaatgtagttaggagataagagggagagaagagagtgaggttgaattattgcttccttcaggtccatcccatgacggctgtcctgacttatggtcacagcatctgtactgtagctgcttctacagcagctctctccctctgacttgcagtaggcactcccttctctcatccctgctggcctgccagtagtgatgtggtactgcactgcccaccagttacctgcttcaagtgtgccattttctgcaggatctctgattagggcctgatatcataagcattcaaatctcaacttctttgccccaatctcatcctcaccaagcattattctgtttataaattggcttcacatgtaaatccatgtacacaaagacagtgtactggtcatgttgaaacaagcattctgttctgcttggcatttatttatttacttatttatctttgtttattagtatatatcctttatttctaaatttttattggggtacagttgatttacctagaggaggggcatggcaacccactctattgttcttgcctggagaaaccccatagacagaagagtctgtcgggctacagtccaccaggtcacaaagagttgaaccccactgagcgactaagcacacatagttgatttgcaaagttgtgctagtttcttctatcagcaaagtgaatcagttatattttacatatataactgtatatgctatatatacatatagcatatatacataaaatacatattatgttttacattctgcctttttttttttttttacattctgcttctgtataggtcattacagagtactgagtggagtttcttatgctatacagtaggtgcttattagttacctattttatatatagtaatgtgtatatgtctgctactgccactaagtcgattcagttgtgtccaactctgtgcgaccccatagacagaagtccaccaggttaccccgtgcctgggattctccaggcaagagcactggagtgggttgccatttccttctccaatgcatgaaaatgaaaagtgaaagggaagtcgctcagtcatgtccgactcttagtgaccccatggattgcagcctgccaggctcctctgtccttgggattttccagggaagagtactggagtggagtgtcattgccttctccagtgtatatgtctatatatacatatatagacaatttatcccttctcccttttcccctctggtaaccataagtttttttttttttttacctgtgactctatttctttttttgtaaataggatcatttggaccatttttttagattccacatattgcttggcatttatacttctcattgctaaataagaaatggcattctgattttatatcttcatattaaactagctttgttagtgccacttagcctgcctgggattaatgaatctgatgtactgccaaaactgaaggtccagacagtctctgctggtttggggctggggagtgggttgggattgtctacaggataaagctgctctcctttgtaattatttttgagggtgggggggaag

SEQ ID NO: 60558 - DNA, 1031 bp, Bovine  19866881018976
  misc_feature (1)..(1): n is a, c, g, or t
ntacatgatgtgagtatgtagatgtaataatttttgattaagccttacaccacgattatcaaatgttttttatactcttcataggctcctgcatgtgtgctttgctctcttaaaacttgcagttcctatttttaaagtgcaatgacgtgtacaattttccttcagctccatgaaatttgcttaacggaaactcagcttgttttccataagtcctactggttacatgagcattgtttacctgaatttcaagtacatcacttgggagaaaataattcaacttttgtgattcttaattcaattattgttcagtttctgctgcatttacacagttggagcagcagcttggagtcatactattctttcttctgaaaatatactactgaaagaagtcagaacctgatctataagaaaaggaacatctttctttgggcagagtatggctaatacagcaaagagactccaaagcctgcaaacgtctattttggtaacagacactgggttaagtagtctgcaaacacttgaacagagccatgagatgcccaagtttaggaaccagcattgtcattgccctaggactgctctccagtgaggagtaataatgggttacagatgcaagtgcttggactgggacagggagacaggttcaagacactgttctcccctatacttgagtgactttgggaagatggcaggaagctttgctttcctcatctctaaaattctaattgggcttccctggtggtccagtggttaggaatttgacactggtttgtccctggtctgggaagatcccacatgctgtggagtaactaagtccctgtgccataactactgagcccatgtgctgcaactactgaaatctgtgtgcctagagcctgtgccctgcaacaagagaactaccacaatgagaagcctgcacaccacaccgctgagtagtccccactctctgcaagtagagaaagcccaagtgcagcaacaaagacccaccgcagtcaataaatgaacaaataaatctttaaaaaatttaaaaa

SEQ ID NO: 60559 - DNA, 1549 bp, Bovine  19866881092103
  misc_feature (1)..(1): n is a, c, g, or t
ncacacatgacagcaatatgcaggccaagtttctttgtcctcctctcacctccccctcttagtcatccctgagcctccatggcctctcagtgtacagggatccctagagtaccccagatgaggggcgctttatctgttccctccttatcgcaattctcccccagccccacaaacatactatgggcttcctgcaatgcaggagacctgggttctatccctgggtcaagaagatcccctggagaagggaatggcaacccactccagtattcttgcctggagaattccatggacaaaggagcctgacgggctatagtccatggagtcgcagagtcagagacgattgagcgactaacatacatactccagccctgtaaagttgatctccaggccttttggtgtcagagactaagggttaaactatacctcagggtacagctgggtcagctcatccctcctggaagccagacacactttataaattcattgtttggtgcatgcaatgtgtttcccttagaaacaatgttataaatggtgatctgcttcccaggctggccacaaaagtcttttgaatccaaaatgcagctgaaggttagtggtgaaaactgtgtcagctaccccagaacaaggagaccactgatgaactttttctataggaaaaaactcttctggttccttcccagtgagctgtaaaacacaaaagctcaatcattaatcccccttcccccaccccccaaactttggagttaattctcagtaagcttctttgctttgcaagtaataggagcaccttcagggaaatgtattttgaggacatgaggatttccctccaacattaaggtcaaaattacaggcagagctccataagaagcaaatacagaacttgaagggcttccagtaacccagaaggtcttctctgagaagccaactcttctctttcatcatagactggccttccctgcaccccagacatatgccaaagagtggccatcacttccatcactggggcttaacgctcctgttgaagaaagcagccagataatttttcatgttttcttgcaaacttctacccccaggaggcacatgacctcaaagaagcagcagaaaagtatttctagagccatcctccagtagaaatacaacgcatgcccacagatgcaatttaaaaccttgtagtcacattaaaaatagtaaaaaacaaaaaaagtgagattaattttaataatatattttatataaaccaacataaccaaaatattactatttcaatgtgtagacaatataaagaaagttattcataaaatattttacattccatttttgtactaaggttgaaatcaggtatgtatttacacttcagttcagttcactcactcagtcgtatccaactctttgcgaccccatgaaccacagcatgccaggcctccctgtccatcaccaactcctggagtccacccaaacccatgtccattgagttggtgatgccatccaaccatctcatcctctgttgtccccttctcctcctaccctcaatctttccaggcatcagggt

SEQ ID NO: 60560 - DNA, 1165 bp, Bovine  19866881166611
  misc_feature (1)..(1): n is a, c, g, or t
ncttgcccctcagagttctctgacccagacaggtaagtctcctccccatccccactgtctcttgagaattcctttcactcttctccttctggatgatggtccctgtgacataagcctctgaactatctcatgctctgaaggacttccctctcatggttctatgtccaagcaacacccaataaaacttcttgtgtgttactgctgtggtcatatctttttccttgattaattattggattcctcaaaccctctagaagcccacactgaattctgactggctcaacccatcagagcccttctttgggagagttttaatctgagagggagagataaccagcagttgacagtcagacccgtgtagcaagaccaaatgatatggtagcattctcccccaagaggtcaacctttctggccatgtagacatgagctccattcccaagttccattatctctaggacaatgagaggatcaaatttctgagcaggttgtctgagggccaacaccaaggaaatgccacctttgtggggaggtgtctgagaggccacagacatggtcattcttagcaactctgcaacgtaaagtgtagcagtggagccaaccaggcaggtaacaggaattatagggaattaacagcaaagaaaggtccagacaaagagagaagcagccaagaaatgacaatgggaattcacatggaccaggatgtccctgaggtggcagatgtcccagtggttgaggtcggcatggaaaccactgagtgtatcagtgtaagactgagatcaaaaacacgaagaaggttgaacttttaaaggggcaggagcaaattatttattttgaagggattaatcaaactcactctgtgatgtagggacagttggtaccagaaacacagatgtagctgagctaatttaagtcaaaggatgccattgttagagactgggcatctcacaaagctcagcagcaagcagacagtccacagggacagagagaagggatatgaaacacccccaaaatggaactagaggaggaaggaggctgggtaaacacacccaaaccatttctttataagtcccttggtgctttttgttaacacttgtgggagcagaatgaagctaaagcaggattaatttgctaatagtcaataactctttactaaaactgaatttta

SEQ ID NO: 60561 - DNA, 1066 bp, Bovine  19866881217293
  misc_feature (1)..(1): n is a, c, g, or t
nattccaaaacattatataaaagtgtgcctgggcatgcctcccacacatttgtccttttgaaaggctgtattgtgcagtgattaagatcatgggttctggagccactttggctcccagaattcagttcccagcttaagcacttcacaggatatcatgtgtacatcccacttcctcatctgtaaaagctagtagtgttgagggttgaatcagttaatacacgtgaaaagtccttgtagaagtgccaggtgcatatgtgccaggtgtgatagctgttactaccactgtgtctgatattgttattaccatagtgatgcaggagcagagaaatgtaggattctgctgcaggaaaaatgttaatagttttttctcagaggcacccgtagaagccatctaaatacatacgtaagggaggtgggcagacattacatttcccttgggagttttgcctgattgcttcattaaaaaacaagttgagtgtatttttatgcaagccttgagcacttgctgagtttagtgtagatgaggtgatggctctgatgggtgaggtgacctgcttcttccggcatacagctactgcctctgttaaggtgaaagacatactcctggaaagcactaacctcagagccctcttatcccaaaagaaccatcccccctgagtttgtgcttcagttcctttgggctcctaacatgttttctccttcccttcctctctgtcttagatggaagaactggtgggtgagaggcatcctgactttggcgatgattgcatttttcttcattatcatttacttgggaccaatggttttaatgatgattgtaagtgccatttacttgctgttttagttttaccttcagttttccctgcatgtctagtcattttaagtgccaggtgttgggttggttctgggaatcacttgaggtcctggctgctcagaccacatccgccttagaataactatgatttctcaccctccaccagccacctggagggctattggcatgggccagttgtaggtgattaaagatcactttaaaattgattttagtacttcagctcttggtcaa

SEQ ID NO: 60562 - DNA, 1173 bp, Bovine  19866881255083
  misc_feature (1)..(1): n is a, c, g, or t
ntattctctctgcatctcagttttgtccaataaaacaggactaccttataggactgttgggaaagaccactgaggtcatagtttatgaaagtgattttcagctatacaagtgatgagaatggataagtgacactgagcaatttgtttggaccccatccactgtggcttattatggagaaacactcccactttttcatcctattctatgaaccaacgagccctgaactctttgcagatatctgagctctacatcaggaggaaaaaaaataaaatccttgtcctggatcataatcaggaagattcgacctcagaatctcagtaacccccctcccctgactttcagtatccctgtgatcatagaagtattttgacaatcttccctgcactttgccaaacaacacaccccagagttgcctaattctgtttgtattatcacatatctgtggtaattgtgtatatttgtcctcatttcttctggattcattttgaagcagagactatacaaatgggaactgatttgggattgactcaaatgactcacatttggacaattcccacttttctgtatgtagttaaagtgttatttagttgcttatgtgtgtttaattaatcattggtgttttatccaacagtggtgtttcaaccaacattttcgtatgtcaccacccagcagactcactttcagcccaattattgtaccctcagaaaatgtaaactcacttgaacatcaggctagccaaactgtttataaattctgattttaaaaaactatatgatttattctaaagccaagcaagtaaatatttggggttatctgcattttcacaaatgtaataacttcatttttatttattactcctatcctgactcttctcctaataagatgattctttaagagtagactgttaccaattgtatctgtcaaaagaattcatcccctttttcctttttatattatactaacctctccaggagttggtgatggacagggaggcctgctgctgctgctaagtcgcttcagtcctgtctgactctgtgtgacgtgctgccattcatggggccacaaggagtcagacacgactgagcagctgaactgaactgaactgaacctctcttcatttaaatttaatggaaacaagttttgtaaatatctgtgtgatttgtaagtttcca

SEQ ID NO: 60563 - DNA, 1353 bp, Bovine  19866881275950
  misc_feature (1)..(1): n is a, c, g, or t
nctctgcccagtccctggagcctgcagactggatgctgattcacgtgcattttaggagtttatttgactaccacatatctgaagggtctcggataaatatactgaatgaaaaactgagcagggaagggaaatttctgttttattggaggctgatttctttttttttttttttggaggctgattctgagagacctcactgtgtccggtaattctggtgtttttggtttataaactcttcgtgctgttgacatcagagtcctattttctcatgactaaaaacgtcatatagaaatgctgtgttgtttacattaatagttcaatcagtggcaacaagggaattaaatatttatgagagaaattgcgtagtttcaaaaaactgtataaacactaatgatgattacagagcttgcataagaaagaggaagatggaagagttatgtaatggttatacgaaagagattccaagcatattagaacagctgtggtcttttcagttggatatattttaaaatcaacatgttagtgttgaattaagacatataaattgcttaatttgtttggtatagacagtaaatgtcccattccctctgatgggacaaattcccatcagattcccttttaaatacaagtattttgttttaggttagccatgtaaaacctgaacttacaattcagtaattataaagcccctttggggtctccttggtggctcagtgataaaaaaaatctgcctgcctgtgccagagacacgggttcgatcccagatcccacaagccaaggaacagctaagcccctgcaccacaactattgagcctatgctctagagcctgagaacaacaagtgctgagcccatgcaccacaactactaaagcctgtgcatcctggagccccttctctgcaacaggagaagccaccacaatgagaaactcgagcactgcaactagagagtagcccctgctcaccaccactagagaaaagcccagctcaagcagggaagacccagcatagctcctgcaaaaaaaaacacccctttaggtttgtagtagagtttacccttggatgggccctgtgtttttatttagatttattctggttctgagcttcttaagaagagctcctgactcctcttttggcctttcagcttgtgcttgttaccacatggatttcagctttggccttttcccttcctcctctcggtgctatgagtgagaaattaggtgaaggcatgtgttcccatctatcacagagccggctgcaaagtgattatgtaggacacgatataggattcgctttgatattggactaagatgcccgtgttgtgtacatgtgattatagaaagggtcagaatcgct

SEQ ID NO: 60564 - DNA, 660 bp, Bovine  19866881391687
  misc_feature (1)..(1): n is a, c, g, or t
nctttctttttaatgagacaactcgataacagaagacaagtattataatttttcacactgtatgaatttataaacttcaaggcatgaagagtaaaactggatgcctactcccatttaattaaacttgttcttcagatttacccatgcatgtttcctttcctgaaggaaagggcttcttgtgctccttaaaagcacgggttactctgatatgaggatctgatattcttcttgttacctacttagcagttttaaaatacatgaaatgaagaactctatgatgccttttagttccttgcatacttgcaataattgatcttacagtatttgttcttactgtttatttctatcggagagtttcagctttttccaaacccttgaagagttacttcagatgagatgcttcttccagtaatcacattgactgccgatatacggaacataatgtgtatttgctgttaatttaactcagaacagagtatcagttaacgattaaactgagtattgcaggcagattaaagaatgggtttagaacggttttagtgtgccagttcatctcatttttctttgtttacttcctcaccctcattttcttccagcgttcatcatgttttgtgacctggtacattccgatttggggaattataatatgatattaacaag

SEQ ID NO: 60565 - DNA, 1839 bp, Bovine  19866881730697
  misc_feature (1)..(1): n is a, c, g, or t
ngtaagcacggtcctgcagcattcaacagaagtattttatgtatactttccattttggcaccagagtattaggagatgtatagtcaaggatcaagatttaataaagttaataattttcctatttcatcaaagacactgttaagataagctggataggtcttcttgtgagtgtgtggcataatgaatccgatgacagtccagtttggtgccactgcctccactcatacaaggtgtcagcaggcttacccaccactgcttttgcaccaccatggcaaatgatgacaaaatgaaaaagcaaatgatgtcattatgttatgaagaaaacaactgtgatctcacagataccctcaaggcatctcagggtgccccaggaaccaaaagcacactttcagaactctggtcttaataatttgaggtaggaggaaacatctcctcctgtccccaccctgaactgacttaagcaattctcttccatcctggggtttacagctttggggaggggagaagctaggttttttgagggaaggcaatggtggagagggggctctctctctgtagtcactaaccagccgaggatcattcgccccatgtgaatggtacatacccagccaatgattgattggatcaccccaggaatgttgtattcctgcagccgaaacaggcccgagggctcacagtccacagtgaagctgttggtatcattgttgtactccacagggcagacaaaacatctgtacccagacatcacataggacagctgaggatgagaacagacagacaaaggagacaagttccagccatcttgcctgggcagtagccacctgcttaggccatgctcctcacagtacctagcaccctaattgcaagctatgcactaactcagaggttcatgtttcaccgtatgtgttattttacctgaattctggaaaaaactgaaaaggagacttacgggctactgaggcctcacatgtacttgctcaaacaaccaggtcctgaataaatccaggaaagacctaaaggaatctgagcaataactataagaagttttgtcctatttggagaacctatggttcatttttctcaggatctcttcatttgaaattacaagtggtgaggggaacagtacagtgagagggcgacaaccaagaggaaagaagcagaagaccactaaataggcgagtgagtcctgaaggacagctagacaactctgaaaaggggagagactaacttgaaggtcagaagcagggaatggtgctctagaaaggggtggtaaatcactcacctccaggcaaggcacacacaggagaaaatctgggttagaatggcatgtcccacctcacctcttactctcagacaaagtaacaaaagcctgaccatgaacgccatctcctgagtgtcaccaggccttgtcagcatgagaggagtacaagttgtgcctggcctccgctcctctactgccaagaccctgcttgaagcctggcagacaaagggcagctgatgctgccctgccatgttcacgccctgctacagggcaaggctaccattcagcaggacagagtccttggccttgggagatgggctctgaaggtgggtgggaggcctctacccaaccctcacccagctgggagccactacctaccagaaggccaaagaccacagtagcaaagaagcccccaatgaagccttcccaggtcttcttcggggacagctgtggacagagagcaagttcttaacaaaatgcattttgataattctggctttgggaataatgattgtttaaagtctttctactatttaaaaaacctcattcaattaaccacttcactttctaaaataccc

SEQ ID NO: 60566 - DNA, 1670 bp, Bovine  19866881751547
  misc_feature (1)..(1): n is a, c, g, or t
natttgggactttttactcaactgagaagcagatgaaattctaaaatccaccaacttggttcggatggaaaggtactatacctgataaaactagcaatatacacgttgacaaaggtggccatcagatactggcagtcaaagcgatccatgatgcctccatggccaggaatggtattggcaaagtcctgttagaggaaggaaaggattggtaagcctggcttcatccaagtcaaagccttgtctatggtcacacctcagtgtccacctactatagctactgcatgctatagctgagggcaacagtaagtgaaaagtattgattcaggtgctgaagctatagtatacaatcttattaaattataaaatatctcttttgaagaaagattaacataaaagattatcataaaactgaaatccaaccacggaattttcttggaaacaatgtatcttcctttatcctacttaaattccatgcatgggtgaagagcacacgctaacagtcaaggttcacagcctggtattttgaagtgggtggtagttgatgaggtgagacaggaggaggaaggcagagatggtgaaaaggggcctggctgggagacaacgagaggaacaaaaagggttttcctactttgattttaaaggctcgtttgaatccactagcaaagaaccctccgaaggggccgatgagcgaggcaaaagtagagagggcaatgctgtgaatctggaaggggtacatccggactgttttctaaaaagaacaaatgaaatcagttcagatgcctgcaagcccaggcttattacttattactataaaaaaaaaaaaaaagacaaaaaaaccacctctttatgaaactatatctcccccctccccaaaattagaaaaaagactggtttaggagttctgtttctgctaaatctctaatacactgcttaacagaggacattaacatattatgcattcagtctacagcaatatgttttgtttgaagtatatgaagaaaatccagtcctacaaggatacatcattgaaaaaagggattattttagcactgtctttccagataattacagggattcttttctgatactacatcaaaacttgacaagtgataggtttctaaaagttggtgcaatgtggaattgaaattctatcaataagttttttgtactctcacattaaaatccattggtctgcattgcactttgaatagatcattttatccatgcatgattgtgtaacaccatgcactggccatttcaaaaacactggtttatgagttacataaacctgccatatgtagatacattttgccatacaatgtcaaaatgtcatatgttaaaatcaccacagattccatcagaaaagtcttttcagtattaagaagttatcaaacttacgtggcaggtatatactctccaaaattctaatttttacttgaaaaccaaattttatcattggtaacagttcctgtcagttgttttcttggaagtgacaaatctcacttaatttctttttcaagaaaaatgtctgccaaaaacctatatgaaaacctacagtttctcatttcttttcaattaaaatttatgtccccataaaaaagctgccagtactgctcagaattcaaacaggtgcacacaaactcttcctttgggtaagcacggtcctgcag

SEQ ID NO: 60567 - DNA, 1515 bp, Bovine  19866880354615
  misc_feature (1)..(1): n is a, c, g, or t
nctatgacagtacttactatagtggttaaagaaacagaaccccaatagaggtatgtgctagggcaaaatatcaggaaaaaaaactcaatttaaagttatcattctgtatatcaagtgcccattgactgaacataactgttttcaataattcacatttgatcaactcatcaactattgcaaaaagctaaataaaaagatttatagttgaacacagagttcctaaggctagtatcacatatcattccctgaaagagggagaatttgtcagcagagaacttaagagccaaattgagaactggattgaaaataccctttcctgctctgtgtataataagtaacacattgggtgtagtgacctaaagaatatttcatgttattcaattttcttttctgggcagactaccacacagcccaatgactttaaaaaccaaactccaaaattctacctgatagtcttaataagggcagttggagcacaaagatagaggaggtcatcttagccactgatgggaaaagatatcatcggttggccctttgccccagtgagacgataactaaagccaattatgaggcttaccaatcattactaggagattaaaataaataacttgtatgtacacggaaaggagagatagcaagtcaaaggacactggagtggggacaaaggaaagcctaaatgtgcagaacctataatatcccttcaaaaattcttgacttctacaacctcaaggtcaaattgaaaccagcaggaatagagttggaattctaaaacctctgaaaagaaagggctaatagtaaaagctgcagctgattttatgcaccaggaatgaaatgttataacatatctatcattcacatgtgggttcgtgtaatttatcttcaattagaattattatctattcagcagctgtagcccagaactgctgatacaccacagatgagaaaacatttgcgggtctctggactctggccttccttaagttaaatgatgatcacataaaatagatcactcgttctataaagcgatctgggcttatgtggacagtatactgcatcaccagcatctacatccacagcatcacttcatttcctttcacagactggagagggtctatagcaactcttcatcttaatcagttcttcgattcagtcccaaattcacgttaaaaacattatacaactttttaatccaggatttacctttgaaagaaatatttaaagaacccagacacttcaagtatctgaaccccagacataaaaaatttcaaagcaaccctttacgatagttgtaattaagtacttatctcaacagtggacttccaaagttggcaataaaatattctaacttaccagtgggagtggcagcaatctaagctcatgtttaacagtttacagtaccaaaccaatgaagaaaaacacaatccagaaagaaaagtggcattctctactgtagtgttttcaaaaatacattcaaagggacgtcagtaagtatttaattaaaaaaacaggttccat

SEQ ID NO: 60568 - DNA, 1589 bp, Bovine  19866880383872
  misc_feature (1)..(1): n is a, c, g, or t
ntttgggggcatataattatctcagaccaagtcagaaagaaagcctaatcaaggtctatgggaaaagatctgtgaaggaggagaggaaacttgaaaatttttcaattgatgaaggcagtttaatataaaagggaaaaaattaccacaaaatgaagctaaagtaacaatagaaaaaaaagaaagaatgcaaaaggtttggaaaggataataataagtctagagaaagtctcaaaacaaaaacaaaaaacagaaaaaccatcaaaggtgaagtacaataaacgaggtttacattcgccccaggagatctggcaaaatcttctcccagtgagcatgtaatggggcagtagttcttatctttagtaggaatcacaaaaaaatgaagatttgttttgttttatagttttattctaattcttctcaaaagttggctttctctctaattgaaaacactgctttcaccctgtctgatatacatgatctaattagaaccttttcccccagtgcactgagttatataactactttcagtaaacttggaccttggaactagttctcaaaactaaaactccaacatttgtaacagttctttggtagtaacacagcctgtctaaacaaacaataactggttaatccacattaattgctggcatctgccttatcctggatctgccttcttctgcctcctcaccatttcaaactcttgcccacagtgaaaaaatggaaataagtttgagcaaactcgaggagatagcaaaggacacggaagcctggcacgctgcaatctatggggttgcaaaaagtcagatatgacctagtgactgaacaacaacaaaatgtggatgaaagttttctgaggaatgatgtgtttcacaattttaatgtctcagatgctgtacaaacgagacctgaagaaaaagttttaccctgactctgggaccatctgaatgatgacagtatcaagatggtttcaacaatgctgatagcaatgacctttattctacgtttgctgtgggtcagggacaaggctaagctttttaagatattatctcaagtgattcttaaaaccttatgagccagatatattgttactatgctcatttaacaagataagtttcagagagttagataaaatgtgtaggcctagttattaagtgccagaactaggattaaaacctagttccttttcaactccagagttcattctctttttcattcaattactcactcaatgtgtatagggcacctactatgtgccaaacattatactgtatgattattcactgtcaaaggcagcaggtgtacctggaagccagaaatggcttgctcagttaacatctctaggatatgtcagctatctctgcattgcaagtgtccatattacagtagaagcatccttcagataagcaacagaaaactggatgccctaaaaaggaaagtaaaccagctttgagaagaattatgatacagattttgcctaaagcagagctcaagaaatcaaggttaaaatgacttgtgctacacagttttggaaaggaatctgttaatgtggttcaacagccatgaaaatgtccattaaactgacaatgtaa

SEQ ID NO: 60569 - DNA, 1098 bp, Bovine  19866880403483
  misc_feature (1)..(1): n is a, c, g, or t
ntaaaatatcttaaagcacaatgtactgagtcctacagtatttcacatattaaggtcctaaatgctctcccattaatatcactacactttaaaaatatcatttaagagactgtaccactatttcctacactaatacttagctaagcagttttttacctgatatattaaaggtatttcaaaacctgcactatttttttcctacagttaaatctataactgacatttattataaaatactcctgtgaagggagaaatttataagcactccaaacaaatgtatatagaaagatcttacttaaaagaaatgaaatattattgattttctatgtcttttgtgctgtatttaacttaattttaaaagattcttcaccagagataagctgaactgtacacctgaatgctaatgtcagctacatttctagaataaaaatatagaactttacaccataactcaagatgttaatggaagagaagttgaattacattaagcattatctttcatatagccttttgcaaattgatttgcagttgtgaagcccaacatctagcttatctgttcccataatccaagatgtacataattcactaaattttaaagaaaagggtcttaggtaaccacgtctttcgaaataactatttcatgttacacgatgaaagagaacttcacatatgattacaatatgcctcataaggtgggtaataaatcaaaaaggaaacataacaagtagtctggtatttcaatgataataatgtgtaaggatggacagacaatggactggaggtacacatccactcacacagatgttctaagtgaagacacacatactaaacgtgggatgctgctatccatgacaatggccaggccacaggttcagacacactccatgccgcacaggctaaagctttcaaacttctctactgatgcttcatatccaggcctaaaatctgacactttcgttgggattcaactactctacctttagggctacaaagtttgtttgagttatatgtctaacgctctccaagtttcagcaaacaaattccagtcactgaagcagccattttgtcattccttttcgcagaattctctttcccaaa

SEQ ID NO: 60570 - DNA, 1379 bp, Bovine  19866880421043
  misc_feature (1)..(1): n is a, c, g, or t
ncctagctcattatttgcttttgttaatcatattaacaactttcaaaaattagaaataaatgtttctatattttcttctgcatttttatggttttattttgtacaacaaaatctttgatctctttgggacttttcctggtatatagttttctgataagtgcactttaactaatattaattttgctcctcttttccagatttttttcttatacgatctttgtataaatggcatgccaatcccttttttaaaaaaattctgatcatttaatggattgaattttcccagactatccactgggaaggaccaggaaggggtcaggatagctcaaagcacaaaggtctctgctgccacaaagacaaactgcttcctgcaaaaatggctccacagtgtatttcacagcactaactccactgcttctctgaatatagctgcatctagaagagcttctgttcctaacatatcccagttccctcacaaggggttgcaaacaaagtctacggcttatgtgctttaggatgagctgcttgccttcaggaagcatattttgctggcactttctgagatgcaccaccactgaaccatctcactatgtcaagggcttcttttgtacttccttctatgcaactcttcacctcagatgtttggggcagtccttacaggtatttcagagtttgtggattatttctactttttattcttctgaaaatgtaaattgtgggagagatttgagataaagagagggatttttattggtcatcttacttttgtgaatttctaggaggaaaaagtagaagattctggcttacacagccaatgatcatagtggaagtcttccaaattagttttcctttcaaccattcaaagggccttttcttctttgcaacctcacaatctgggctggtgctataatgctaagacctaagatgtaagcaccttattttagacaaggagagaaaaggaggtagtgaaaacattttaggttccagctccaatgcctaagttcaaatccctcctcttccccttagtaactgtgtggatttgagcaagtcaatgcacctttcagtttccaatttttcatatgtgaaatgaggataaaaatgtccactttgtaccgttatgtatgtagtgaatcctctgatggatacaatacagtgatgattcaacagggactcagtggcatcagcataattggtagcttctgaggatgtgaccatctctaagtccttttgtaaagaaaagaaggtgaaggcagattgtaacaatagcagtactatgcattacaggtctattactcaccaggtactgggtgaactattttatacactttgccttgtcacaatagaattttagatcatctaaagccaaaatcaacaaaaga

SEQ ID NO: 60571 - DNA, 1682 bp, Bovine  19866880563843
  misc_feature (1)..(1): n is a, c, g, or t
nacctgcatataggtttatgcattaggcataacataataaatagccttagaccatgaagagatctctagctgttggagttgctgattggaaaagtgggtttaaaatacttaatacatgcttgtcacatttattgttatataattttttttaagaagcttttctttatcttgatttgttttctttatgttccttttggatttgatagatgactcagaaagatatcacatttgttgctgaatttcttactgaacatttcaatgaggtaggaaattggcatttctatagtgctttttcaacaataattacaataaatctggacaatggtaagaagtaatcaaatttaatccagtttaagtgaccttatagcaattatgtatgctttttcaactactgaactaattaatggcagtacttatttattaaatgtaaagcatataaattgaactttgtttttgtgtcttaccatccacagaagaaaagagtaactgctactaacagctttcttaaaaaatagagtttttggttaaaatgtaagatgatttttttctttaattaaactttatttattctttctaggctccagatctttataatcgaaaaggaaaatactttaacgttgaaaaagttggtcaggtatgggctctggattgaatgtagttactaattttttaaaaattaattttaaaacattagcagtgttagtctttattatacaaaactttctgaaagtagcataatgccaaattatatagtagccctctccttttactaaaatcaccaaagaatagctttaaacttttggggggtcttcgaaccctttatattaaagttattgaaaactcccagagagcttttatgtgggttgtgtctatgaatagcatatattgttagatattaaaaattaaacagaaaaaagaattatttcttaattcacttaaaaagaacaaaccctcttttcattacatgttaaaatggaaaataactatttaacaaaacaaaattatgtgaagagtgacattgttttatatgtttgcaaatctccttgatgtatggcttaagagaaggaagctgcatttgttctgttgtgatatgttgtttgatcagaaagcctggttttacacaggtgtatagttggaaaggcagaaatattttaatagctttttagaaaattgtgaatattctttgatactacaccaaattctgacaaacagtagtatcttaggttagttctagtgtggaatctacattgcaacagtatactttccatattatgattcattaaaatttattcatctgcttttcactttggaaggatctttgttaccctgtgcttgattttgtaatatcatgtattgatctttgggaaaatactgattcactgaattacatagatcttctgtaggctgaaacctttcttcatacagtatccaaaagtcagattttgttaatatcattaccaatctcatcagacaatctttaactactatgaggctgtcaagcacatagtagcagatatgggttttccaaaattttaatttttgcttgaacatttaaattttatcactgacaacaaatactgtcagtcattttgcttaaagtgacaggatccctttctttagtttcaagaaaatatctgccccatacccaagaacaaataatcagagtttgcctgccagtcatt

SEQ ID NO: 60572 - DNA, 1396 bp, Bovine  19866880597890
  misc_feature (1)..(1): n is a, c, g, or t
natggaaataccagatcactttacctgtctcttgagaaatctctatgcaggtcaagaagcaaccgttagaaccggacatagaacaatgggctggttcaaaattgggaaagacgtatgtcaaggctgtatactgtcaccttggttatgtaacttatatgcagaatacatcatgtgaaatgccagactggatgaatcacaagctagaatcaagattgccaggagaaatatcaacaaccttagatatgcagttgataccactctataacggcagaaagcgaagaggaactaaagagccccttgctgaaggggagagtgaaaaagctggcttaaaactcagcattcaaaaaaagaagatccatgacatatagtcccatcacttcacagcaaatagatgggggggaaagtggaaacagtgacagattttattttcttggcctccaaaatcaccacaaacagtgactacatgaaattaaagatactttctccttggaagaaaagctatgacaaacctagacagtgttttaaaaggcagagacatcagtttgctgataaaggtacatataatcaaagctgtggtttttccagtagtcatgtatgtatgaaagttggaccataaaaaaggctgaatgccacagaactgactcttgaattgtggtgctggagaagactcttgagagtcccttggacagcaaggagatccagccagtcaatcctgaatattcattggaaggactgatgctgatgctgaagctgaagcttcagtactttggccaccagatgcaaagagctgtctcactggaaaagaccatgatgcagctgtctcactggaaaagaccatgatgctgggaaagattgagggcaggagaagaaaggggtgacagtggatgaaatggttggattgcatcactgacttgatggacatgagtttgagcaaagtccaggagataatgaaggacagtgaagcctggcatgccgcaatccatggagttgcaaagaatcagatgtgacttagcaagtgagcaacaagaaaaagaagatatgaagttaacatttgctaagatggatttctgtatgctccaattttagcatgaaagatgtgaaattctgtttggcaaactacatccaaataaagttatatcaaaaagctgaatttcttaagttcatttcgtgaactaattttattcagctcttgattacatttcctgtgtgtagaacatgtttcatacttggtaactggctctcatttaaagagaatgaatggccaaattaaatggatgtccttttgagcagttttcaagtgtatgcatttctgattggttttgtttgccttattcaatggagagaataattctttgtggccaatttcattttaagagggtaatgttgagtgcttttt

SEQ ID NO: 60573 - DNA, 3624 bp, Bovine  19866880608429
  misc_feature (1)..(1): n is a, c, g, or t
nagttggtgatgccatccagccatctcatcctctgtcgtccccttctcctcctgcccccaatccctcccagcatcagactcttttccaatgagtcaactcttcgcatgaggtggccaaagtactggagtttcagctttagcatcagtccttaagatcagacctcaaaaaaaaaaaaaaaagagagagagagagaagggtaaagataggtttcaaacaatatgtaaaatactatctggggcacttacctggagatccagtagttaagactctgcctttccaatgcagatccctagttggggaacaaagatcctgcatgctgtgctacagcaaaaagaaagaaagaaaacaaaaaataagcaaaaatttttaaataaaatattattttgggaaaaatatatataagtaaacatatgcaataaaaattcaaaaagaatgtaaacaaagtaacactttatctttgaatagaaggattttaggtaatttttatcttattttgcttctgtgtagtcttacatgcttttttttatgatcagcctacatctcttgagcaattagtttgttctagttttttcttcttaagagtaatttttagaatgattagaaagctgctttctaaagcattttgctggagggcccagaatttggaaatgtctctattcttttgttgctactactaaaaggagaaataaaaatcctagccaaatcctgacatttggccaatatagtttctttttttaattacattgtcagccgctgattaaaatgtaagcgcctgaaaacagaaaacatgtccttttttcctctttaatccatgtccctttgtgatgttcagtgactattcatggttctttgatttattcccgttacttctttggttttaggttggggtttttttttcctattttataccagaagcttattcatttggactcttttaaaatctagtttttgaaaaatgaaaatgaagacaagattgaaacttactttttttctttgaataaaattcaagattgttgactgaagtatccacataagcaaatgaggcaggaggggtatatttaacctacatgggaaaacacttctgaactctttacagcatcctttgtgcccagttaattaatggactgattataaatgattataactcattgagtcgatttggcagaattttctcctggcagcactgcatctcctattagtttgtgttacttgtcagtattgaaaatgacacatctaccttcctgacaaatggcacagatattcactaactcagaacctgtttagtaacctgagtgggtcttcatattctaatttttcagattttactgcgttatggaactgagcagatccctctttaaaataaaactgtgcttttgaaaatggaaaagttttccttcttgaaaaaatacagctgtagcatccagggtatatagggaagtgttcattacactcatggaattaaaaaataaggtaaactgggacttccttggtggtccagtggttaagattacaatcttccaatgcaggaggctctggtctgtggtccaggcactaagctccctggttgaggaactaaaatctcgcatcccacatcatattcccaacccagggatgaaacccacgtctcttgagtctcctgcattggcaggtggattttttaccactagtgccacgagggaagcccagaaaccttttattctggttcctattgctatgaaaccagtcctcccatacttagtgtcttaaagcaacaacaatcactgttacctctccagactggggaggctgggccgggtgaggtggttcttgggtctgtgttggctgcagtggtggccaggcctgcaatcagcctcctttcttcagtattggcagctgatgtgactgtcagctgggatctgtcctggaggaaacagtaacacctctcacttctcagaagctggcctgggaagctgcatcaatcatcacattccctccgttactcaagaggagaaagaacagacagcccctccaatcagaaggatagtccgcctcacatttggaaggcatgggatgggccagcttgggaattaccatctgctgcaccttctcaggacagaccaagggtccaccgtcgcgtccctaccctcctggtcactggctctgactacaggtggaagcaccagctgggaattgatcgtgttaaagaataactaattgcataacttccacagtgttttttttctaccaaagcacaaattctaaatctatattgtgccatggatcccttcggcaatggggtgaaatctttggattcctcagggtaatgtttccaaagtgcataaaatgaaaacataggatgtcaaaggaaatcagttatatggaaacacagttaccaaaatagttaaataacaatttagtaatagccaccagcaggtctagtactgtagtgtcaaaattctggtgaatcttaatgatattttgagatatctgtaacaattacatacgtgtgatatggaaatatctatgagttctgttaatgacactttcacaagttctgctgaaacttttgtgattggttacctacattcataattaaaggaaatgctaaatctgcattaaaggctagtgacaataaggatatgatcttctttctcatccagctttgccagtccctgactctgccctgctgaaaagccacaggagagaggctacagcagggcaagaggaagagctatgagtagagacttggctcagggtgggcagagggtgagaaagccggggctgaactgctcagggagagaaaggaacaggaatttgggtagagaagaaaaagtttctggaaggacagaaagcgagagaggatgctcaaaggcagaggcctgaggaaaaaattcccctggtgaggaaattttctctggctaggatgaccaaggacatgtttgcccttccccaccccacaaattggaactccctcccctggatagcagtgatgcaaaatggaattccatgctggagtgattgcatctgaggatggagaaggctgtctggactaagccattttatatcagggacttgggcatcgggattctggcagtcacagaaagcaaatcccccagggatactgagggtcaactgtacttgatcttgcctgcccagccagccccagccaaagacatgaaatgacttactgtggccacattgagctacctcctttccctgccaggctaggctttcttccaacatgtccaagcaggttgttgccacgacatcttcctggaggtactggtccggtcccttctgcgtgggccgagggaactaattaactacactgctctccactctctccaattctcaatcaaatgagagagccaggaatgaggagatggatatcaaaacatctgctttgttgctactaaaatctggattgcagggtaggacttaaatgtgggattcctccttctgctgactctactcctgcacaccccattttaaagctgggtatgggcagggggagggtgagtctatagaacagatgtctggtgaaggatggctgcctggcattggtctagggcaggatggtgaagggtgaggagggcagagagagctgcaaacacacacgtgtgtgtgttagtcactcagctgtg

SEQ ID NO: 60574 - DNA, 628 bp, Bovine  19866880753269
  misc_feature (1)..(1): n is a, c, g, or t
ntgggcaggcaggcaggagtgccgtgaagagctgcatgtcctgtgtgcaaagagggtggttacagggaggcttccagggctatcaggtgcaaaggtagaaaaggccatggactcagacttgccgtggccatggtgaggggcatgcctttggggaggataagaagtagggccagatcgcccttctgtctgggagattatgtctgcaattcctttctgcaaaaaggtgctgagcgtaggtgtgtcaattgggtaagtgtccctgtactgaagttgtgtcctgacatgcacgttggcaaggctgcccacttggcgaggcggcacagtccgtcctggctgctgacccatttcccagcgccaggtgacaaaaccccactgctcagactcatggctccagggataattggttctgatcaagcagttctgggaaatgatgccttcccctctcctgagcagatgaagaagtccaggaggcagcaggcatgcgacttcatgtgctgtgtctcctttctggctcgctgactttgacttccccagccgactccccaccatcccctggctgcactatctccagccagagaggacactgggcaacttcagacacaaaatcatgagcctggggtggggcaga

SEQ ID NO: 60575 - DNA, 1511 bp, Bovine  19866880764593
  misc_feature (1)..(1): n is a, c, g, or t
nctgtttgctctgtgagagcttggaaaacatatatttatgctgcatttgtgatatagagaatgttcaattgagactgaatttggcgttttgccttatgtttcaacttttcttttaaataacataaggaccttcattcatgcaaataatgctattgacgcatcagcatggtgcagcaaaagaacggggatatctgggcttcaaaacgagttgccgttctgctgcttcggtaatgaccttcctggatgtggcagattacattttccaaagatggcctcaaaaatctcacatcccctgtactcctttcaaggtgaccttgacactcttccacctaaaggaaaagttcacatcccttcctttagaatccaaatgggctgtgacttccttacaaccaatggaatgtgggagaagtgaccatagatgacttctgaggccgagtcataaaatgcaatgcagtttgctcatctgaacatttgtgcttggaaccaggctgctgagtaagaagttgactatcccaaggctgctgtactgtgaggaagctaagagtgtgcaacagacacaggtggcccctccagttacaagtcctcatctttgagttctcctggcccccatgccagacaagtgactgaagaagtctccagatggtccagctgccagtcatggagtcaatcccagccttcaagtattttcacctgagatgcactggacccaagctatccctgctacatcctttcggaattcctgactccaataattcactgctgtactattttggagaaggaaatggcaattccactccagtatccacttcccagggaagacagggaagaatacttatcttcccatggacagataagcctggtaggctacagtacataaggttgaaagagtcagacacgactgagcataatattttatgcccctaagtttggaggtaataggaataatattattggaatcagaaacagaaaatttgaaatctggaagtgggggctactgtaacaaaaaacccaaaccgcggcattagctttgggaccctgtggcaggtgtgtcccagaagcccttgagagggaggttagggacggttggaagggtctgaggacagtgctaatgaggacttaaaggaaaccaaggggcatttggaaaagactctgatgctgggagggactggggtcaggaggaaaaggggacaacagaggatgagatagctggatggcatcactgactcgatggatgtgcgtttgagtgaactccgggagatggtgatggacaggaaggcctggtgtgctacgattcatggggtcgccaagagtcggacacgactgagccactgaactgaactgaaggggcatgttatcagaaactgagggaaaagaaatccttgttatgtggtggaaatatttcagcaaaacatttccctgtgataaagtataaaagtagaaaatatatctagtaaatttatttctgggcagcacattgagggtgctgccgacttccagtgccaataaaaaaa

SEQ ID NO: 60576 - DNA, 1996 bp, Bovine  19866880853462
  misc_feature (1)..(1): n is a, c, g, or t
nctttcaactatatgcttcaaataataaaagatttattttacttgaaaacaaaaaaggcatactttacctaaatatttttgaggtattgctataactaaaaaaaacaaacagattagggtaaaaaactctcaatagaaatgcattttttaaaaacacatgagaaaattgtcaatattaaaagtaaaagaaagaaccctgtaaggttaattctaatgagttaaactgatacttacttttttggcaatgtaggaagtttaggtaagagaagatttgattcatcctcagaattataaaaggatgttagaacactacaaaggggaaaataagacaaaaataagtattataaaaacaaagattctacttctctttccattaaaaaatattaatttttaaaggcccaattttacatatgacacattaccaaataaaatagtgacttttacagtggtaaaactgtgtatggcatttaacaatcacacacaagaaatagaaaagttggaaattcttcatttatcttgaactttgtttctgaaagaaaaaaaatcagcctacccactttatgttaagaggaacataaacaattttctcagcatatgaaatgcatccatatgtattcagtatcagtaccagatatggactgagaatttatgattccttatctttcctctaaaaaccaacactgaacataggagtaccaagagtacttttaaagaacactgcagttattacatgatgtaatgatgggttctatgacttacacacatttggagacgtaacaatccagttggtgtatataagatgacaccaagtattttgaaacagttttatttatcctcccatttttttcaatcctacctccaaatacagacggaaatgaataaggtgaaaagtggtgtcctgaaagaccctggaatctccatataacatttctgaactcttaacagaaagtgtgttaggaatacacttagcaggtaactggactgggacagaaattacatggtatactctgttcctctataaattcacatgaccacttgcaacctttattatttgatgatggattgatccttgttttatctacagtgaattttaaaccccaggctagaccttattatctaatatttttacaagcccctcctgaggaaatttgtgaattaataatcaggatttacaaattcatttgatattaacttaaaacctaattagaacagaaaagctaacaagaagaaaatgatcttatttcctcaaaaaaaaaccaaaacaacttttcatggttcagtactcactaagcctactgaccctttaggctatctttactgcaaacgtggcagagtacttgatttcagactaaggcaaaactatttgcacaaaataaggaacctatagggaccacaaaaacaaaaagaactcattcagcatcaaaacaaaatgctcaattcagcacttttcatcgtcgaagaacatgtactcagacacagaaacacaaagttccaggatgaaatatatggtgaacagaaaaacagaaccttaattcgctaatcagcaatattaactaatattacttgaaactataagtcattgatataagcttttaaaaataaccaagaagaaaaatcttggccattcaggcattgctgctccaataataaaacagatttttttccagaagagaaagaaatctagcaaacattaaaaaaattcatcttgataagcttaagacaaaaggttaaaagcaaatacacatactcaatactcagatacacctaagtttccactttttcatttaaaaaatgaaaatttcatgaacatcctactgggaccactggggtttttctttatcactctacctgctctcaacagtcacttccatccaatgcatacaagaaactggggcctccacaggaaaagagtgcaagctttcaggtttttctacatcacacaacacaattttcttggtatcagcaagagcaaaggccaaaactaaaacaagaagaa

SEQ ID NO: 60577 - DNA, 2352 bp, Bovine  19866880853669
  misc_feature (1)..(1): n is a, c, g, or t
nttcaagatggaaagattaggaaaacatttaaggagcagttttcatttttatatctgctcagagaaagtcatttcttcccttcccgctttgtattctcccaactcaaacattgctgatctgtgatactctcgctttgaacttttcaaggtacctaagctggggacccaacaccctgaatctaactctgccagaaatgacgtgtttgccaagttctcagcatttataaaaaacaccaagaaggatgcaaacgagagagtccctcccatcttcctgttttctccatggacctccattctgcctctggtgtggcttcttatgagatgtggggaattctgcctcactgcacagtggggagggacctgtgtatagaaataaggaaaaagtacctcccactctgagcctgcacatgggtttcagggactgagtgcttttctagagattgtccagaaaaggacatttttaggagaaaatcatcaccaccagtgattcctctcccatggaattcagggtgaatgaaccttctgttggtgcttccttcattatgtgattttcacaaagatttttttttaatttttaattaaaaaaatttttttggttacattgtgtggcatgtgggatctaagttccctgactctgaattggaaatgcaaagccttttttagttttttatttttagtggaatataattgctttaccatattgtggtggtttttgccatacatcaacatgaatcagctatgggtgaacgtgtggataaaccagttttctgagatctttctgttcaatagacctatgtccttggcctcctgttaatagttttatccttttcccctactttctccaaggtacaccaattaagaattctggcttgtaaaccattggtataaatggtttctattatcttgagaaaacctatgggaatggagcccctcatcttattttggagtttattccaatattctagcaccctgatagtaaataagttctttcctgtgctcatctagaatgttttcctttactgtcaactcattttctcttaattaaaattattggccatggaaaatcattgctcatcatcctctgtattatcctaagagacaatgcacaagatctctttttgccctattctaatttttacttgtgaaaaaatggaagcttacttttcatttctcatcatttttggatgctgttcagcaattgcatgtgattactgaaatgtggccaaaatgggaccccatttaccagatctttgtagagatggtagattttgaaagattgaaacaataggagaaattaaacaggaaatgacagatttaactgtctaaaaattttcaattgcaattccatgaaaattaataaagttggctaggaaagtatttgcatcacattaaaatagtaaaaataaattcatgtctatacaatataaagaatttacttttacgaaaaatctgcttatatataagatccaatttttaattaataattgtgttcatttaaaaatattttggttattttcatttaaaaccatctttttgagtaacatcaagactcctgtagatacatgaatcatgaatagacaatattcttattagccaacagtcacttttcctcaaaatatagttgacatgtcatatcttggcagtcttcaagaagcttcaagagaaagcaagctcttcttcaaacctgtgatcctatattctgtgacacactgtactgcatatgttgtaatagtcacaatattattctgcaattatttataagactgtcttcttcctggaaatcttcataagatgtcagagaaggaacaatgttttgcttcattatcttttcattgtctaacatgctgtatactacatgcagtaggtgcttcagaattgcttatagaatgaattaattcatgttaacataaatgtaaatagtaattatagaattacagaaaggtcttccttctcaggctcttaatcaaaggtctacatatataatgcaatattattttttcaaagactttaatgtgttggtggacatatgttctttttatctaggaatttaaaaatatgaatattattaaaagaaatgaaaatgtaagagtgcgcctggaaataatttatccaagtattacaatgacagtcagtttacagggttcttaaaaatgtaatgcactcattctgaagtccatctagagaaatagaggtaagagaagagccagataaaaagaaataatgaagggaaatggcatatcaaatatttaaatgtttcactaaattacactaattaacatgctatggactgttatggaaacagaaagattctattaaagaaatagactgagaaattctggggttatcagaaga

SEQ ID NO: 60578 - DNA, 987 bp, Bovine  19866880853946
  misc_feature (1)..(1): n is a, c, g, or t
ntgccaccttactgatgttctcaccagacttacaagctttagaaagccttcactaacatctaactggctctgatgcttgctgtaataaccaaagaaaaattattcatccaaacctcaaaggcacttggtttgaatggctacaaattggattctctggggggaaaaaaaccaaaacagtcttgtctcttttttttttaaatcagagtttgccaatctctctttgaccacatcaccctaatatgccactcttgtggttggctgctggtcaaatatttctggcttcccatcgtttcctttcttcattaactcagtgggtgtcacaagtctggaattcattctgaatatgccccaaactggcctcttgaattcaatcgtattcttgaagagctgcctgtggatatttcatgcagtttcctaaatcagctgaaaggccctcatgatgctggccatggtgtctgatgatctttgccacctcctccccaccaccagggtaatggacacctgtgggatatgcgtcaccagttattaacaatcccttctcatgacaacaggacacaatttttctttgaagggaatgatttcttcccaacattcaattcaattcaattcaattctatgtggctcatttgatgaatactctcattttccattgcacatggctctagactagagcattccagaacattccactctcctagccacagtgactggttttgtggtgaatgcaccatccaacacgagcaatcagggctaacaaaactgcttgacaggtcttatggttaccatatggggaagcagtcttaaccttctactcgccaaggagttggggtagtgtgagctggagaacccacacaggttgcccctttaggagaggtgcccctctaggagaggaattcgatggtgttgtttgggcctcagattaagtcacccagtaaactcttcagttttgtgagacaataaattccctttctttgtaactaaccagag

SEQ ID NO: 60579 - DNA, 892 bp, Bovine  19866880965546
  misc_feature (1)..(1): n is a, c, g, or t
ntctgttgtgtttgctgcttgggggcttaattctcactggtgcctcagtttaagcattcttactgcactatctggagggcaggcaagcactagaatatctttggcacataaaagagaattaaaatagaatgacatttagatgtacaatcgtgaatcatcaccctcactgtcagaatcttctaccttgtatttggcaatgttagatttcaagaggttgacctcttcgtgaagttgctttaatctctcttgaaggtacctggaaaagaatacgtacaactagaaagagtttgggagcaaaataaaaaccatacactcaacaataagggggaaaaaaggaaaaccacacacctgaagaaccaccttttacatataatgccttcctccacccaaaagaggtaaagtgcatcttggtgacctcttcttaaatggatgcgatgaaggtcaaatattcccaagtcacctaaacctcacttcagaacagccctctgcagagatcccctaaggggtatcagcacagttttcaaataattctcattaagatgaattccactgggaagcaaagcaggaagaggcgacaccagacacgctgttaagttagtcatattcagacacggaaatttgcctccaggaaaagaaacagctaagggaattcctcaatttattttcttattcttttctgtcttcttgatagcaataacaagcagcttccactgttccctacccttctcacccaaccagagaaggcagggaaagactgcacgtatgtagcctgtgagcactttggttgttcttttcgtactttgacaactaatgggtgacattaatatcattgctttagagttgggactttcctttcattgtaaggcaattttatcaaatgtaaatagggctg

SEQ ID NO: 60580 - DNA, 829 bp, Bovine  19866880998476
  misc_feature (1)..(1): n is a, c, g, or t
ncaagtgcctttgaataagcaagtttgggaccagcaacctgcatatattagaatgtcaacactgaactaaattagggtcctagtggaaaaacttgctagactttcaacagtggacatagaaatagattagcaggcaggaaggaagggagaaggaggaggaggatggtaagaaaccaggagaatgacagagtgggaggagaagggaagaaaaaataggccagggcttatgggacctaaattttaccttcttattttctagtggaactcagacttttttcaccctcctctcatggtatttttgacattaaatatccaatctcctcggccccatatcaacttgagtaatataccacaaccaaggttggctgcgtctgctctctcccctactcaattcaagaatgctcctaccatacattactattggggtttaaaaaacgatttattttgctacacaattcagacctttgaaccacgctggatgctgggtgctttgttgacatagtagttagggataaaaggagagtttgggggattgtggaattctgactttctataaatcactaattttattgtagtaaatagaggtcacctcctggaacttcaatagcctgccttgaaaaatggtatgaaactatcaaagtccatcaaaaggaaaaataggacaaatggagtagaggggaaagaatattttctcactttcagccaaggccatggcaagaatatggtcagtacagtcagagctacttttaagaggttggcccaaaactttcccttgcttctttgagcatcttgtctattagccctgcccttgatgagaagctaaagataa

SEQ ID NO: 60581 - DNA, 1216 bp, Bovine  19866881013446
  misc_feature (1)..(1): n is a, c, g, or t
ntgtttttaggctgaaaaggggaagggagaacattctcagtgtttgttgattctcaattgccttcagatcaaaataattctcatggcagaggagtatattttggggtgacatatactgatctcatgtccaacttttcatttcttatatcagtgagaaaattggtaaataatggatcttgtctccccacctaaaagatttagggctgcttcttgtaacagatatcctgaattcccctccttgtaaaccagtcttggttacttgatcttagaaaacaggggtccttcaaagagattgtcattgccaatgtgatataccattaaaataaaaaaaaaactcccaccacttcttataagtttaaaaaatatattgcatctatagtgtaaatttctatgtattttctgacattgatgaaggaattcaaacacagtggtagaggcaagagccagagtttaggatgcagcaggacttgaagaaagcaacgacagctccccttgtccatgtgaccagtctgcctcactgagaatttctgcaaaaataaagcagagtttggggcaagatgcacacagctctctcaactcccagacctctgcatttataacaactgtcaggatgtgtagtcttcatctctgtgcagagagaatttccacaagcatcatagtccccacaccaggggctggccttggctggcacttttgtgaacatccattgtaactgggggttgactggatccttgacaaaggaaagtgtgttggaatagacagctgtaaagtcctttcagcctcgggtctcccagccatgttttcagcacatctgtcttctctcttttctgcatcacaattttaatatagaaactccgaactagaagagtgacttaaatatatagcttctacaatatactctggtatattcagcatcccgctattatcagagtgaaaatgtcaaccttttaacatcagccctggctatatctgaatattaaaagaggcttcttttgaaaccttttcatgttttgctatttatgctactccctgccccagagacttagaggaaataatcgctcggttttgttttcttccctgtgaaatcctttccagtgttagacggtctgccactttttccctgacatttcctttacatcgtgcagctattctaaactgatggtcacagagtccttctcaataacacagagacaaacgctctgcatagctgataaat

SEQ ID NO: 60582 - DNA, 736 bp, Bovine  19866881022761
  misc_feature (1)..(1): n is a, c, g, or t
ncctttcctgttttgaatgatgaagccgcacggcaaatacccttcggatgagacattaagcgaggtcctttcagtttgtctctggggactgtcaaagtggaaagcgaaggttccggcactctttctaaagaactcttttgggagaatcccatcttggtgaatgtctcctttcttcaaaacagagttcgtgagcctataatggtcagaacaatgacaaccgctcagctaagagccatctagctgactgccatgaagccctatactaactttgagatattcccagggagacatcaaggaaccaagacttttcatgaaaggattctgatagctgatcactggagggtccagttgctattgtggactgtctctgagcaatttcattgtctgcaaattgatgaataatacccctcaaagggtggtgagcaatgaatgagataatccaggcatttgatcagtttcaaagccttgttcaaataaaaagtgttattattcataatgtataagaataatagttcagctccaccttttcactccatttcagtttttcttgtttcagcttcaagcaacagaaattgtctcattctgctggtattttgtgttcttgctggaagattttgggtctccctggtagcttaaacagtaaagaatccaccctgggttggatccctgggtctggaagatcccctgaagaaggatctggctacccactctctgctccaaatgaagctgctactaa

SEQ ID NO: 60583 - DNA, 853 bp, Bovine  19866881050766
  misc_feature (1)..(1): n is a, c, g, or t
nttctggaggctgggaagtccagatcaagtgctgacagatccagggtctgctgagagaactcttcctggcttgcagatggctacctttccttgtgtcctcaaggaggcggtggagaacagagacagaaatctcgtgcctccttccctttttataaggatactaatgctgttcactggggctgctaatgagcaaatcacctcgcaaagcccacgtccaaacactaccatgttggggatgaggtctcagcatacgaatcttgggggatcacaaacattcggtcaatagcagctatgaacctggaggagcgcttcaaaccttcagcccagtaagatgaattcattgattaaagcctcctctattgaaaagacaaaacaacattttgaaaaccagtactctgatccatctcccttacttcccagcgaggaaagtgaggtagaaaatctgatattgagctgatccacattgcaaatctggaaccttaactacctgatggctaattcctaatttgtcctcaaggatactcttctagctttttcttggggccatacttcagagtcacatgctcctctaagcactggtgtttgtaaccacttgctgatttttcgtgagaggtctcttaaatcacctgctgtaacccactgcctggccaggctgatgcctctgaatttacggttccagttaaagtcacatccatgaagggggagggaatgaacagctctcccatcgcttcaagcccccaaattgatttggcactcgaagtcactgttatattttatactgagtcttctgaatcagttcattgaattttagctgtagctatataaaatcctctccagtgaaattatttggcca

SEQ ID NO: 60584 - DNA, 1706 bp, Bovine  19866881067956
  misc_feature (1)..(1): n is a, c, g, or t
nttataatggagaaactgagacagtgagaattttaacattagcctataacagatcagtgattgcctggggttggggtgaactgagaaagacaggaatcttttttttcccccatttttgctgcaggagaattttgatcgtggtgcttggtaatgcaagagatgtcacagttttttacgtcaggtgttgtactgtgtacagaaaggttaatgatactgacctacttctccagtagtattatgagacttaatgcttagaagggactttgagatttaggggtaaaaagggcacatattatttgcttagagtaattatcttacagatgtgagcttaaagagcttttaaaaaaatgatatccatttctatattcagaaacagaaaaagtgtagatgacttccacttataacacttaatcttcagggcacatttatgtaaagcccaaggaaattcgatttttgagatatgttactgtaaggataaaaatatcaacttccataagtaatgtcttattgatatcagaggtaatggtagtgacatagtatacatttataataatggttttctgttatggttgatattttttcttcttactgatcagtgatttttttttaaaaactgagaatagtgctgaaaactgtttttgttttttttaatttcttttggttccaaagttagaaaaggatttcatactttactgaatgcttggagagactattacagtttgtggtaaggctgttatgaccagttagaatctgagttatttggtttatttttgaaaagaatcaggatttgctcttttgagattttatttttagctatgtgtttgatttgttaaatctgttctaaagctttaaatgtcatccagataggctatactagaacagtaaggattattatattccatagtaattgaacaatgatatatgaacctcatgtaataatttcatttctgatttacttttatcttttagagttatagatagcagtatgaaaaacttcaaagcattttttcggtggctgtatgtgggtaagttaattgaatgaagcattcttgtatttttaacacttttgaagaaaaaatgtgggaatataaatttggaatattcaattacactagtaaaattttaaatacttgtcaatgtagaaagaatagtttaaatgaccccacttacacacttcactcagtttaagcagttttcaacacatggccaattgtatttcttctttataccctcccattcccgcctccacagatacaacttctaacattgattgtctctatcacttactgataattgacctttttttttactctgtaatgtctcttaaggttcaaataacattttttaatctctactttgtattaggcactgttaagtgttagatttggagtggaaagggggagagaaaataagacaaagcctctgccttgaatagttgaactcctgttttatactttgatcttctgtctgtagatctgtgccgttcattatggtagccactagtcaattatggctgtttaaattagttgaaattataattacatatgcaattccttagtcatgctagccgcatttgaagtgctcaggagctgcttgtagttagtggctgccacgttggccagcacagaactagaacattgccgttatcacttctactggacaatgatgccctagctaaatagattgcaggtgcacagagtcggaca

SEQ ID NO: 60585 - DNA, 1546 bp, Bovine  19866881151246
  misc_feature (1)..(1): n is a, c, g, or t
ncttacaccagaatccacgcgcttctctcacttttcggcctccgcttctccccttgctgggcactcaacctcccgccaaggccctcttccagaccccgctgcccgagaagtacctagtgcccttggaagcgactactcctgccgcgccctcccccactctctcctccggatccaggccttaccgggagcccagaccacgaggtccgcggttccctcccgtccgctcccctcgaagtgactctcgctcgactccgcccggggaggaggcgccccagtgaccacgccaggcctctccgctctcccgactgggcgggcggcggccgcgccactcagctccccgcgcccttgccgggccgaacgccgggagtggcaccgctctcccgtgccccgccgccaatgacccaagccgaaagggaaacaaagcgtcgggccccggagtccgctcggcctggccctccctggcccgtctgccgccgggaccccaacaaagcccgagcccttgcctcgcgcccccggcctggcttacccatcggtccccgcacgcttcttgccggaggggtaatcctcccccaggtccaaccggtgtcgcttagacattttcgaactcttcgagcaggcggttatgaaggaaggaaaaaacaaaccctggcggctctatcggcgcagtcgagggcacctactaaactctggaggacccccacccctcccgctacaacagcctacaccgtgcggccggaaccaggagctaaaatggcggcggcgacgagggctgggcctgcgcgcgcgcttccgcggtatgatgtgcgtgcgtgcgtctgtagtgcgcgcgcgcgcagcggaggcgggaactccagccccgccctctgcctcgtgggcccgcctttattcctccgtgcctgtcttctccctcttgccaccactttccgccctcttgccaccactttccgccctcttggtgggtactaggcgggttgagcctttgggtctttcatgcccctctgattttggaaattgagaaaagagaaagtctaatcctgggtaggtggttctatccatctgtattaccctggcattagggggacagagctaggactggaacccaattataactccaggtctggaacttgaaactgctgagctcagctgcagtgaggaaactgaattgagaaaatttcaagacttaccgtaatcagttttgcctttaaaaaaaatttttttttgtatcagagtacagttgatttaacattttgtcttagaaaaggacaatatgcattcagtctatcgatgtttttactggaatagggaaagttggcaataaaggtgtaactttttcttgcgtgcctattatggagaaggcaatggcaccccactccagtactcttgcctggaaaatcccatggacagatgagcctggtaggctgcagtccatgggatcgctaagtcgcagactgagcgacttcactttcacttttagctttcatacattggagaaggaaatggcaacccactccggtgttcttgcctggagaatcccagggaaggtgga

SEQ ID NO: 60586 - DNA, 815 bp, Bovine  19866881168175
  misc_feature (1)..(1): n is a, c, g, or t
ncaccaaagcagcaagataccttacaaaatgaggatgtttggacaaccaagttatttctcctatccaagtactaaccaggcccgaccctgcttagcttctgagatcagacgagatcgggtgcgtttagggtggtatggccacagacccaaattatttctcttgggctacatcttggtttcaaaaagtttcctttggtttagatttaaaaccatttaagatcctagtgacattctgaatatgatttatctttcaaaacttttatttgcattctcaaatgaaaggcaagctggcgtgctgcaggccatggggtcaacaaagtgttggacacgactgagagactgaactgaacactaaacctgagggaaaaatcctttctacagggaagcccaaatacaattctgaagttccacaagttcacgagctataataccaactgttttgctgttatactttccctaagcctaaagaaatcctatatgtagtagctatataccagtacaaaattaaataatctaaaattaaaagggattacacagcttcctaatttggcattaccaccttaataatgtgaaaactaagacttagaagagttaagttagcaagtctaaagtcaaaggagcttaactaaaagctgaaatggaggggagggaagcagtatgttttattattaaaaacattagaatcttatctccttgattcaaacttcagattaatactcactgggaaatatcagtatgtcttcttaagatgcacattttgtaaagtgaatcttctaaaatagtaaaaagaagataatgtagatttgaggttttat

SEQ ID NO: 60587 - DNA, 533 bp, Bovine  19866881187530
  misc_feature (1)..(1): n is a, c, g, or t
naccccacccatttcaaaccctttcctaattttgaccaacaactttaattgataatagaaaaacatcttatctctaaataaaactaatgctgacagaaaagaccgatgctgaaaaccagccatatggctgacatgaacccgtgcctggccacatttacagcagtgtggcttccacagaaagagacactgaaaagcttgaggacctgtgtttaacaaatcagactctgctggcatcatcagaatattcacagtttgcaaccggatccgtgtcccttctcacttgcagacttggaggtgttttaggagaaagtgacttcttcgctgagctgttctgatgtgtaattctttacgtctggagtaccttcgacatggcatcgtgcctgatctctttccgcttcatgttttcacagtgctccttgtgcctcctccaccctctgcagtgtccttgtcatcctccagggtggaaactttggcttctggctggctggactcagaggagtcccggcaagttttggggcagggcccgtcggcgg

SEQ ID NO: 60588 - DNA, 791 bp, Bovine  19866881221553
  misc_feature (1)..(1): n is a, c, g, or t
natgtaggctctgaaacagtaggtctggggtaggactctgcgtgtctgacaagctgccaggtgatgctcccactgctggtccacagaccccacttggaggagcaaagttttagggaaggttcctctcccaacaggttggatctgagcagaaggagtatgggaacctattaggaactaacatacactatcctggctgaacagatctgaatagttacttttttaaaaatcaagacttgctttagtcactcatttatacattcaagaatctcattgtaaacacaagtaatggtctcattttcagatacagtacttactgtggtcaatgagttctcaggagagttgtccataactaaaacacaggctttagagtatatatgaaagaattaaatttttgttcctgggggatttctgtggtcatccaaagagctaaagagaaagaaatggcttattttgaaaggtgagatgcaaatctatatcagaagaactagagatctggagtgtagggacagaggtcaagctctgtctgttgaaggagaccacagtcctcttccccagggaccagcctgtcagttgtcacacccaccactctctttgcatcatctcctcttccgtcattcttcccacccttcatcttagctgtttcattgcagtcttatggtccatctgatctcatcagtatttcatctcttctagagtttctcagaatttttgccagggttcagccatgtttaaatttcttaaaacttttaaacatttgattgggtaaataaatgttaaaaaacacatagtta

SEQ ID NO: 60589 - DNA, 1236 bp, Bovine  19866881232458
  misc_feature (1)..(1): n is a, c, g, or t
ntcctcccctgcctccttcttatgactcttcctttggcttcctacatccccactggctcttgtgggatatagcttctcatctttgttccttacagcctcaataattgttggattggttgaacttcactgaacggaccctgtttttacttctactttcttgatctgtgtgttctgccagctatgaaggctctaataagcctctcctctccctgggctgtgttacatcacattcagtggaccacctgctatatctgttcagtgtgaagccaactagaagaccatgtgtcatttgaaggatcttgagttatattttgcaggtccagctgtggctgcatccatatttcagttatgcatagttttaaagagaacttgctttaggcatgtgaatgctggttttctagtgtcgtgagggtgttattggttaagaacatgaacttgggaggcaaaggttaatctacctgaggcataggttaaaaatccatgctcatcaccagctgagtccagcatgtggttttggttacgctgactaatttctatgcctctgttttctaatgggagtagagggtgctgggtgagaacactgggggttgggaaaagacagatttaggatgagctgtgtgtccttagacaaactgcttgacctctctgttagggcccacatatataaaaggaggataaaaatacagtctacactgcagagttttgtcaggtcagagaagaaagtgtacttttggtagatgtttggcatgcactctgactcagacctgggattcaggaaagattaattgctatttgtgttaaccatagaatagttgttattgttattgatgatgttattgttgccattactactaccacaacttctactgggtccattttactacctccagccctgcatcagatgcctgtgtcagactaaagaaaaaaagcagtcagcaccgacaaactaaggcaaggtccctgagagtagattgttccagacgccagcaaattcacgtttctgggagacgtggctgcgttatccaggaacatcagaaaaaatacaaccaaatgtctcttcaccacgcctttgagcgttgccctgacggcatctttcattgtacacagaagagttaagccttatcttttgtttccaagaagcagccacatacagatgatctgatcattctaagaagcaggcatcagcttgaacaccaatgtgattgcatctcaaacccatcagctggtgaaaaggga

SEQ ID NO: 60590 - DNA, 824 bp, Bovine  19866881241734
  misc_feature (1)..(1): n is a, c, g, or t
nctgaagtctctgtcccctaagaaagtaatgggattgcagggggcagatggctaaaggtcttcttatgaccaacagagatgtgaggtggtggtgtccttcttactgctctggggctttcttaggttaagtgtaacaataccgatatcaactggaggctttgcaagagaaggagctgacactaatcctaaacttacctttttcttactgttttccatacataaaggaagtactttgaagttgtatcttttcatatgtaaatcttatttttacttttcattctagttaactttgattactcaatatgtttatatggtgtcattcatagaatttccagaggcttaagtcctgaccattgatgtcaagaattttctggcactgtgaaccaacctcacagatttttctttttccatgattacctgttttcagggcctagttatatttgtgaataatcagtaccataggtaattgtgactttagcgtaaactaatgatatattttaaatgttactgcatagaatgtcaacttgacattttcattgtcagtttttggtttggtaccagtataatgctatatatatagtattttctcggtcatgataactttgatataacggaacttacttaattctagcacctacagttgtttagatgcccagttttatgacgatgaaacagtcacggtagtccttaaagacactgtaggacgggaagggaagagatagactcttggtgcagctgccactgtcttcagtgtacaacagtgaagactctgcagaatatcaattcactgggacttactctataaggtaactcatattagtaag

SEQ ID NO: 60591 - DNA, 780 bp, Bovine  19866881309561
  misc_feature (1)..(1): n is a, c, g, or t
nagggatgaaagggcttggtttggttcctgtggctctgacttgctggggagctgacagcaagcctcccggcatcttcccgcactgccaacgcctcgggagcagcacaactttcatcttgcttctgagcctcccctgaaacagacagcgggtgggggcatcagcatcagacctccagctggaattcagccctcacttcccctctcctcccaacctccagcccactgtggccgggcctccgaggtagaaaatgctgccaaaggcaacacagggcccacaaaaaagaaagcagccactctggtgactcctgtcattaattgaaggaaaggggtcacgtgggccgtgtctgtaacccctcctttccaggagcctggttatcacctgcttcgctcactgatggtgacttcttgagctcatgaaatatttaaactgaggacaaaggttttgtgcgttgtgtagctcagggaagatctggggcttttcagtaatacaaagtggttctggcttcttcagtgtgggaaaaaggagtagttaggagagattgagtgccccccgccctcaatctccatcagcacctcattctttgatgccaaccactggtacttcctcaattttaataaaaggttatatgcaaaagcagcttcaagctccctacccctcctaactaaactgttctccctaaacttgtataatagaaattctccagctgcaactagagggggatgaaagagaacgtgggcccctgagaaccagcctcctgcccccattttcctatttgcttg

SEQ ID NO: 60592 - DNA, 1707 bp, Bovine  19866881358223
  misc_feature (1)..(1): n is a, c, g, or t
ncgcctaagtgactgaacaacttgtgacctatactcctgccccctcctgggcctaacaccagtcaaaagtaacagctaggcaacaacccacgcacagcaccaccctccccccaccccccctctgtattcatgacacacctaggactgtttttgcaggaatttttcatccaacattcaaatatcaattaacattaatgttcagctgaagaagtttggtcaagcccttcctgccctagatttgactgggattgggcaacccctatgtctccctggatcagttgagctcacatgcagcccaccccaacaacatcaaatgcagaactcaaggagcagtgaacacttgctggtggcaggaagcaggcggtggcggaggagggctgtcagccttcaaatcatcaaatcaaatcaaatctgtatttgatcattcatccatccaagacatatttctccaaaacctcaaggtacagggtggtgttggcctaaagtgtgaatctggtaacaggtcactctgattctgcacatgctccttccttttctagaagatccttccacctcccactagcatcaccctgtccccacctgcccagctcccctccatctggtgaatgtcctccaccaaggctaagttcagacacatttcctcttgaccacctctcccagtctggctgcccattccctgtgttcccacaggaccccaccctgcaattagctcagtcctgccctgggcctgctagatagtaaccacctgtctcttggtcttcctttttctctagacagtgaccttcttgagggcaggtactggctttttctctctatttatacagtgccaacccagtgcctcaaaatggagttaaagtttgataaatatgtgttgcctctttgtgtgtccattcctcacactagtctgtgagctctcacaggtgagaactctgttttgatcataaatcatatcataaattaagatagattaagaaattgagttaaatagagaagtgccctggcctcgggtacagcaggaagagttgaagaaccatgtacaattgaaaacagaagcagtgagtgaaaatctacttattgaacaattagaccatccttgtctttcaccctcaagctcccccatatcctcagcttccaggacatgggcagtcaggtgaaaaaattttattcttttagtgtaaaactcatggctcagttggtaaagaatacacctgcaattcagtaggccccagttcgattcctgggtcaggaagatcccctggagaagggatgggctacccactccagtattccagggcttcccttgtggtgcagctgataaagaatctgcctgcaatgcgggagacctgggttctatccctgggttgggaagatcccctggagaagagaaaggctacccacttcagttctctggcctggagaattccatggactgtgtagtccatggggtcgcagagttggacatgactgatcgagtttcactttcactttcaaagctcatttatacatacagtacctaaacggatgtatatttaagatatgaaaactgtacagggtagaggcaactaggaacaaaatgtctataagtcttgctgcggtggggaagaggtggtgggtgataatgaggaaaggttgagaaacactgggttagacagggaagacactgacaggagactagggcgagaagccacggagtcggaagccctttct

SEQ ID NO: 60593 - DNA, 1264 bp, Bovine  19866881394905
  misc_feature (1)..(1): n is a, c, g, or t
nactcagtctcaagccaagattaactccttttgcaccagctctcctttctctcagctaagtcatcattttccagaaaagtctgatttttctgactccacgatttaacccatttgaagtcaaagaaaatgctgtaatactgaaaacaatcaaactagagatggaaattagtgttgtggaagatacatgtcaagtgctctgcaaaggtaatgagaaacttgcaagaaaacagattttaaactctgcctggcttccttagttactcggtatacgataatgttgctctgattactagtcaggacaataaagtgctcaaaggcactaaaatatgcatcttggggggaaatgcatggacattaagatttcctgggagttggccaaggcatttttacatccataaggactgtcaacttaaacttggtctgtcacagttattaaaaaaaaggaaaggagtggaattcctgcttacaactgggtttggcagaaacacatctgtatactctgcctctgtgatcacacaggcctttaattagggacaatgagtgtgcccacagagcagcactaatgaaaaatttataaggagtctatgatagagcttcacaatccagctttactaggttgtaaacactcttcttacccaagcattactttgtgtatctgtgaaacatctgaaaaatacttttctttgacttaccaggctgtagggaatgagtcattttatgtacaagcatctacagtagaacttggtactttcttgcattaactgaacaatgttccaactggaacctaaaagaaggttgccaatgctcacttttcgaggctctgtgaggtgctggatgctctagatcagtttgtctgtggaagcttctctctttggcatgcttcctctgtccatttagtaatttgcctggaggtgacgacgtagctcgtaactgacattcatctggggatccttttagccaggttggcctcatttgttcttgattcacctctttctgaagctgcaatgctaataacctatcctgttcttcttgtttatgtctcgcaaaaaatagacgttccaaatctaacagttttggggtgaagtgaacttgtttactcttgttcggaggaaactttgaggaacattttccttctttttgtagaatagcatggattgctgactgcttcagacaaagattcctggttttttgctgtggagatgtccttataggtcagtaggtgagactcctcattttctgtcacagctgtgttatttttcagtgt

SEQ ID NO: 60594 - DNA, 1255 bp, Bovine  19866881423979
  misc_feature (1)..(1): n is a, c, g, or t
ntcacatgctctccactcatcaggatgtttaaaaggaaaagctagaccgttatcaattgcagctattttaataagtgtttctttatcatcagtccattttgtatcctaaaagggagaaaataattgataaaacaatttacatgcatatttccaaaagaaaaatgtataataattattgagctttaaagacattttatctgaagagtctataaaaataaagttaccaaaaagtaccaatttaccatttaagggaagacagggtcttaagaaccagtaaaaacttcataatcactactttttaaatttgctattacaaagttatacagtaatagtttcattcttttcatctttggggaagtaggcttgacattattaagacttcagaatgtgtagttctgtataacaggctctaggttcatccacctcactgcaactgactcaaatccgttcctttttatgccaagtaatattccattgtattacacacaccacatcttctttattggctcacctgtttatggacatctaggttgcttccatgtcctggctattgttaaatagtgctgcaatgaaccctggggaacatgtgtcttttagaattgtggtttttctcagggtatatgcccagtagtgggacagctgggttatatggtagttttgtatagagtgaggtaagtcagaaagagaaaaacaaatatattaacgcatatatatgaaatctagaaaaatggtactgatgaacccatttgcagtgaggaatggagatgcagatgtagagaaaggacttatggacacagctgggtaaggaaagggcaggatgaactgagaaggtagcactgacatgtatacactattatgtgtaaaatagaaaactagaggaaagttgctatataacacaggaagtccagcctggtgctctgtaatgacctagaggtgagatgcaggggaggggagcgaggctcaagagggagaggatatacatataattatgattgatttgcgttgttgcattgcagaaaccaacacaacattgtaaagcaacatccctccaattaaaaatttttttgaaaataaatgttatgaccatgtataccaaaaaatgttaattatgtgatgggacggaggtgttagctaaccatactgtgatggtcatttcacaatatatacttatatcaaatcatcatattatacaccttaaaactgcatgcatgtcaataatacgtcaataaagttggggagaaaaataaataaaatg

SEQ ID NO: 60595 - DNA, 811 bp, Bovine  19866881453043
  misc_feature (1)..(1): n is a, c, g, or t
nagatctacacatacaaaaaggtaacttgagccaatataatctatagtatcatattttctaaaataaaaacaggattgtctctccttctataagatctctaggagcatcagttccctaataagatattgattttaaaatattattgaagtgacatcagcaaaatggcagaataggagttttcagtcaccatcatcccacttaacatcaaattttgacatttatccatagaaaagagtaattttatgggagcccagaagtatgcaggtaagttccagcataccactagaacaaaaattctgagaacacattgaagaggattaagaagaaaagtgtcaatttacctgtgtcatccttcccccaaggcagcacaattcagtgccaagacagactccttcagcccatgacttcttccacagggaaaagcaagaatgtagtgagtgagtgcctggtttccctcgctgtataggttgcagcctgagaggttcaatattttctcacctcactcagaattctcaggtgactggcacagttaaacgcttgggagaggctgagagcagagaagtgaagatttcagacataaggatttggaactcaaaaagggccactgatgttaatacttgtttcatgaactccatcagggaacctgcccacaagccaattgggatgccatctggtacacctctggtttgtggatgcctcaaaactctgacaatctcacccccactttgaccctcttcccatgcacatcccccgccaatggtaagtgtgagcctttgcagatgactttgcaggattgagagatggcataca

SEQ ID NO: 60596 - DNA, 1436 bp, Bovine  19866881515241
  misc_feature (1)..(1): n is a, c, g, or t
ntggaagagaggggggaaaagaacaatttctttatgattacccaaggagtcagagaatgtgtgtgtcaggaaggtggttgattacttgattttgcataacctaattgagattattattatttttaaatgtgggtttgttgtgctaattaactataaacatatggtatgtaaaatgcatgctgctagggtaaattaatgtacctctaacatacatccatatttcatagcttcatccacacaaataaacctcctatggaagtgctgtaaagcaaacacaattttgcaaattgcatatcactagtggtagagctgatacaccattttcccatcattatccctgacatttcactcacaatgatgatgagaggcattttcaaatagaaaatttctcccatggaactgattaatgtgatgaagtactgtatagaaatgagggaaagtacaaaatatctgcaattcctaacttttaattttatctataagcaaatgtcttctgcaacacaagactgaaactagttctatggaaaccaagacattcaagtcgacaattactctgcacctactatgcttgaaatgtcatgctgggaaataaagattaaataaaaacagtacatacttgtattttcagaactcccctcaagtatgttgtttaatttcattatattcaaaagatcccaagtgaactcttcagctccatcactcaacttctgccatagcaataaggttttttacatatatattacatatgtaatatattcatcaggcttaagtttaaaagtaaaacttatctgccatcctttttttggttcaattattttattttacaggtaaggaaacagagacctggaaagataaagtgacttccctcaagattaaagaacttctaaaaggttaaaaaccttattccatgtaacctcttattttaaatatcatatgtatagatacatatagatatatacagagacatacacagacatgtttgtgtgttattcatcacttcaaatccattaaatgttttatgtttactatatattgagttttgagaatttcttgtcaccttataatttacaatcatttctcagaaattcctgtcaaagtgtcttcatttcttaacatgaaatcagcctcgaaaaactgttttctaatgggatgatttttttaaatgatagctttaaaaaaaaaccagaaaagcaaagatctctacttttaaccatccagataaatgtcccagactaagtagaaacaagagatcatagcatgttccaggtggaagggaagtgagatgatccagctcagatatggtaaatacaggacctgaatctaccactctctgaccctgaccctgtggcagacatgactaatcaatctcactactttctgccactgagtatggtattctcaacaaattctccaggaagtcactgacaattcatcag

SEQ ID NO: 60597 - DNA, 790 bp, Bovine  19866881530497
  misc_feature (1)..(1): n is a, c, g, or t
ncacatagtagatgactaactctgtcttttgttaggtaaggattaaaagaagaggaaaattcctaccaggtttatgaattatgaatgagtctccttaagaccacaagcatttttatccttgtcaacacagtatattttatattctgacctaaaaaaactttaatactcattcttaaatttttaggatcttttaagatcaattctcagcatgccagaattatgaaatcttagatcactaaaatatactgattctttttatattaaaaaagttaacatccacatttgtcataccaaatgaagttataagtaaacatactgttatatttaataaatttttctcttctgtcattaaaaaaaaaagtgtacagaaatactttaggagacatatgttactcaccactttgcagtaacagaaaaaagagtgggcatcttttcttagacatactaaagatttcctggcccttccgtcttaaactaatattttgatgttcactaggtgaaattataagaaaatcaaatgaaattttaaaatcaagagtttttcctataactggaataatttaatatcttttaggtaccatgccagtgttaatgaagagcaaaattcctgggtttcatttatgtatttccctttactataaagtaactaggtcactatcataatgctcagtgttgggaattcccctagaggtccagtggtcaggacttggtgctttcactgccaatggtctgggttcaatccctggctggggaactaagatcctacaggccaaaaacattaaaaataaaa

SEQ ID NO: 60598 - DNA, 1470 bp, Bovine  19866881535194
  misc_feature (1)..(1): n is a, c, g, or t
ntcttaatttcctcaaactttagatcttggctgtagtaacccgaccgttttcttttttcctataaccaaatatttacttgaaccacttgaaagtgagaagcctactttcttttaaagctttgtatttcagatttggatagctctgaaaattcttccttaccagttttatgtagattgacatttgctattctgttccaaacgcaatgaataacttcattcttctgatccagtctttaaagggtccagatataaaattctaaatgtgagtttcagaacacaggaacagatcatgtcaagattgtccaggcctgtgaagacagcaattccctgtacaaagatgctcagaagaagggatgtgagaaaggtgaagtctggccatttcactgtgtgattcattcacctgcagggctgcatgtgtccagtagatggcctctttctaattcacctgtaagtgttggatgagccagcagaggtcctgaatcttactcctgtggtgcatggatgattatttaaatatacagtaggatgcatgcatgctaagtcgctgcagttgtgtcggactctttgtgaccctatgggccctagcctagcccaggtccctctgtgcataggattctccaagcaagaatattggagtgggttgccatgccctcctccagaggatcttcctgacccagggatcgaactgaagtctcctgtggctcctgttttgcaggcagattctttaccactgagccaccggggaagcccatacagtagggtaccacagtcttaagatcaatgcagtgcatgcagctttaacattttctgtgctgtgcgcttccaccttgattacaggtgatggattactctcctctgctccttctgacagttgtagaactgtttgctcttcttctaattcccactctttgctcctggttcactgttagtctctcacttgtcagctacttgatctcttctttaaggttttattagtgtatcttcttcatttctctgagctcttatacatggttcttcaaattcttttaaaactccaacatttttcagccaataaacgcctaaagtacacctagtttcttataaatagggtttgtacagtgagttaaaacaggaaatatatatgtctgtatatatgtaagtcatatagctatcacctacctgccactagtcagtgtcggtacttataaactaacatctctggttttcacaaagaaacgttctttgactgagattttaagatgaaaacacatttcctagtgaccctgggggaaatttaagtatttcacttaaagggatatggaattaaaatgtgtctacttgtagtttctgcccattgatcctagctgtcactggcagcaaagagaatgagtgttgtccttcctcctcctgtctgccctggagattttaaaaatagttatcatacctcccctcctctatttcaccctcttaatccctcctccataaacaaaa

SEQ ID NO: 60599 - DNA, 801 bp, Bovine  19866881702022
  misc_feature (1)..(1): n is a, c, g, or t
naggaacttcaggacagacttcccctgaaatcagaagatggactaagctttccactactgcctacaggcccaactatgagtctcccatctgcagcctgtgcgtgtgtgctcggttgctcagttttgtccgactctctgcgacctcatggagtgtaacccaccaggctcctctgtccatgggattccccaggcaagaatactggagtggggtgccatgtcctcctccaggggatctttctgacccagggattgaacctgggtctcctcccattgccaggagggttctttaccaccagggccacctgggaagcccctctataacccacccatgtcttagaggaagagctgctctgaagaagagtgtctagaacttatcttcagagtccttcctcaagcccacctttctgagttcttcagaatctagtgctgggaaggacccactgatggcgtgggaacatcaccaaatgtgttgtcaaggtacctgatataaatcccagattcagcaggtcttgtcttcaaaggactttaatttcctcttctacaaatgggagaggacaatacacatcaccctggattgcttgaaggatgaaatccagttgaagaatatggaagttttcatatttgaagttaggtaattacatggttagctgattggtctttatctgcttattgaaagccacaaatcatagtagatttaaatatggatataaactgatataaatatggatagatatagatttaaatatattctcctcagagagcttaaaacatacccaagcaaataagacttttctatgtcaa

SEQ ID NO: 60600 - DNA, 793 bp, Bovine  19866881737276
  misc_feature (1)..(1): n is a, c, g, or t
ntgacagcaaaatgcaaatgtattggcagtaaacatcagggaaaatagctacctcagcagtacccacagtacgtaaatgcagatggaaacggtggggagagagtgtcatttttagtaagtagagcaaatactccacttcgctgaatatatgaatgccagaaaattcacctgactttctacgttactgaaagacatttaaagttgacctgcttcttctttcaggaccctggaatgacattagatttcactatatttggtgctatatgatatgaaaagctgataaaatagaaaattaaaaattagaacattattgtggggaaaacagagctttactgaggtatatctagttccatcacctgcaggaaggaccctgcctcaatgtgggcaaatttcccttttcttctggtctatttcaatggcaacccactccagtgttcttgcctggagaatcccagggacggggagcctggtgggctgccatccatggggtcgcacagagtcggacacgactgaagcgacttagcagcagcagcagcagcattttataccaaaatatctttgccaagtggttaagactatatttttatggtctctgtggataacttgcaaatagaggtaaggaacagaaagtcgagctccccagatccagtcaaggaccaagacacactgacatgtcctgagctgttgacagtagtggagaaaaggctcctttccttctgctgatgtttccctccacatgggaaggagccccaggagtgtgattctcctggtaccagtatgctggcttcaccct

SEQ ID NO: 60601 - DNA, 1554 bp, Bovine  19866880433264
  misc_feature (1)..(1): n is a, c, g, or t
ncttttgaatgttgagttttaaaccagcttttttactctcctctttcactttcatcaagaggcgttttagttcctcttcactttcttccataagggtggtgtcatctgcctatctgaggttattgatatttctcccggcaatcttgatttcagcttgtgctccatccagcccggcattttgcatgatgtactctgcatataagttaaataaacgggtgacaatatacagcctcaacgtactcctttcccaatttggaaccagtccgttgatccaggtccagttctaaaattcacagaggcacatcctaataacctcagttattataacggtagcatctagtacttagagaatacttcagtggctagcatggtgttaagtgcattttgctgtttaatcttcacactaacccaatgagatgggtatcatttcccccatcttacgggtgcctttagaagcttggagaggttgagttacttagcctcccataaaaaaatttgcttatgattgtagggattcccagaccttactaaagtccaactgtgtgccaccaagcaggaccccaggttaagaacctgccccccagagacagaacagatgcacacaaggactcttcaagatgtgactgaggatgtcgtaaatcaaagctcattctaaaacaccaaaaacaccaccatagatgtgtctacatacaagcacacatatatgtctatatgtatgtatgaattatcatgtctaggactgaccaattattattttggatgctggtctctaaagttgattgaaactgatgacctgtctcacctctatccagctctgttacctgataagatactattatgaggtgtttacacccctcccccacacacacacacacacacacacacacacacacacacacacacatcaaacaaaaactacatttcagccaccagaagccccagcattgaccctggggaggtgtcagataaagggctcccaaccaacagacagattcacagttcctccactgacattgataatgaataaaatattaccctgggccttaaagcctctctcagacccattactgatgaccctccctgtcactgggctcctctaggagctggcgtttaatcataggcgtgcaatgacctcaggggactgacgctggttccagggaaggggtggttaacattaagtgccactgaggaatccggcgagccatctccaagggacctgacagcctgcatctttcagccagtatccaggtgagccagaacctatagcagagactggccctggaccccacatccacataggcttgctaaacagccctccagcctcccatcagtcttccaaaaagagggtcagcctgaaagtcagtattacctgcaggcttccaggacatctgctcaaacacagagcagcttcaggaagaaagtgctggccactggggtgtgttttcccctcttccttcccagcaagagactttgaagtttaggtggtaagccaagagtcctctccgaacatcaggagttgtcaaaagaagttatcccgtcctcctattgtaggaa

SEQ ID NO: 60602 - DNA, 1643 bp, Bovine  19866880536941
  misc_feature (1)..(1): n is a, c, g, or t
ntaaaaatacatttctgctttacaactattttcttcagtcttttctctgatatttaaaagttctgttgagcttaacataaaattgggaggaaatctgctattgactttacacacgcatctctactttctagagctggaactctctagaaccacatccgtgtgtgctaagttgctttagtcttgtccaactctttgcaactcctggcccgaactgtaacccaccaggctcctctgtccatgggatcctccaggcgagaatactagaatcggttgcatgccctcctccagacgatcttcccaatccagggattaaacctccatctcttatgtctcctgcattggcaggtgggttctttaccactagcgccacctggcaagcccctctagaaccacactgtccaataaagtagacactagccacttgtggctcctgacctcttgaaatgtgaattgaaatgttctgtgaatataaagcacccaccagacatttgaagatgtggggagaaaaaaagagagtatgtaaaatatgttatcaataacttgatactgaatatacattaaaaaggtattttggagataatgagtgaaattaaaactatgaaatcatttcatgttttttttaacttttatgtggcctataggaaatgaaaaattacctgtgtagctcacatcatatttctattagacttacatgatctaaaaaaagaaaattctgaagaagtctgatcaattatccatcgtctttctaagatacaggatgtacacatagactgcttgcccaagccccatctatagtccccataaaatgtattccctgcccctggtttgagttgcactacactttcagtggtcagataactaccattatttccaagcacggatgagttgaggccaattccagggcaaccgtacacaccagctatacctaaaggaaatcttgcctatcttcaaactgacacatatctcagagttctctaactccctaacatctgcagcggacagcctctgttcttatggattcactcacacatctgtgtaacatttcattcaaagggtgcagtccccatctgcgacagcctcaaatctcgccaagcccccaaaagccaagccaaagagacttcctccatggggttcaaggccatctctcaaagtgcccctcatataaggagactgaaaatgattactcttcaaaagggcagggaaaaatatgaaaggaaggattatatctgcctgaactgccaaaccaaactctgaggaacaggtcctccagagaatgactcagacccacatgatgttttccagggacagtgttttcacgggaggggcagctgtgtattcggctctctggccagaggctacgctaactttaacagctagcccacctcaccacaatgtggaccaagaggaccttgttctctctgctcagagctgcatgctatcattgaagcagtcattagaataaataaaaccctgactgtcaatataaggagcagagtacacactatcttttcagtgctggggggcaaggggctgaagaaaagaaaaaagaaaaacaaactgtgaggtctgtcggttcccagccccatcagccagaagtaattaagttacattcttccacagtggggcgctctcagaaatggcaa

SEQ ID NO: 60603 - DNA, 1014 bp, Bovine  19866880702385
  misc_feature (1)..(1): n is a, c, g, or t
ntttcatcaaatccaaactcatattaagcagaggctgaagaataagtaatgcgacacagccaaaaagtaacaaaagttttgttatgacttctacctccgtgtaactgggttctcccatttggtggcatttgaaatgactgttcatgcttcttctgtccatttgttttgatttaggtttctagatgtggtgcagcagtctggtatggtgatttttcctaaatatcttaactttggggtatttgctcatcagttctcctccatgtaatgtgcacttaaaaaaacagagccagagcctggcagtttgccaaaatcaggctgtcagctgatttcatgtagaaaaaggattccttgttgagagagcatggttcttcaccttcttggagcggtcattaggttcacctgcctttggctactcactggagcctaatgacttcccggaaagggagcacttcccagttctgagcaaacagcatttaccttcttttcttatttgtttaagatgaggcatggtttttgtcctgcttcttccttttacttaaaagaaaaaaatcaccttctttcagagtgactattttgccaaacctgcccatcaacataaagaacgctggggatgtcttagtggacctatagaatatgtgctctaatttatgtctcatggacttaaaagtaaaaatgcatgtggtagaggccatggtcactaacatgcaactctaatgctttaacttatcttcttcaaacaggagagatgtttttcttctgggcttacataaatacagcagttgaatgcagtctaaatcacggtatgcagctgtggagcccttcggctttgccaaaccctcttgcttgtgcactcagattttacaagggggcagtcctgttgctaaaggaactctagtcactttttcgtgaatgtcctgtgattggcaggaatgctggctgttgttaagtatcatattgttccgttgtggagaatattttttattgctagttcaatagcttttcacagttattaaa

SEQ ID NO: 60604 - DNA, 1756 bp, Bovine  19866880970155
  misc_feature (1)..(1): n is a, c, g, or t
ntggcatcactgactcgatggacgtgagtctgagtgaactccgggcagttggtgatggacagggcaggcctggcgtgctgtgattcatggggtcgcaaagagtcggacacgactgagcaactgatctgatctgatctgtagttgtatacctagctgcaaggaaggctgagaactgtggttttactcagagtgactttatgtccagccaaaattttattacagaagaaagggagaagtaattttgcaggacagctatcagtctctgacactttaaggcaaacaggaggaacttcttggagctctatgagtagttgaggctgaggtctcgggactggttatcctaggtctgcatcttaagcattaccagaagctgttgtctccttgtgggctgaagagaaggcaaagaagggagagagagagagagagagagagcgagcacacgcgagcgagcttgttttctgaggcacgacacataacaagcagttggatcctgggtagactctccatgtggatcagcgatatctcctgacacatgctcctcagaataacaattctgaaaaatggtagaggcatgattcaaaagatggggttctaaaataagcttattaatgcttatttatagacactaagcaggcttctttatagtgaggcgtctcaagacctgtagtgtggactaatgatactgtagaactccaagagaagaagccacacagcatttcccactgcgcatgtccaggatcctggggagcttggcctgtgaaattcccagagataggcaggacaagggaccctgcatctgaatctcctggcaccatccctgacaacatgagtggcagtagattggtgctacagggggagatctggtgcagcagcaaagaccagaagatgctgaggctcaagttgaaaaaggagaaagttatttgaaatctggatgaggcagcaaaggcatgagttttaaagtggaaactctcagataaaatggagtggaaagaaccctgatcgtttttccaggatggcagagagagggagggcttgattgttcccacctcaacaaagatcagcagcgtgttcaaacctgcaagagtaggctcactccatctataacaagcacgaggaaaaaactgcctgatggagacagagtgccattagccacatctttccacaagccttagctattctgatgagggctcatcatcaacacagtttataagctgaaatgtagtcctccagaaatatataggattatctttcccccagattaaaaagtttacatttgcataaaactttctttttcccttgaaaggtgtagggaaaataagcttccatagtagtgatttagtggtggtggtgatataagtgatggagaagagggactggtctcttctgttttcctcttttctctgtgtggacttctctacattttctgcaggtctctttctttgcaaatcccatttttgtcagggtgaaggaccagaagaggaggaggtaccagccaaggcatgaagttcctgtgcataggagcattcccagttatctcaaagcttctgaaagctgcccttgatgatgattttaacctgattttattggaataagtatgttctatggtggaagtcagaggtgaaggcaaagtcacacactcttcctttcctctgcccatcacgctggttcagtcacttggtgctgctctgcagcgtggagcagaaacatccctagtcttgtttgtttccatgtccattggagtttagagtagagagca

SEQ ID NO: 60605 - DNA, 744 bp, Bovine  19866881072770
  misc_feature (1)..(1): n is a, c, g, or t
ntttacttttattaagacttttaagcacctgcacctcattttaccttcatttcctatgactatgggagagggggctcacatagccttaggttccaaataaagcatgactcaaccctgagaagagcctggggaggaaaggggacatgagaccccagtacctggaggcagaggacagacgagttcctgtaactgcgtgagtgagagggtggggagaggcaaggacccacagcacaggtaggtgagagagtgaatatgtaagaaagccttcaccctctgactgctttgattgtgttccaatgacatatttctcacggctttgtccaatatcttttcatcataaatagaacaaatctcaagtcatcatatattaaaatgtgttgaagacaccactttaggaagtttgtgcttaccgggagcagcaatttcttttatcaccaaccctagtttggcttctgattgaggtgggggctgggggaacatacccctacaagttcctaagggcagaaaactgtgacagaaggaaattcactggtcccaagctcagaaatcagccacataagctgtgagatgccaagcttctttgcacttgtctggcaacactcacggtatcgacagacgttttcttggggctgactcctccattgccattcccactattttgcaagtgttgtcatgtttgttcttcacaaacaccctataaggtaggtattattattatccccatttgaaaggtggggaaaataa

SEQ ID NO: 60606 - DNA, 602 bp, Bovine  19866881156717
  misc_feature (1)..(1): n is a, c, g, or t
ntattcaaatagcacagaattttcaacttcctaatctataaggactgttagatttcaaggaacagaatcattggaaagttactacttttatcatatttcaagctaagcatgtaaataataaaggctgaactcagaaataaggctgataatttcatggtgaccagccagactcctgttcccatcatttattcctctgttgatagacttccccaggaagcctgggaaaataacagaaaggaactcaacttcccccaagagaaaaggcttcatttttttcttggcagattcattcctaatcacatagcagggaaccattattaacatctggttattcaaaaagagccactgaattattataaaaatgtttcaaatcatcagctgaaaactcagatgatctacaatgtgtatgatgctttttttctccctttagtcaagaagataaatggagaattttttatatttcaacttctattacacatttgtttctaatctgggaaaattcttgtctgcctactgtacttccatatcaaagaccgatatgtcagcctttgcttctgctcctcttaccctgggtttcttttaagaggaaaattttataaaga

SEQ ID NO: 60607 - DNA, 702 bp, Bovine  19866881218417
  misc_feature (1)..(1): n is a, c, g, or t
ncaagatctgggcatgcacacctaggcagcccaggcctgggaacgccctctgaggcatcagggtgaggcgagagaaatcactaagcctgcatagcattacgcccggggtacctgtcactgtgagaactccagggattccctctgagaagcactgcttcctgtctgccctggctctagggcatcgcttctcttctctgactctgtcatgctcacccttagcttagccaacacccaagggaaatgctggggaaatttcagacatgacaaggcagacacatccatgcctttgtgaaagtcacaaacaaggccaagaaaacaaagaacttcacagcttcagtaacccagaaaattccagaaatcaggtcaagccaaaagtggcttttcagtgaacactaaatcaaatcctccatttagagcagcaaggtcctgcgagggcaagcctgtacgcactgtcttctctctggggaggtgcacatgtatcacttctgttttcatttaaaagcatgaaaggcgatgttttaaaaaataataacattgaccctaaagaggttcaaggtatggcttagtagtttgtgagcccaaggaatcttaaaagaggacatttaaagaactagaggtgatcaaattccactgggactaacttccttctgcaaaagggtttcctcgaaatcacaggggcgagtgtaggtctcctgctgtcag

SEQ ID NO: 60608 - DNA, 1343 bp, Bovine  19866881312158
  misc_feature (1)..(1): n is a, c, g, or t
ntgaggaggcacgttgctgggcttataggttctcttagccagaagctccagaagatcaagtgcccacttggggttttcccccagccctgagtagctcctatttggtgagggttcatcttgtgatgtggacctgccaaacatcccttatcggggacaataagctgtaggcctaggcccaagagcaaagtagctttactctttctccaagagagaagtcagtgttggaggtgagaagaaggttcaaagctatttacaggaaagtcacgatccctgtgctcatacgtgggatggggggtgggcaccactttctcagatgtcactgccaaactgcagatatttcagcacctcttttctttcagacgtcttgggtttcagacagagaggtaaccagacgcttcacatttgctacactaatgctgtttcaggccctattccttgaccttacaagtcacctgttccccttgagatatcgttaccctgtgggctgagatagctactatccagatttactaataatattgaggaaaatgtatagttcaaacttatgtcatcagttagtgtggatccttggatcactctggatagcaaagtttaccatcctgttatggctgtagtattggtttcacttcttccattcccatagtgaattagaaggttctgtggattattgcccctgactcctgaaagattatttaatccctccacagtctttttttttttttttaaattatttatttatttggctgttctggctctttgtttctttgagggctttcctctattcgcagtgcatgggcttctcactgtggtggcttctcttactgcgcagcacgagctctaaaatgttcaggcttcagtagtttcggcatgcgggctcagtagttggggctcctgggctctacagcacacgctcggtagttgtggagcatgggcttagtttcctcacggtatgtggggtcttcctggtccagcaatcaaacctgtgtcttctgcatcctcaggcggattctttaccactgagccgccagggaagccctctccacagtcttttgtctatagtgtaagtctctgttctccaagcatttaaaagtaaaggttttcagtggttttcttatttcaataaactcaaactctttagcatggcactcacagctgtactagtcaggactcttaactcaaactaactcaagcaaaaagggacattagagtcagataactgagcagctcattcagacagagatatagagcttccggcatgggtgaatccagatgctcaatcagtgccttgtaggctctgtgtccctctgtcacctcctgctccaggtctctcattattgggcttc

SEQ ID NO: 60609 - DNA, 1107 bp, Bovine  19866881644834
  misc_feature (1)..(1): n is a, c, g, or t
nctgttttacttcccaagccactttgacgaccttaattttacctacgctacggtataaattttcagtgagatccttatctcatcctgacaccaattagcacatgagtttcagcagaagaatccacagcaatttaatacacaccttcaaagaaaaggaaacactaatcgaaatgaagacagtctcagaaccaattgagcaggtgtgcatttccataatggctgcacaattcagccccatcctcatgtttgctcctttcgcttgtgaactgaattagtaatcttcacatgcgctgtccaagtgattgaaataaattactttgttaaattgcgaagcaggttgacccatctgttggcccacgaatgttcagattctcagagggtttattattccaaataatgactgccatatgcagcggtaaacagttcctttaaaactgactgaaggatttggtgcgacttttgaaggcaatttataaagctgttcgtgttctcctaaaggatctgcccttcaactaacttccagaaaagttgtcttgattggttaatcctggcaagacaccttgttctctttggagaggaaagaggaaggaaagagcagaaacatatgttctgagaggacctactatgcgtcaggcaccagcacaaacgtgagccctgctccatggtgtctcccacagtcctgtgcagtggaaattaacaacccagagaaattggaaggccagagagggcaagtggctcatccagagacaaatgctaaggtgcaagcggagactcgaacccagtccactgactcagagacacactgtgctattttcaccaggcctgagcatctgatagaagggatctacatggagcgttacagcaagaattgtgtaccctcacaactgagacccgtgggagagaaaaaaaataaaagaatgttaatgccactgttgagattcagctaacaacaccattctgacaagcttatgccctctttccaaaaaaaaaaaaaagagcctcagacttcactagaggggtgaggaccgggctttgaactcccattggcaagaatctaatacaaaggttttaaagacaaaaatctggggggtcctcttttcatatgtg

SEQ ID NO: 60610 - DNA, 956 bp, Bovine  19866881741045
  misc_feature (1)..(1): n is a, c, g, or t
naggaagcctcttcaaaattagaaagggtgagtagtaattcaactggcaaggaagaaagcgcagatgaacctttcaggtataaggaacagaatatgcagtcatccacaggagcagtattgtatggagtattttagaggctgtgagaggtctaacatagttaaatacagtggctctcaagaggataatctcagggagaatttggaaatgtcacaatgccctgggggtgaatctagggtatagtgtatggttatatgaaccagcagtgtgagagttgtggaactaacacaaatatgaagcaggaaatcctcatggaaacaacatgccttccttgtctatatagcatctcctttgggggcttccctgatagctcagttggtaaagaatttgcctgcaatgcatgagaccctggtttgattcctgggttgggaagatctgctggagaatggataggctacccattcctgtgttcttgggcttcccttgtggctcagctggtgaagaatctgcccgcaatgcaggagacctgggttcagtctttgggttggaaagatcccctggagaagagaaaggataccactccagtattctggcctggagaattccatggactgtacagtccacaggattgcaaagagtcggacatgactgagtgactcacactcacttgggggcaagaaggcttcctttctttgaattctgaggaagagaagggctgatttcgtatcctaggggagagaaattgtacccatgtttaaagggtgactagggccctcctgacaattactcatttaaatatccttagaattgtcttcctaaacacttcaattccttattcagaaatttgtcattcttgtcataaacaactctgacaacagcaacaacctaggaacaaggaataaactatccccctgaatgaaaattgtttttatgtttgaacagatcaaactcttacaca

SEQ ID NO: 60611 - DNA, 1248 bp, Bovine  19866881788736
  misc_feature (1)..(1): n is a, c, g, or t
natgccaggagtggctgttgcttatgtagtggactgctcagcactgaaggggttacgtgtaagagtgatcaaagatttaaactgtcatgttgacggtaagctggggaacaggctgtgcaggggccttaataaatctgcccttgacttatggccgaacctcattcagcagaaaattatttctgtagcatattgagtgctgtgctctgatggagacagaaataaaagaaaggtggaaatgaggagaagagaatggaaattcaatccacatgcggtggggaggattctttagtacattctttctcagataaaataagaaacagaatgtgtaggactctcaaagtacggtgcattcctttgattactaacatgtcttaggggaagaaaatggatgaggagtaattctcagtgaagactgatatggagtggggggagagggagaaaaccttagtgatttagacatgattgtccattcatttgttcacacagaccaccaggctttattgaacactcactataaatgagaaggtgtgggtatgaggatgagcatggcatcttactgagttcatagctaatgtggtagatctacacattcattatagacctagaattggtccagcaccagctcagttcaatatgggattctctggtggctcagacagtaaagaatctgcccgcaatgcaggagacctgggtttgatccctgggttgggaagatcctttggaggaggacatggcaactcactccagtattcttgcctggagaatcccatggacagaggagcctggcaggccccagtccatggggtcgcaaagagctggacattactgagtgactaagcacagcacaacacagttcaatatagcacaatggcaaccgtctttgaataaagtgtgagagaatatagtcagattttaggtatgagagaagggccaacactttttcccaaaacattttcccaattcaatgtaaagaacagagttttcattaatttgaaaggctaagttaaaataaaacagctaatctctttcttaatcagttgatatgtgatttaaatcttcatattgtttttcttttataacatttcagaaagaaaagaaaggttaagattgagagagtctgtgcttttcagtccagttcataaaagcacaaagaaccctttcattcccagaccagagataatttgaattcaatggataatttaggagacaggacttctctttctgccagttttgaaactattgggaaaa

SEQ ID NO: 60612 - DNA, 1053 bp, Bovine  19866880388437
  misc_feature (1)..(1): n is a, c, g, or t
ngctcagtatcagggtgggtccttctaccagcccctgggggtgatggcagagccagtgactcagcattgtggggtaccggtacttagagccaatgccccccaggaataaaaacctgctctgtggtatttgttcctctacctgcatgcccaggccggagctcccctggcttctgcagctctgagcctcctagacattttcccaggtgggaggagaagtcacaactgcaggccagttgggaaagtgtggccttggggttccctctgctggccagtgctgcagacgggcgcccgcctgatggcagataccttctcacttgatttctggacgtgaacacccagccctcaattcccttctcttagatgaggtcaccgagacccagtgtgttaattcatcagtcgacaagatatgcaggctctgaactgggtgctgggttggaacggttcagtgggattggtgggagggctcaggaaagagagccacccggcacgttagagcagaggtgggctctgacctggaagaggtgggacaggcctggagtgaacatgatctcctctccagctctggagagccctgcacgggacctcctgcctggaagggccacagcctggtgtgtcaaccggagttgaatcgcagcatcttgaaataaaaacctggggcaggggtgagatctgaaactcctccaccctgtcttcctcctgcagaaagaggaacggaccatgctggaagacatctgggtgaccctctcggagctggacaacgtcactttctccttcaagcagctggatgagaactgtgtggccagtgagtgattcctcccacccccactgagagagtcggggttctggggtggaaggggctgctctggggtcaccctgcccctccctctgccaccaggccagctgcctagggttgacctgggacccagtgctttcaaaccgcctgctcccaacatatgtggaagaagggggtctcgtttcatataagcccagccatctccaacagcacttaggagggaagaacagccaggacccagttcttaataaaactcccag

SEQ ID NO: 60613 - DNA, 835 bp, Bovine  19866880400896
  misc_feature (1)..(1): n is a, c, g, or t
nttccttctgttaaaagaaaataggagctcggagagaatattagtccggtaggtgctccctgccaccctccacccgcctgcactcggcactagacttgctctgtaggaaggagagaagctgcgttcaatataaatgcaaagcgctccagacactcaggattatctgtgctttgcatgaatcatgacagcagcttgcaagtgggcaggacttggcggagcggccctgtcacaaatccaccaacacgctcctcggaagtgcctgtgaaatctgccttcagtcgctaatttcacactccaggatcagagccgcgagcagctccgggcacagaattcccgtttttcacaacagttttcttaccctcagacccccttggacggcatctcctccaccttttaaaaaacttaaatgctcgattttttttttcaggtcaaatttcgggggggttgttgtttcgtttttgggttgttttttttttttgcttcattctctgtctctttagtgccttgactttgctaacagcagagattttattttggcttcagatcttttgtgaagctctctctggctgggttgcatttttgagaaatcaaaatgaatcgctcgcatattctgcatttattattccctctcctgcagctttctaaataatgtacgaactgtagatgcttctgtgatgaacgtcaatgcatttgaaatgcactgttaagatatgcctttcacctccgttcagatcagaaaatgagttttcttcctgggtttctgcaaacctgagaagcactcctcacttctgaaatgtgtcagaagatacggggagggtcctttaggcccaaggaa

SEQ ID NO: 60614 - DNA, 808 bp, Bovine  19866880435849
  misc_feature (1)..(1): n is a, c, g, or t
nttcaaggtctcctgctttctctgtgtgggtcactgcctgcccttccccgctctggtcagtatcataaggagcctgtcccctgattcccacagactcccttgtcctcaggctttgggcagggtttggccaaccaaaagcactgtctggggactagaggctggaggaagggagaggccagggtatttctcaccctgtcttccatgaagggccaatgctgtgccctctctgtggctcttaaaccaaccccaggctggctcacttctcaccaggtcccagcctggcacccccaacacttctggctaaaacgacagattactttcttccctcagaaaatgagtcttaagattaactgtccatccctggctgccagcttcagtgtggtcaggagagaacagttaacccatttaagagcaagtattttgaagcagatttaccaaagatagagccaagcaggtttccatctcatgaaagccaacatgaacaccctccccccactaccccccacaagtacacacacctgcctttgagctgctcaatggaaaagggtctgggttattgggagaagtcccagtcagaggaatttccagaacagaatatccagtatttgggttcataggcatgtcatggattagttacaatgagctgtatactggtcagggtaccagtgagtaagtgaagtacggtcctctcttatccccaagcaaggtcaattccaagctgtttaggaaatctgtgtcctcacatgtcctactcagcatccttcgattccagaaagacggtgcaagggaggggaggttagatgcacaa

SEQ ID NO: 60615 - DNA, 1380 bp, Bovine  19866880475968
  misc_feature (1)..(1): n is a, c, g, or t
ngcagcagatgccaaatcccaatacacggtgcttgtctggactcagtcctttagaatcctgagttaattcagcattgccacaagtaggtgacctgcggggcactgcagcacacaaggtaattttacacgccgagtccataaacattatttatttttaagggatggatttatttcaaagtatattagaagaaatagaaaacgtgaagacgaattccatgatttcacatccataactgcatgggctgaggtttaatttttttaaatgtttccatttaaagaggaatgttaaataatagtgcaggtagtagtacatcgagatggcccagaataattgtggggtggttgggaaatgctgagttcctggcaggctggtgtttgatccctggagttcaagtcccattggtctggggaggccccaccccagcccattaaagtcacagagaaaggtgtcagggtgacctcacccctggcccagtgaaataggaaggtttgctcatggaacaaaattgggtctgtttttctgcacgtgtccccaggctaatactggagaaaatgaattggggttgactggtctggcttcacttaaaatatgtaaaactggcttcctttgcccttcgtggcgacggcttccagctgctttacctcccttctaacctgtctgcctgcagcagggcagggctgcagaaagagtttagctcaaatgtttttgtggaagagatgctgatttataaagcctctccattaaccactgttttaatgaagcagattaccatccccaaggggagacttaacatccagtgtaacttacgcatagatgctgctgtcatttaaaaggatcgctaaaactgtattttaatagtgagctgacataaaccttccacccacctgtgtggacaggggtgagtgcatctaacaagtaagtgtgcaaaggcacttacagacaaagacacccaacagttaattgcctcttaaatgagtaggctggaaacataagcacccaagaccctggttttatgtctggtagaaatcagaaatggttctgcaggctgcttgctctttgcccacatagcacttagagctgctgactgcagcacgtgaattattcaccaggtggtggctctccctgcgctccgggagacaggtctaaccggtggatggcagccaggttttgcttctcacgttgtctctagagactcacagaggaagagttctcagcacgaactgcttcattatgattcgtgaagagcaagcaaaaggtcggttctgcctgaggtgccctggattccacattcaataagtacttattgagcacctactatgtgccaggcactgtgcttgaccaggcttttagggagagataacacggactaaatccccacc

SEQ ID NO: 60616 - DNA, 1773 bp, Bovine  19866880560408
  misc_feature (1)..(1): n is a, c, g, or t
ngagcaggagagtgggaaggaaaaaattgacttaataaataacttcactcatgtgatggttttctttttgactctttgaatctcctcaaatttttggttctccctgttaatggagtgaagataagtatcatttgaggttgggcattttttgcactcaatctctccataatcttatttttgtctgcatgaaagcattaacatacattttctgggctctgagccaagatgagtcattttgtctgtttctccgtctccatggagccctggtctttgccagaaccaaaatcagccccagtcaggaaatgctccagggatcttgagcacccccctaagcctggtgcctggtaacccctcttgcttacttggtagagcccactcttaactaatgctctgcccccctcaccgtggacagggcaaggggccagggacaatgcctcttggaatctgagaagtcacgcttggggccatgcccagatcaacttttcattgcctgagaaaagagatgggcttgggacatttcaatctccactggagccctcaggcatgcctttgttattactgggtgggattgttgtagcttactagaaggacgcacccccaccttgggctgtgtgaagattagacggggtgaaaaagcaaaatgagaatgtcagatttctattggggattaagaggcactcaactctagccaagttttatttttttccattctaaagcaggggaaaaaagtgcaccctgaattctccccttctctgcaacatgctgtaattttgtgatttagaagggaaaaaacctgaaatcaaaaagaaacaatttggcaggatttctttgcctgaaatgttttaattttctatgactttgaggtcagcacacccaagagtttctaagactcatctctggtgtgaatgaggcattgatcctggagacagaagccccctaaaagtgagaaatagaagaaaacacaggctattaaccagccacaatttatcctatcagctataaaaatttggtcagaatatttgctgagtaaaataaccatgttgaccggatcttcttacactgaaaaaggcacttctgaatgcccataacttcagtgtagaatcaaatagtcattctcaactatttctaggtataaacattttcaccaaagaaaacacttgataaaaattcaacttgtgaaacaaaccagaaactgagctaggatgggggtgggccctgctctcaacccagacgaatcattatgtctgaatcttgtagatagttcactcattttcagaatccttggtgcagactgggggtggtgccgctcattagagagcatttgaaaacacttaggggagatttggggagttttactaactgatgcttgatgtcctttccagcctttggtggggccagggatgctactgtatgacctgcaatgatatgacagccctcaggagaaagaatcgtcctgcctaaatgtccatatagcctccaggaagagacattcttgcagggacaggagctaagggtcaccaacctcatttctctctcaggaggagcatggcactcctcccactgtagagcatgaaaatgccagaaacatcttgcccagcctctcctgaaaccagaagtggctgtggaatccaagtctgacctatgcaacagaagagcaaatttattctggggtctggcgaatcttctaggaaaaacgttcatctttcataaaatgaatgcacaagaagaaattctgtttcctggctttgaaagcagttggttgaggacagcagg

SEQ ID NO: 60617 - DNA, 1246 bp, Bovine  19866880715189
  misc_feature (1)..(1): n is a, c, g, or t
ncaagaagaaaaagatggaggagaggctattccccaggtcactccatccccatcttctttgtctttgctcccaaaataaataactcaggcccattttcaccctgatcatctgagacaagaccgagatgggtatagaaatgaatgtatcgatttaggcgctgttcacagacctgcttcctttttctgtgagcagctgtaattagaccgctgtgattttcaagtcaggaaaatgctaaatggaagcacgtcagctggttataaaagagctacccaaaataacatcacagggaatggatcttttgataaaatattcctaaagggttttaagctataaaatattttctcccccaaattggcagtttttgcctcccatttccagatttccagatttgacattccagattgtggggttttttttgtgttgcaaaatctgcttacttgcccctctgcaaaaagtgtctcttttatgttttttagttaattttaaacctgagactgataacttttttaatgctgagtcactggtataggaatggccccgttgtcagctctccaggcagagatagggacctggaaccagttaaaaaaaaaaaaaaaaagcaactctcagcatatcccctaagagactaacaaaccctgctggtcaatgctctctgaggaagattcttcttgtgtagcttttcctgttggcagagaaagaatgtcttcctggccacctgtctgaattttaatgagtcaagaaatatttcttaagtgtccagggaacattttagggattatgaaagaaacatgggggaaatctctctcttcaaggaacccataagatttagatgaagttgagattttaagacctacaagacggatgtgtgcatgtgttgtatttgtgccagaggaacataaaaattcagcttcccattgcttgacctccagaaaagtgcttccattatgaatagtgctttaaagaagtgtccttacttccccgactggaccacagaggctgaaacctcagggtctaatgtgtgggtggtcttaacagcatctactacctcttgggggcttccccagtgattcaaatccacctacaatgcaggaaacatgggttcaatccctgagtcaggaagatgcccctggagaaggaaattgcaacgcactccagtattcttgcctggaaaatctcacggacagaggagcctggcgggttacagtccatggggtcacaaagagtcagacacgaatgagcatctaa

SEQ ID NO: 60618 - DNA, 659 bp, Bovine  19866880892267
  misc_feature (1)..(1): n is a, c, g, or t
nagaagcggctggaccgtgccctgtccaaatgctgtccagcacaatcctaatgccccccaaatcttacacacccccacgtgctcctgatgcggtctgcacccccagcttcccttctcaaaggacagcctcccctggagtgtgcacacagccataaagctcatgtgtattttgctaattgatataaatgacttgtctttcacagcccagcatcggtgctgggcacgtccacgttaattggcttggaggaggaaaattaagtgcttcaatttgtcatttttcaagatgaaaaatgggaaaggagaaaaatcactcatttaatagagaggtgctgtgagtaactgaaaccccctttggagaaggagcaaaggctctctcaggaaggggtctgggttgggagcagccctagggaaagggaggtgagccagcacctccagcagccctttatatgcataaagtgtttaaaaatgacaaagtgcttttcaaaggcagttctcatccaaagttcacaactgccctgcgggtaccactacactgacagacagggtcctaaagttgcaaggacagaaaacgcaactccaagagatgcaagcggaaagaaaatgtatgggttcataaactcaaaagtcccgaggatggggtggatctcaggtagggctgg

SEQ ID NO: 60619 - DNA, 754 bp, Bovine  19866880911688
  misc_feature (1)..(1): n is a, c, g, or t
ntaccgaccttctataccctccccagcccggctgtgggaggggctgtgctcaagatgaagactcccgagtgacctttgcgatgcaggaatatgactaaatcagcttctggatccgtcatctgccctgagctcgactgcagtattgattttccatttcaggggtggaaaacggacatttattttgaaacctgtttggtaatgaatctgcgactggaggaggatgcttcgacgatgattattcttgaacttggcgtgacttccagcagcagagaacgtcccggcctgtctctgggtttactttaacctcttatgagaagcaagaccccaggctgagcagcttaggaaatgaaccaagtgattcccatggccgtaatgtagtaaatctctttctgaataccccagctataaaatagattatgtagaactttctctacctgagacagccctggtctggaggcgagggtttgtaggtggggtctggtcactactctggtcacttggggggcttacttcctcttcagggccctcagtgcccgccccgcccgggggtagggtgggaggagattagatttcagttaccctggtggtgagcaggagcacaatcgccatcccctaagatgtctgtgtcctagttcttggaaactaaatatgcttgttacatggcaagggggagttaggttgcagatggaattaagttgcttaatttgctgaccttaaactaggaaaatgatcctgggttatctggggggggggg

SEQ ID NO: 60620 - DNA, 921 bp, Bovine  19866880976311
  misc_feature (1)..(1): n is a, c, g, or t
nctatgggtgcagttgtgggttctccctgtatgcaggaggtctcttatgatatgttcctctccccccaaaatgccacttgcagctttgagatggaaactgcaagaagaatgaaatagtgagtgacctcctctagccagcacatgactgataagagatgtcacagtcagattacctttagaactaaaaatgtagagtttttcttgatatttgcacttgaaattacgaagtcatcacaaacactgaattagcaaatactgaacccattactcttaggagaaactgagagctaagttcctgtgagcctctggtcacagtgtattcatcaactgatcaataaatacattttaaaaatgtgtgtttttgttttaaaatatcttatttaatatatattgttggggcttccctggtggtccagtggttgagaatctgctttccaagacaatgtacatggattctatccctggttggggaactaagatccaacattcagtggggcaagtaagcccacacaccacagctagagagtctgcatgccaaaactactgagcctgtgcactctggagcccacgcattgcaatgaagagcctatgtgcagcaactaagatctgacacagcccaaataaataaataaatatataaaatattatatatatatatagttagttcatcagcattgatggacattgttcacctatggcatatgcctcatgcatgaacaaagcttatctaacgcacatattttctttgaaaggcacatcacagccttctcgtgggtaggaacagtggacagcacatcagcactacacttggaggccatcttaaacagcaagatcaccaacaaaaggcacaaaagtgtgaaaaactggcactaaataggctccaaaaacagtagttgtttacagcatggggctcaaaggcag

SEQ ID NO: 60621 - DNA, 1418 bp, Bovine  19866880994242
  misc_feature (1)..(1): n is a, c, g, or t
natcaatagtttaaacaatgaacacatgcaccaggacttcaaacatattattacacaaatttgtgtaataaagcacagcactttaaaatataactctctctggcttataaatttgacctacagcttgcacacgagctggagcaaacatcaaacgtctcattgacacttgtttgccctcttagaattccgaagaaggtctggtgacacctgtcactttcttctgggcgcctcagttccctgtagacaccccctctttgatctacggttctgggacttggcatttataccagtcacctctctagttaaccctgacctgacaaggggctttctgtctgctcaggactcaggggattcacccaatgataggtttttttggagtacttgctgtttttcttacccaaccccattccccaggccagaatggagctccaccgggcagcgcttttgtctgccttgtttattgctgtatccacaagggctagaatgtgactggtgctcatgttccgtggatctttgtggactgaatgaatgtgaaggggataaacagcagtgacgttaacctgcagggtgtgggggtggggctgtcgcatttgagctgagacaggaaagaccagaaaagaccacaggaaaaggtgtggggaacagcaggtgcagagagcctgggataggattgaacttggtgagttggaggaacagtaaagaggttagcatggctgcagtgccatgagccgggggagactggagggggatgtgttgcagaggtggccagacctctccagggccttggaggccatgatctggagtttaggttttattctaagagcagtggggtgccattgaaggtttcagagtggagggtgacatgatttaatttacatttctaaagcttgctctgactgcaatatgtgttggatgaccagagctttggattgaagggcattgaatggaagccaagagaccagggaggaggctgttataatccaggaaggccatgatgggcgatggaactcaacccagggaggcagtggccatggagaggtgtgggtgaacagagggcacactttggagatggactcagcattccagcttggctgagcggaaatttgggaacagtgaggtgtgactttgcctggaaattctcttgattcctggacgtatttacctcagcacatggtgggatgatggggatgagatgcaattttaatagcaccctcaaatccctgcttcctccacgaggctccagaagccctgattcctaggcttccctgctgggcttcatgcttctgaaggttgttctttgagtttgcacaaagctcatgtttatttttgctaattgatataaatgacttgctttcgcttgttgtacttcagtgctatgcactttcatattaattggtttgaaggaggaaaattaagtg

SEQ ID NO: 60622 - DNA, 992 bp, Bovine  19866881132156
  misc_feature (1)..(1): n is a, c, g, or t
nttgcttggttggaggctcaaattttaaagagtgagcccatttaaagcccatactaaataacagtccaattagtgccttaaaatggccccagaacagcaatcacaaagtgtatatgaacgggtgacacttgggaaatgctgagtttctggtgcacagggtggttcgggcactggcatttaagttccatcattgtggctggaggggctttctcgtgactctaatgagctgaggaaaggtgtcagagtgacctcactcccagcccagtgtggtgggtaggtttggtcatggaaagaaattggtttctgtttttttccccacacgtcttaaagtcaatgctggggaaaacaagttttggttggctggcctggtttcattaaaaatatttaaaattggcttctttccccctcacagtgatgtcttccaggtgctctgcctctcatctgagctgtctgtctgcagcagggcggggcggtggaaagagattagatcatattttttgtgttaaagatgttgacatataaggcttgggaattacagcattttcaataaatcaggttactgtcccaaggggaggcttaccacgtgctatttatgcacgaatgcctctatcatttaagaggctggttaaaagttgtagtttaagagcggattaacaaagctctccgcagcccgtggatttgggcaggaatgagcactccgaacaagcagacactcagggagctggcggcaagaacacccagcagctaattgcctccaaaatgagtaggatggaaaagcaacagcttcaagaccctggttttgagcagattaaaaataagaaacagtttctcagtctgtttgccttttgccaacgcagcatttggggctgctgactgcaggtgaattactcaccaggtggtggcctcctgctttccaggagaagtctgaaaggttgggtgggtggccaactttgtcctttttctctcattgaggtgcaggagaagggatgcag

SEQ ID NO: 60623 - DNA, 758 bp, Bovine  19866881135973
  misc_feature (1)..(1): n is a, c, g, or t
nataaaaatgtaaaaagaagattgcagaattgataaacccataactaacatttttctgcatcttggttttatcactcaattcctggtagaaatacttaaaatcaccttcaatagctctaaattaaagtggttctttacaatggctgtgcaacattccaccaggtggatatacttgcaaagcattcagccactccattattaaagagaattaatgtttttttctgggtccaggccacttaaaactatagttgtgacatccttatgtctattgctacaagatgtagtttggttttacttctatgggatgtattgccaacaagttgtgagctcagaagaggtatatttttccatggattgtctctttatagctgttgcctctttttcttgtcagtttataagagttctttcatatattgaactacattaagtgaattcatctattattgacttgcaaatacttttacagacatatatagagactttgtgtaatcattttacattcaaaagttccaaattttagtattttcaatatgtctccccgctaccccctgccttttcgtgctttcagggttatctgtcttgctttgtaaagtcttgccagcctctccaagttgtaattgcagaatctcagcttttcttgtaaaatttttgagctcctgaagctggggcctctttctgttttctgctgcatctcaaaccacagctgtgtccggcacatggttggtcctcctgacatatgtgcagaatgaacgagtcaa

SEQ ID NO: 60624 - DNA, 703 bp, Bovine  19866881168076
  misc_feature (1)..(1): n is a, c, g, or t
natgtctggggaagatttatggaagaaataacagagtgaaacctgagtttcttagagcctggggacgtcaaccacagcatcttgggagggaaggaaacttttccacgatggcacctgtcacgtggataatgtcacgtggttcccttgggatgctctacccccagctcctccacctcgtgagacccactggcccctcacagtccagcccagtcctgcctcttccctgaggtctgctctgtggcccctggctcacaggaatgggggtcttctccgagctctgaggcagccctgctgacccactctctggggtttatttctgcataaatgccctccctcctccccaggccctgctccgggacgctgcctccccccagggtcatcagaacactacttgcaccaccctaaggcccgagattcttctttttggttgtttcctaaccaaggacttagcatcaaccaaggcacagataagaccatgttatttcaccatgggtcataaaaccaaagctacaactttgaacctctgtaaatatttaacagtaatgaaattatactccaagttttataaagatggtcataaatcaggagtccatgttgattatacgtgggtcccccaatgtaataaaaatatacacatcatatattataaaatgtacctctctaggcctataaatttgaagtaaaactaacatatgagttctaa

SEQ ID NO: 60625 - DNA, 620 bp, Bovine  19866881189415
  misc_feature (1)..(1): n is a, c, g, or t
nggttggtagaggaggtctgtttatcataacctctcacggatctaggccaacagaggctccaccaccttactatgttcccaccatccccatggcccccgtgagaccagacagaatcatacagcagttctttaatgattctacctgcaaacagtaagtcacttcctctcagattccatcgcccatgtgagatcatctgtctccttatgactttacaagttaagagagtgtgaacctcctgtggggttggaagaggaggggaacccaggaggcaaatgagggcttgtgctgtctaccctggcagagcattagtcgtggaaaggacaggactgacttaaagacaacttcactaatgtgatggttttctctttgacacgttggatctcaaaagattgggtttctgagtggatggattaaacagaagtgccattcgaagttgcctttctctgcactcagtctctcataatcttatttttgtctgcatgaaggcattagcgtgtgtttctgggctttgagccaggatgagtcattttctttgcctatttccttgtctccatggagccctggtctttgccagaaccaaagagcagccccagtcaggaactacttcaggatcctgaaa

SEQ ID NO: 60626 - DNA, 773 bp, Bovine  19866881306939
  misc_feature (1)..(1): n is a, c, g, or t
naaatatttgctttctgaatgaatgcataaaaggttcaatgccagccctaccaggaaccagccatgcactgaccctgcataggtctctttacatctctgagtctcagctttctcatccaaaatactcaactcagaattatcagtgtacaaggtacaaggcggctatcaacctcagatgtatgcagagggatgtccggtgtgaccaagccctttatgagctgtacatgctgggcacagctgactcccaccctgccccagctccccatctctccagacaccaggaccccagagccccaaagggctggaggcggcttctcagagagtgagatcacactggaaagccaggcctggggacctctggggcccttactgagcacacagaaggcctattgacttcctcctgaaattccccagagccacagccaagatgaagcctggacccagttactcatccactctgcctcgcacttaacgcccagtgcagggcaggggcctgggctgccacgagggcagctggaggtgccaggctcccaggggcgcttgggaagggattttccactggcaccaagccaggggcccccgcgcaaggaggctgggacacaggatggttgtactgagcaaggggagaaaaatcctgagctgggagtgggggcctgaggccgagccctcctcacagagccccagcatggtccgctcacgggacccaggggcctctggggaccacagggagcaagtggggtgggggagggcagagccagctgcccacggggtag

SEQ ID NO: 60627 - DNA, 1316 bp, Bovine  19866881372693
  misc_feature (1)..(1): n is a, c, g, or t
natgctgagacgtggagtctgtggttgggcagccacgtgccagctgaaaccacctttctcggacggaagaggagcatgggtctgagactcccccctccccaggggcccataccctccaaggtctctttcccgcttcctctctcttatcactgtaagatctctctgccccgggccctggtctgctcagagctccatatggacctgtgtggtccttggctccgtgtcctccttccagcagggacctcgccccgtccgcatcctcagcctctttatctttcgctgtcctcctgggctccccagcgcctttcctgatcacgctgcttgagccccacgagagttcagtgcactccacacacacccggcatcttggttatttagcacagatgaccaggtagaattcaggaatggttcccatcgcttctcacacctgcagctagagggggtgctctcagaatccttcccctggtggtgttcacgtggggttggtcacttgttctgcaagcatttgttgagcacctactgtgtgccagagtgtgtgggaggtgctagaagtacagtggcaaatggttgatagatgcttgataatgcttcctgtccttaggaaagtggcattctttatatgtatataatgaattctgccagcatttaaaaaatatctatgtatttacttggctgttctcagtcttgcggcatgcaggagctttcggtgtggtatgcgaactcttcgttgcggcgtgtgggatctagttccccgaccagggcacgaacctggaccccttgcctggggagcttggtgtcttagccactggaccaccagagaagtcccagaggtggcattctcatggaggaaataaagtaacaagtcaagacacaaataaataaggggaggaggggattggcaaaaaaccaactaaacaaaacacaacaaaacctataacaaaacactgcctgggccgtgtgggctgagtgagtccttccacctcgccaggtcccaggtcccctctctgagcgatggtcgtctctgtatgctctcctgccagcagagggaagctgtcgattgggtggtactgtcgattgggtttctgtctgctcacctccagtggtgcattgagattttgggggtgtgagggaggcaggggcaggtctgtctctggaaacaaagaggggtatccccaagggctgtctcctggattcaccagctcatgtactgcacccctgccctgttgctctcctagggctccaacctcacggacatctgcacccagctcctcctgcaagggactttgttaaaaatctctgcaggcaacatccaggag

SEQ ID NO: 60628 - DNA, 721 bp, Bovine  19866881633813
  misc_feature (1)..(1): n is a, c, g, or t
naaggagggtctgaagctgcccttacagctgtgtccctggcccaccatgtccccccacagataccaatgtcttctaccacattgagggcagccggcaggcgctgaaggtcgtcctctacctggacagctaccacttctccaagctgccctcccgcctggagagcggggccagcctgaggctccacactgtgctcttcacgaaaggtgagctgcggagacgggccgtgggggccccacgggggaacggctgtgcccgctgggggccaagcacctgcctcgcccgtcttctcccttcacagctctggagagcatggaggtctcgcctcctccaggcagccaggctgtggaagatttgcagcaggagatcaatgcccagtctctggagaaggttcagcagtattaccgcaaactcaggtacctgcgtgggcctcgcgctggggccaggatcctggacactgtcacctggagggggcctttgcgtggaaggcaccagagagcccccagtgcctgggcgggcaaagtgccgtttcttgagcacctactgggtgtcagtccctctgcctacacgagctcctcagattctcacagtagttacctttctaacccattttacagatgagggaaactgaggcccagggagcacacccaagggatgcagctagacactggctgagctgagctttgaactgggtctgcttggcttcgtagcaggtcctgccag

SEQ ID NO: 60629 - DNA, 1497 bp, Bovine  19866881705685
  misc_feature (1)..(1): n is a, c, g, or t
naggcctccttctgtgggttcctcgtggtccaaatagtggctccgctccagccattatacccactgcccagccagcaggaaagaggaagagatggaatcaaagggggacctttggcacactctaggattcttctaaggaagcttccatttttacccctttagttacaaactgcttgtggctgcaactttttttccgagtgactaagcacacacacacgtgcatgtaataataatcattatatgttaatagttaatgcttaacttgtggttaccatgtgcccggtccacttgtaagctcagtgtatttcattctcatgcatgtgtgttcagtcatgtccgactctttgtgaccccatggattgtagcccaccaggctcctctgtccatgagatttcccaggcaagaatattggagtgggttgccatttccttctccaggggagaaagaaattctcatagcagccccattgtggtctctgaatagtatctccctggagatgtccatgttctaatccctagaacttgtgactatgttatttcccctggtgaaagaaacattgcaggtgtgattaaggcttctgcgatggggtgatgagcctggaatacccaggtgggcccaatgtaatcacaagcatcctcacgaagggaaggcaggaggtcaaggaaaagaggaggatccgcggtgcttgctttgaagatggaagacggcgtcttgggcctgtggaaggtggaaatggtaaggaagcgggttgtcactgtactgtggaaggagcacagcactgtggaccaaacatctgccctttggagccataaaacactaacgcgtctttttatgccgccaaatttgtgatcatcggtaacagcagccattggaaatgaacctccacatcatgatactcttatctgtattcagaaaggaggaacctgaagcatagagaggctaagtcacttgcccgagatcacacagcttactagtggggaaagtgcagatctgaaccctggcagtccttctctggaacctgcccttttagccactgtttaccacatgggatacatatgctgtctgtctggggtttgctttgattttgcttacaatttcttaggtagtagatttttccagcctttaaaggctttcatagtttggaaaatttaaaacatatgtgaaagagaatgatgtaatgaactcctcaacacctgtggccaaacttatttcgtctatactccctctccttgttttttcctctcatttatttggaagaaaattccaaatattatagtacttcatttgtacatatttcttaaaaaagctcgcttctgtaacacatttgtcacccctaaaatttaatttttaatatctttactatcatcaaatatgcaatcagtttacaaattttttcaattgcctcattttttttttttcagtttctttgaattaggatccaaatttcccttggttgatgtggcttgactttgttttagtttataaaaacaccattca

SEQ ID NO: 60630 - DNA, 1122 bp, Bovine  19866882037384
  misc_feature (1)..(1): n is a, c, g, or t
ncagaaagtagcagctgaaaggctaagaaactcagcaaagctttcaccaatatcatgatgctatacagcagaacttggagctcagtgatcaccaaataggtggagtcttggaaaataaacagtggtatatgttcagtctctcaaagaacttgttctaggaagtaaggacaaatcaaaataaaccagacccataaagcagaaaatcagtcttgaatcattacagtcataataatctgtcctcactatagtggctatcagagaaaagaaatgaaaagataaattagaatcctctggggaaatagaacattatccgtagatagtacaatgtttcaaacaaaatgccttgccaacgttcagaaaaatattaccagatatatcagaaagaagacctaataaccaaaaaccaagaagaaaaaatgataaacaatgaggaaaaaaatcacagttgatggattatcagagtctatcagagataaactgtaaaacatttattattaacatattcaataaaaagctccaatgatggagaattttattagagaaatggaatatatagaaaggactcacatgaatatttgctaactagaaattataattaaaatgaaaaatataattggtgtgtcaggcaaagattttgataggttttttgaaaatatcctttttgaagcatggagacaaaaaaggattcatatacaggcataactagttttactgggccttgcagatattgcatttttcacaaattgaaggtttgtgataaccccgcttcaagcaagtctgttggtaccatttttccaacaatatttgctcacttcacatctctgtgtcacattttggtaattctcacaatatttcaaagcttttcactattacatttgctgttgtggtctgtgatcagtgatcgagggggctttattgtaactgtcttagggccctgtgaactgtgcccacgtaagatgaggaacttggtgcatgtgtgtgttctggctgctctattgccggatctttcccctgacttcctccctctcctctggaacgacactgaaattaggctgattaataatcctagaagggcctctgagtgcgaagtagagccgcgtgtctctcactttaagtgggaag

SEQ ID NO: 60631 - DNA, 693 bp, Bovine  19866880552003
  misc_feature (1)..(1): n is a, c, g, or t
ntagtagaatataaaattagataggtaagagtgaacagattatctagggattcctacatgagtgtgagtactttagattttactaagtaagatggaaactgttggggagtttcagacttgagaagtgatccgcatctccacctgcaataactgtgtaacataagctttataagctttgtgtattttacactgacctgcctactctatcctctgtaaacctgtctgaatttcctcaaattatttggtgtggttgtcccaatcttcaagagtagtttctcaattgacttcactatggactttgtatcttcagctttatcagggtacttctcatgagttttactggatcccagtcctctggaatgttattgtagtctattctcctgtcattatgtttacaaattattttggtactcaaatactactccatatatagatttcagaatgccagccatagcagtagacctttggttctgagaagttttcaataaattataccttttctctcttatccaaatttggaactaagtgaaaaagaaagagccttaagaataatatatagaagatggcgaggaataggacagggagatagatcactttctcacccacaaatacatcaaaagatcatttgaatgtggagcaacttccacaaaacaagtgaacactggtggaggacaccaaacacccagaaaggca

SEQ ID NO: 60632 - DNA, 1246 bp, Bovine  19866880568454
  misc_feature (1)..(1): n is a, c, g, or t
nacagtggtcccaggaagcatgagccctgggtcttgggttggcctgctgctgctaagtcacttcagtcgtgtccgactctgtgtgaccccatagacgtcagcccaccaaggctctcctgcccctgggattctccaggcaagaacactggagtgggttgccatttccttctccaatgcaggaaagtgaaaagtgaaagtgaagtcgctcagtcgtgtccgactcttagcgaccccatggactgcagcctaccaggctcctccatccatgggattttccaggcaagagtgctggagtggggtgccattgccttctccatgggttggcctaggtcctcggaattatagggaggtcattgggcctgacttacataccactctctgaccttgctactgagagaaaagtaaacattgtttgacaacagcaacttcacatccttgtaacataatgagctcatagtgaaatcatctttagttcattaaaagaaaaaattaaaagtgaacttttgtggcacagtggttgcgtgtatggactcaggagacaggctgcctggatccacttcctagctgtataagctgggcaacttacttaatttcttcattcctcagtttccccatttataaaatgagaatactaactactaaacttacaagattatgtgaggatttaatgagttaatctatttagtgcttagaactgtacctgatagacacatataaatgtctattgagtcatatttttttcaggggaagcaagctaccatcagtatatcatttgatagtatttcatagaacttaaatttttacatattgctcaaattcacccaaataagtatgtttataaactgggtgccaaacttttggcagtaatgtacagctaagtacaactcacatactatttatagactttcatttcttttcaatcccctgatgtaaacacagttggaaacattatagctacctagggacacaaaagatgcactaaaagaaatcatgattacaatccttgttaggtgaaaaacaatgtagctttatgttttgaaggcattatggaaggttaactttgaaaaagtatgaaaaagaaacttccattgcagccttgtaagagtcaaactatcttaaagacataatcagttaatgtcataatgtttatgatgatatgatctaaaaattatgtcattatgcttcttcaagaaggactttcaacaattcaaaatattattagactgtaaaatcttttacaaaaaaa

SEQ ID NO: 60633 - DNA, 1944 bp, Bovine  19866880612546
  misc_feature (1)..(1): n is a, c, g, or t
naatttaagatctatcagtgggaaaagatacacacaaaatagctgtgatatagacccaatagattctctattcacagcacttctgataataacccccttgagttagtgtagaccccacaagtcaagggctcagtcccacaaaactaactccacttcagacaccaacctcatgtccagacttccagtacttctgactgattggctaaattgggggttctcaaaatcccctcttaagggtcgacaatttattagaacagcttacagaacccaggtaaataaagtttacttactatcattaatttattacaaaggatattttaaaggatacaaatagatagccagatgaagagacacatatgacaagatccagaagggtcctgagcacagaagtttctgtccccacggagtttagaatatgccaccctcctggcatgcaaaggcattcttgttcaccaacccagaagctctctgaactttgctgtttattgtttttatggaggcttcattatgtaggcatgactaattaaatcaccagccatggtgattaagtgggggggaggggagcaactagggggatggctaaaatttccagccctataatcacatgattggtgcctctcgcagctaactcccatcctccaagagttaccgcattgtgtaaactcagatggttgaaaggggcttataatgaataacaagaaatactcctcttgcccctcccacccaggaaatatcaagggttttagacattcagtgccaggaactttggatgaagaccaaatatatatatatatttcttactatagcacaatcacatagtagaaaaccaagactcttggtttgggatcataaagaaagataagattaattctgactacaggctggaaaaacattcctgaaagtggatcttaaaagacaggtagaatacagattcggagaaggcaatggcaccccactccaggtactcttgcttggaaaatcccatggatggaggagcctggtaggctgcagtccatggggtcgctaagagtcagacacgactgagagacttcactttcacttttcactttcatgcactggagaaggaaatggcgacccactccagtgttcttgcctggagagtcccagggatgggggaacctgatgggctgtcgtcatggggtcgcacagagtcagacatgactgaagcgacttagcagcagaatacagattggagaataagccctgttagggcagcgtctgaatccatggttgttccattgttctttactagtgaagctcattccccaatgaatgatggaatggtttggacactactgtgtccagggtgtgtgtgtgtgtgtgtgtgtgtgtgtgtgtgtgtgtgtgtagagccggggagggaagatgcacgcagaccatcattggcagaaagtaatctgagcaaaagacacgaagtaggaaagtaaagaactttgggttttttgtttgttttattttaaatggtcatagagagtttacatttgctggccttacatcaacaaagattatccaaatttactcatggagatcaaccattatctattaatatttttaatactgtcctggtcattggattataaagaagaattacctgaaattctctcaattcttttgtacatatacacataaatttcaatactaagatcatgcaagtcttgtggagactcctatgctctcatgtaaagaacaggccttggaggagaagctaaagatttctttttgtggcctccagcctatcacttacacagctagtgattgctccctgatgtagcagattcagctgaaagcctgagatatggagaaagtgatgtctaaccctttctccatatcttctgataagacagaagttttatcagaagtgattttgtgctgctctgctatttatcatacacataaaaaatataaagttaacctaaatctcat

SEQ ID NO: 60634 - DNA, 797 bp, Bovine  19866880884329
  misc_feature (1)..(1): n is a, c, g, or t
nttttcttattaaaaacattctccttcaaatgaacacaaatcatttcccttttccttatgttctctttaaggtgacacccttttttctcccttcccatcacagccaaaccttgtgaaagaatttccactggatagcacctgctaatgtcactcataaacttgatgttgctaagtctagccctcacctttcgttcaacctcttccttcatgtttcatcaacacttaagaccgtcaactatgccttacttgaaatacattctgtctgcctttttgatattgttttcctaatttttctccttccctattttgctagtttatagttttaccctcttttctgaggttttggagtatccctgtgctccaggtactgtgctagcttcaggactaaatgttccaacacttgagggcttgatttcacccttatgaatagaaacaatttgattagaatgataaacatgccaataccagtttgtgtttagaaaatatttcctggagcaactaccattaagataagtaaagtgcttgatcaattttctatacaatgccatttctctttgttttctttttcctttgcttctttctgttctgtcttccgttttcacttttattttactgaggttattttaaagagaatcaattctttcccgagtaaattttattgcaaagtttgaatcatcaagccaattctttatatcacattttaccaattactacataatgcaactttgaatattctttcaaagaaaaccttacaaattttttttaccaagttcagttttgaagagtaagactttgca

SEQ ID NO: 60635 - DNA, 883 bp, Bovine  19866881160436
  misc_feature (1)..(1): n is a, c, g, or t
ngagcctaatgggcctggggtcacaaagattcatacttgacagagcaacaaagcacgcgggcgcacacacacacacacacacacaatttgccattattgctaaaaaatcacctacttttgaagttagctgaagagttgcttgtagcaatttccttccagttggcaatgtacctaagcacattatataggcattcattaaattaagtcaacttattagtaaataataaagtggttcattagtacatacttggactacttctaaaattctactttctctatgaaaccatagattaatgatgataaattcactagtccaaatgcttaatttcttgacttctcatctcaaagtagctctcatgcacctgaggcaacccctaggacaaggaattgtaagaggtatgaaaatggtgcccaccatctaccatattggtgccctttggcctccctccagcacacatctcctcatgttatactgttccattctgctagatcatgtcctcaactgagtgacagctaagatgttggttaacttctaaattcaaagtatgaaggggaaatttttgaaagtcatgggaaaacttcaacaacaaaactttatccttggttctggattgccagacctactgtctctgacatgtaaatttaaatcatttggtttatgatcttcttagagcaatgatgctgtctttgctgtgtccagtaaacacgagatcatattcaagcagggtatgtgcagctgccacttgagttccttaaacagagactgacatatggagaccagagtagcctgagaagaggtggacagggaaggacaagtatggtgagctgagggaaagctccaagggccaggtttcctgtgacttattccatctcattttaggct

SEQ ID NO: 60636 - DNA, 897 bp, Bovine  19866881243072
  misc_feature (1)..(1): n is a, c, g, or t
nagtatatgtgtatatatatatatatataagagccaccaaaccaaagaaaattgttagcacattcttgagccaccatgccagtcacaccatcatttccagctgctaagatgtaagtaccggtaatgacatggcttccaactgtttgatgctctgacagtcgtgtggggaggcaagaatgtttcatttagagagtattttgaaaaaagaaaaattatgatggagtcttttccagttgacttcatagactccccacacaaaacaatatgacatttaataaatacaggcctaaggaagtttttaaactaattctcattctcagtgttaatattaagtgggaattctagaattcttccttctatctttcttccagtttttccacttttcaaggcatgtaagtaacaagcatgtgataaaggaaacagacagattatgagacttttcttccctttttaaaaaatcttatgttagtgatattgtcattagcaatgttttgtatttgtgttgtattcgtctactgtctggaacagcttctgttcattcttagattcatagttcaaggtattacaggagaagagcctctatttttagagcttctaatctctcctatttctcttgatctttaatatgataactcttagatggccataatgcaaagtcatcatctaagatttttgtctgtaaagttaaatggaaatgctcatgctctcaattgtttataattttaaaaatcaataaattttatatgaaaaaattgaacctagagaagaatgtatgagtttaaaaaaataaaaataattaagatacagttgctgctccacaaggtttaccaaaatagtttaccatctagctaagggagaaaggtatgtaaacaaaaagtacagtaaaaattaattcca

SEQ ID NO: 60637 - DNA, 920 bp, Bovine  19866881331533
  misc_feature (1)..(1): n is a, c, g, or t
ngaaacttagaaaccttctatctcagagttctctccacctcagcactactgacatttcgggttgaataattctttgttgtgggggctctcgtatgtattacaggatgtttagtggcaatccctgacctctacctactagatgccagtagttcacctccactcaactgtgacaataaaaaatacctccagaattttccaaatgttccttgaggagcaaattgcccccagttgagaaccatctccttaaaggtgaggaatccaaaatccaagtggtcaccatctctgagcacagacaaaccgtacggctctggccacttacccactcctcatttccgagcacattctggtggtgatacgcccactctgtacccctagaaacatacctccagcgtggcactatccacactaggctggtgtgagctccctgaggctgggaccacgcctgctcacctgtgtatccccacttccagcacagtgtgagaactccaaaactgaaagaagaaatgaatgtgtggtttttaagccacacggtgcaatgctggatttgaccttgcaggaaaaccgatgcagagtaaattcaagaacaccttgaaaaattaatttgttgactttaccaaggcatttggtaacatccatgaccttaagcttcagttttgacagctgttctacaggtttggctgccctaaaagtagtcagataatctgaggttactctgtgacagagatctggttgtctcatgtcagcactgcaaacgttagtagagtgagttgaggttggaaaaacagccttactttgctcagcatgttctatgtactatgtttaagattgttaacaaaccctaaagccagcattttgagtctctggcctctaatcttttaggatatttctctaactcattaggctgagagcaccagccaaag

SEQ ID NO: 60638 - DNA, 1803 bp, Bovine  19866880408078
  misc_feature (1)..(1): n is a, c, g, or t
ntgctgttcttttactttggattgtggccctcagatgactgctatagtggagaaggtgttgcactgggatttagtagaggagggttcaactttagattttgccgccgactagtaatactcctctgggcctgtaacttaatctctctggctttcctcttttttctctgcaaaatgagagtattagaacagaagatccctgaggctggaagacgttagtatactattttctttctcattttccagatggcagtagaaacacagggagtcagtaattgtgccaggaatagtgccaacatataagataaaccacatttttcagagtttttaaaaagaggggcattcgtatatgtgcagttatacccctactttcttgcttttttaaaaaaattttaattgaaggatttataagtattgcatttactgtaagactgtacaacattgcattggtttccaccaaacatcatcgtttttttctttttttaaccactaggatcaacagtgacgatgaccgagtgtacgagccttcagttttgtcagtccttttgcttttgaggcaatgcagaaggtggatgttgttcgtttggcatctttaagtgatcccgaattgagacttctcctgccctgcttggtgcggatggcactttgtgcccctgctgaccagagccaaagctgggctcaggataaaaaactcatccttcgtcttctctctggagtggaagctgtcaattctattgttgcgctgctgtctgtggactttcatgctttagaacagggatgccagcaaagagcaacagcttaggtaatgaacattgtataatatgtgcattggtatttacttggatatgcttaaaaaaaaaaaaggaaatcaaaattttttggagctttttaggacttcttatcgcagcgcattcttccaaaaaagagaagattgggactctaaactttggagagcatttttttaaagttattttttatttataattaaaattctaggatcatttgaattctgtattgtgaaatgtgctgagaaccttggttgtatatacatttgtattcagaccttccctggtggctcagacagtagagtctgcctgctaatagaggagatgccatttcaacccttgggtcgagaaagtcccctggagacaggtggcaacccactgcagtattcttgcctgggaaatcccatggacagaggagcctggtgggccacagtccatggcgttgcaaaaacagcctgagctgacttatggatgtatgcaggctcaaatgattaggccagttgctctcagtgggaagtggatagagtaagtttcctaagagcaaaaggatttattggagtctcctgggagcttgttaagcttacattgagttccccaagtttgaggcgtgctttgtccttccttgcccattgtgggtccagttgtgagccactgttattaatggaagtgcgtgttaacctgtcagttgtgattggagtctttacacaggttgtatatctctgaaatagacaatatagtattcagaagtaacacattcatgaaatatatcagaagaattcatacattcttttgtagattatttctataaaagatagtttttatgcttttatttctgtgccagtgttctcataattgttttacatgtgtgtactttattaggcataaacttggaggaggcagtggagagagcatcctggtatcacagcttcagcatggactgactttagagtttgaacacagtgattcacctcgtcgattgcgtcttgtgcttagtgaactgttggcgattatgaacaaggtg

SEQ ID NO: 60639 - DNA, 2972 bp, Bovine  19866880647110
  misc_feature (1)..(1): n is a, c, g, or t
naagtcaaggttaagcttaaaggtcaagatctccctgctagggacttccctgggggaaaaatccacctgtcctcatggattcagtccctattccaggaactaagatcccacatgccacggagcaactaagcctgtgagccacaactaccaagcctacgctctatagcccacgagccaaaactgctgagccctcgtgcagagcctgtgctctgcaacaagagaagccaccgcaatgagaagtctgagcaccacagctagagaggagcccctgctcactgcacctagagaaagcccatgtgctgcaacataacacccagcacagccaaaataaataaacaaacaactttttaaaaacataaaagttagaaaaaaaaaccaaaaaacctcccagctagttgatggctaagtttggattcaaaacgatcacatctgacttggggcccatgctccttaatcactaaaccatatagctctgcacacacctgggatgctcggaggatatgctttctatcacgtagaggaccttagtctgcagcaaggagagagaattttaaaaaggaaagaggcagacataagaagtagagctagagttccaacagggcttgagtccttggtttgtcgtccctgaggctcaggagtatccttgttcttctccagacttaggttgtttcatcagatactccagttattcctgtaaaaatcccccctttccagtcagcttgatgtggctttctgccacttgcaatgcaggagtcctatttaaacaggaaacaagtagggtacttttgaagatcgtctaggtatgaacacccagagcagcattaaacagaacagtgatgtctgatccacactgggttggtttggttacaagaaacagagattgagtcaagttactaaaggtaaattagtcatcactaagacacaggttgaaagaagggattatagaagatctaatactctggttacctgatgcaaagaactgactcattggaaaagaccctgatgctgggaaagatagagggcaggaggataagggggtaacagaagaggagatggttggatggcatcaccgactcaatggacatgagttccagcaaactctgggagatagtgaagaacagggaagtctggcgtactgcagtccatagggttggaaagagtcagatatgacttagcaactgaataacaatagaaaaaaacatatatattcactaaattttaagtaaattgaaccacaaggcctcaggaagaggcctgcacagtggaactgcagcatagctacagtaaggaaggacactccatcatctctcagggctttttgacctctcagtgaatcagcaccactctctctagaccagccttcttcactgactttttgtacctgtctacaaaagtggccactcaagcctctggactctgatggccttccagttccaggatacaccaatattgcagctctcttctgtgtctcttattgtcggttcctgagagagcggatttcactttttctctccttttaaaccaaagtacatgaggcatatgtcactggatatagattatggtcaggtgtccaagtagccatggtcacagtcatgtggtccactgaccactcagtaaggtcagtggatagggattttattagaaactgatctgagaaggccagtaataactggcatctctaatcaggcccacttaacatataatttgaactcttgccaataagaaaaattaaacatgttgcaaacatgggcaacccattttcattaattatctcaagttggcaagagagttcgccttctggtgcttttaggcttgtgtgccatgctctacctcagactgcaccttcctcaagctcccagtctgcctgcacctaccctaaacactctctgtgagcgagactactccattcacttgggagtccattaatttttttcccccttaaccacactgaagactttgcttagtaaagcattttgaagatttagaaagtgactgctcagtctgcttaggatttatatcccaaacagatgtgccaagaagtcataggaatcaaactgctgttctgtgagtagaataatatattaacttgccttttagtagtgtcgattacacagctgtacaaattgcaatggagtcttcacagcttaagttgcttttatcaaaaatacatcacttcttcaggctggaagttttaacattgcaggcatctcgatgggcatgcatccttgcaaaatacttattatttgagaggaaaacagtccagaaaattgagatatggcagtgcttaacttaccttgaggaattatctgctctctttttgaactggatcatttcatgatgaaaataaggagtgcctaaataacagtaccatcatctcatacttctagtttttctgagtcttaatgtcctcaactcttatgtcaggatattagcatccattttattgggttgctgtaaggagccaatgagagttttataaagagctcagcaaattgctaaacataggaaatgctcaataaatggtagttactattagtaacattgtattttgtttctcacttcatgatttttcaagggtttttttttgttgttgttgttgtttgttttttagcacagagtctcattttctccttacaacttgtgggaagatatggtggtaagtggcttccctggtggctcagatggtaaaaaatctgcctgcaatgcagaagacctagatttgatccctgggtcaggaagatcccctggagaagggaacagcaacacactccagtattcttgcctgttgaatttcatggacagaggaccctggtgggcctcagtccacggggttgcaaagagtcggacacgactgactgactaacacactgtgcggtggtaaatactaatcccattcctggggcttcctaggaggcactagtggtaaagaacccgtctactaatgcaggagacccgagagacatgggtgcgat

SEQ ID NO: 60640 - DNA, 2613 bp, Bovine  19866880847189
  misc_feature (1)..(1): n is a, c, g, or t
naagctatgccagcttcaaagctctggagaccagaactctatcctatacccccctgttactaggttaaaaaaaaggaaaaaagagaaaagaaaacagctgcggaggtccaattagctcctagcagaaaggagaaagctgaatcccacttgagcacttctcaagagtaatcagaaacaaaaaaactggtagccaaagccatcccctcagagacccatagactagcaggatcatgcgtaacaagagccgtgagcagaaacgttctgcttttcagcaagaggagctggccttttaacagaggggcgggctgagagagcagaggcaaggagacctgagcgctcataggtctcgccctcgggcgtaacgtgaaccaaccagtccctccgctggagaaaagtcgggccggtggcggacacggaccccgaaaacgctccgaggccttagaagcgggagccttataccttcaggtctaccctccggcctcccgggaccccacacggattccgcgccctaccggcggggcgcggtagaaatccagagcgcggtccgaggttgggcctaggcgagaacccggcttccccagccctacagctctgccctgagtcgacctgggcaccaaaaaccccagacgtcgggatcaatcaggccggcggtgcgacgggggctggatggggacaccgcgcaaaggcagagcctggactgcagggacggaaaagctgaggcgactgtttccacccgcacgcagcaccttcattcatccccagcgtctggctccggtcggccaccgtactggactgagaggaaggctcgctgcgagaggacacccggaggcgtcggcggtgacgcagcggcgcgcgtgcgcggccccgccccttcctccgcctccgttagcgctacttcaccctggatggctgtctccagtctcatttccagagcataccggctgaatccctttagctaaatcattaagcctcttcgcgctgccgtgtcatcatcaccggattactgtggcattcaaatgacagcgttatgtaaaatgttcaggttgccgcacggttcagttggccagaacgctaaatggaaaccagacagttacacctttccgtctctgcttctgcctttccagcaccgcagttctttccagcaccgcaaatcctgggatttgcaggagaatttaaaaagtaatctaaccctgaagcattattctgctcttgatctcaaaacacagtcatgagttaaagatggttattttgggttctcaggaagcatagatccttcgtgggcgatggatggcatttcaggagttctctagaacccctgccgaattgtgaatgcttgagcttcttgtggaaagagggtccaaaactttgaacaacttctcaaaggactttggaccacccagaagaccaagtatgcaatatatttgcatattatttctggtttctggttgaatccatatgtatttaacactttctattcaccagatattatgcgaggtactgaaacaaaaatattttacagagatacagtactttatattaggttggtgcaaaagtagaggtttctgaccatgaattttaagtcattataagtaggctcagacacatctttattaatcaagataggaatcattacaataaacattattgccaaagagaaataaatttgtttattcctgtagaataaaaacccgtgccttaggattcgaggaactcttggaaagcattttctgcctcctgctgattgtggaagtgttttccttgcaaaaaagttgtcaaaatgcttgaagtggtagtcggatgacaagaggtcaggtgaatgtggcggatgaggcaaaactttgtagccccattctttccacttttgaagcattggttgcgctacacgtggtcaggggttgtcgtggagaagaattgggacctttctgttgaccaatgctggctgcaggcattgcaggttttggtgcatctcatcaatttgctgagcatacttctcagatgtcatggtttcacccggggattcagaaagctgtagtggagcagaccagcagcaaaccaccaaacagtgaccatgaccctttttttttttgatgcaagtttggcttgggaagtgctctggagcttcttctctgtccaggcactgagctggttgtcactggttgttgtgttaatatacaatccaatcaagaaatggtttgttgttgttgcatagaataagagttcagttcagtcactcagtcgtgtccgactctttgcgactccatgaatcgcagcacgccaggccgccatgtccatcaccaactcccagagttcactcagactctcgtccattgagtcagtgatgccatctcatcctccgtcgtccccttctcctcctgcccccaatccctcctagcatcagtcttttccaatgagtcaactcttcgcatgaggtggccaaagtactggagtttcagcttcagcatcattccctccaaagaaatcccagggctgatctcctctccttgcagtccaagggactctcaagagtcttctccaacaccaaagttcaaaagcatcaattcttcggcgctcagccttcttcacagtccaactcccacatccatacatggacca

SEQ ID NO: 60641 - DNA, 801 bp, Bovine  19866881711459
  misc_feature (1)..(1): n is a, c, g, or t
nccaaatttttgtagtgaatctcaaaaaggcttcctacataattagtgggagacaatgatggaagtcactcctggcatgggattttaaattcctggtcttgtgtgttttctccaaatggagcagtctcttcacacagctctaataagaggtgttttattcacattatttatatgggtatctttaactttgtattccagatagtaaggaaaaatttctacacgggaaaaatatgtttacaagataactatattataaaaagctagtttcattgtgtgtttgatgtcatgtaattaagtcaataacaaatgaaaaacttttttttggtagtcggattgcaaattcactttctcagatcaaactttatgaatcagtttgctcaattttaaagtaaataaatgcacctgggtttctattgcagcaagagagatttactcaacaagctcaacatagatgtatttgtactggatgaaatttacatattaatcaagttctaattgccttttttagccaattgtatgcaaatatatttgctggtatttaaacatttttcagaatgtttggaaagtgcccaagccaaaaacactaattaacaataagaaagcaaaatcaaaattgtttgatattttcatacttaagagaaagaactctttgaaatgatattcatgatattggtttatttttcagcccttatataaattcacaatcactagattaattttaaaattatttctcctattctctatatttcctgcatatcttaatttctgattatcattaaagtatctttgagttttcactaa

SEQ ID NO: 60642 - DNA, 759 bp, Bovine  19866882158530
  misc_feature (1)..(1): n is a, c, g, or t
nacttttgatataattctaccatgaaagtggttgaactctagaggaaataattttgtaagattgatgattaaaaaaaaagtatttgtttgcaaggactgtgagttcttacaagtgtgttctttgtaagacagtgtgttcttgttttagttctaagcttcctatttgctcttttaaaatttatatggcagtatataataaggacttatatgttgtttttccttaaattgctttttcttagtggaaagtcaagagaaatagaaggatatacgaatattcacagtttatgttgaaactatccatctgagatttttgggtagacagaatcttaagttttataataaactcggggttatactttatcttcacttaatgaagtacagtaaattcattttctctggaattgatcattatgggtttccttttctttgtttgaattgcgtaattatttgccatactattcagtgtcatcttatttggtataattgtcttcagttacttacttaatgtctgttttgggtttctagttatcttaagcccatttggactaaatggcactctcacaggacaggcattcaagatgtccgattcagctacaaaaaaattgattggtgaatggaaacagttctatcctatctcatcttgtttgaaggagatgtctgaagaaaaacaggaagatatggattgggaagatgattctttagctgcagtagaagttcttgttggtacggattctgagtattaatcctaagtgggaaatg

SEQ ID NO: 60643 - DNA, 3074 bp, Bovine  19866880358488
  misc_feature (1)..(1): n is a, c, g, or t
ncatgcacggaaacatgcaaataatgaaaactctgcaaaagaaatccaagaagactctgttgttaataaacatgtatgaataacatctcttgacctcttccatctcgagagaaggaatgattaaagatgcatcatttaacagagatgagtatgaaaatatttataattttcagggtcaattagcaactctgttttcaccttagcaggaaatttcaaaagtttaagtgaccattttcatcttgtcaacacactttggaccactttgttcatctttcaaactcagtgagactttgtaagcttattcatagtttgtaattcactgaagcaggcaaccagttatacattgtgtgtttcaaggtgataaagatgacactttggtgtctcaactgataaagtattcagttcttccataaggaatttattatgatgttcagaaataaaaacaacaaaaccaacctgagcatgatgctatgctatgctaagtcacttcagtcctgtccaactctgtgtgaccccacagatggcagcccaccaggctcccccgtccctgggattctccaggcaagaacactggagtgggctgccatttccttctccaatgcatgaaagtgaaaagtgaaagtgaagtcactcagtcgtgtccgactcttagcgaccccatggactgcagcctaccaggctcctccgtccatgggattttccaggcaagagtactggagtggggtgccattgccttctccgtggagcatgataggaatacctatatgagcaaggctgatgggtcactgggatagacaggtgggaagggagagcttgccttacttatatttctatgttctccaaataattatagcctaaactgacagtgttgcaaataaattgccatagcttttattgatagttgtaaagtactttggtgcaactcttctagaaagcaatttgtccataagtttcaggcccttagacatatttcctcagccttcatacagtggtggtggtttaattgcaaagtcatgtccacctcttggctacagcccatcgggctcctctgtccatgggattttccagataggaatactggagtggtttgccatttccttctccaagggatcttcctgaccaagggattgaaccccagtctcctgcattgtaggtggattctttaccaactgagctaccagggaagcccatactactgggaactaatcttgagacagaaattaatccaagagaagaagaaagtcacctgttaactaaaaatgagatatatgagggctgagtaaggcaagtctgtgcgaatggagaagacgtaagagattcaagaaatgttagaaggtcaatatgacctagtcaggtgatatgggggataagtggaggacaggaaagggaagaagaagagagagcctagaatgacctccaggtttcagacttggtcagctgtcttggctcactcgtttagatacaaaatacacaaggagaaaaacatactggaaaggttacccaaggtttgcattgagtacttgtattgtatttgaaaggtctgtgtgacaaagatgctgagtagacaaaaaaaagaagaaaacggatcttggattagaagatacagatttggctggagatgcagatttggaagtcataagtggtcactgagaagcaacccaacaaaagaagtgaaaatgtatttattgagtggaataatggtcgttggtaaacattgtgagggctgtgttgatgcttaggaaaattctgatgagcttcagtaaaatatgggaataaaagacaccactgctatgattataattgttatgcatgtggacaaggacaatatgcagacaataaacatgaaaatattataatttgaatgactggtaggatgatgaaaatgctttctttgatttgctattaacattgtttttactatgtgcaacaagaatttcttgaaaatatttaccaattttacctacatgttgctgtagaattacaagttgaggaacattcttagaagctcagataggatgggcttatggggtagattttacagctgcaatcccagacttagacctaatttattgttctaaacattatcaaatttcagtattgttattacagtggaagttttacaatggtattctaaggtatagtcatttatgttttcgtatttaatgacagctttctttgagatttattgggtgaatggccaacaacttgacccttttcttcttttttttttttaatttaagcagttgattttgttgtattaatttatgctgtatagcaaagtgattcatatatatagatacacacacatacacatacatgcatttttttatattctttgctcttatggtttacaacaggatattgaatgtagttccctatgccgtatggtaggatcttcttgtttattaatcctatatataatactttgcatctactaatgccaaattcccagtctgtccttcccccaccccccttcccccttggcaaccgcaagtttgttctctgtgggtctgtttctgtttcatagataggttcatttgtttgacccttctgttctaattagagttgccagataaaatacaggttctccagccaaatttgaatttcaaataaacaacaaatatatttaaatataaaaatgtttagtatatgcagttttactatgtcttatataattattcttcactctttatctgaatttcaaataaatcagacatcatgattttttttcttcactaaatcaggcaaccaagtctcagtattaagaaggtgaaagtgaaagtgaagtcgtgaagtcatgtctgactgtttgtgacctcatggactgtagcctaccacactcctccatccatgggattttccaggcaagagtacttgagtgggttgccatttccttctccagagggtcttcctgacccagggatcgaacctgggtctcctgcactgtaggcagactctttaccatctgagccaccaggggagtcttattaagaaggtacttttattctaatatggaagcctagattcaacaggcactggcaagccattgacaactgagcacttggaatatcgca

SEQ ID NO: 60644 - DNA, 742 bp, Bovine  19866880408589
  misc_feature (1)..(1): n is a, c, g, or t
naactgtattcatctcctgtgataagcctaatggaaaagaatattatatatctgaatcactttgctgtacagcagaagttgacaacattgtagattaaaatatctcatgggaaaaataaaataaagaaagcaactcacattgactgaagggctcttgattcaggttgtaaagatccaccttcacaaatctggggtcttgttcttgctgacctctaccattttggaagggctgtaatactgggatggagcacattcaaaagggctctagtccggggtcacacatctcatcccagtactaaaccatctttcccagcaatctgcatagccaccaggtttccttgcctccctgcactgagtcagaggctctgatgctgaccacccacttccaagcagaatgtttaaagcttccagggtcaccgggcagaatcctggtacaacacttgatttgcatcattgtgtctccagctccaaacattcctcagccacttttaatgtcaaaaaggctttgattacttctgaggacactacccactcctctcctccccttggcaaacatagagatttagcatttcatttcctgcaaacaggcgctcaaaaaccagctagatgaatatcaaacgtgcattcccctaaatgacaggcactctccaaaggatccctcaaggctcaattatttgccacttctttgcttggtttcatatgttagcattccttcccagtctctagcgaaaatcataaggcc

SEQ ID NO: 60645 - DNA, 1935 bp, Bovine  19866880615383
  misc_feature (1)..(1): n is a, c, g, or t
nacgtttattaaaaactggcattgacatccaggtctactgatagtacaggtgctttgtagttttcactcctcataatgatattactattacaactttgtatactcacatgttacagctcagggattgccagacaagaatggtcaaaacactatttgtaactaacagtaaacctgcttgactactactttaggtaaatacttattgtctagtggtttaggtaaatacttatttaggtaaatacttattgtctagtggtttaggtgtaggtcatctgcaagactcacacttcaaattgtgtgtcccatggactaatacatgtttcccctgtcatctcaaggcagagcattcccatgaaacctttcataaacccaaatggcattaaacaaagaaatgattaccttaggaagaccttgctattgatgcacattataaattgagataactcacagatgcttggagatacagttcaaagctctggcaatttgatgctgagatgctgaaggcaggaccgaggtaggagcttagtggggccgttctcactgctgggggagggtgtgggtgtgctgccttggtaaagactccctgcaaacaaacactgaaggtattttcactttttgctctttttcagaaaagcaaacatcctctttggatttcttttggttagccaaaataagtattgacatagccctttcataaaagtgaaatggcataaagagaattttcagaaagtgggggggacctatattgatgtcaggcttaagagagcatgatcacgttttgtcaaaatctaaaggcttttacattcaagcagaagttcctgacttttatggagtcttctgtgatttttacccccacactctttcttcttggaactacagacaaattttcaagatggaagtaagctaagtagtaggcttttcatttttccaatgaccctgaaatgcagagtttccagtgactcgtctaagaccatacagctagctgatggcagggctgctcagcctggattactctgtacacaccaaggtattccatttagtttccagatcagggaagcggcctaagttatcttttcctctttacaaccaaatcttcatgcagctaagcacagacatatgcaggcattcaacacacacacactattatgtttttaagggctttctgttaatcactgaaatctgtaattcagtccctgtttggaaacaattcttttctcagtgactttggtgggggacaggtatatattgtcatgtaactcagcacatgacctgctttggtgaccttcttaacacctggaagcacatttgtagctcgggaaaagtgtgcactttgtagattaagcagcgattattggccatagatcacagaaagttgtcaaagctgatgaagggtggggtatatggaggcgtcaccaaaaaacacgtcttgcatcaaattgtcttccccaaggatcaaagattttgcttacacttgttttaagttggttccatggggtctgttacagaaatatcataaaaatgctggggaaaataaaaaagcctgtgtttagcagtaccactggagaaggcaatggcaccccactccagtactcttccctggaaaatcccatggacggaggagcctggtgggctgcagtccatggggtcgctaagagtcggacacgactgagtgacttcactttcactttttattttcatgcactggagaaggaaatggcaacccactccagtgttcttgcctggagaatcccagggacaggggagcctggtgggctgccgtctatggggccgcacagagtcagacacgactgaagcgacttagcagcagcagcagctgtaccacagtctgtgttcagtgctgaaaaatttacataatttgtaatcctgacggaagcaggaaatacattcttttctgtctgaagatatcatcataca

SEQ ID NO: 60646 - DNA, 876 bp, Bovine  19866880676496
  misc_feature (1)..(1): n is a, c, g, or t
ngtgctgatgtaaaagcacttcaagttctccatccataaacactgctatcctcccagagcaagaaacgggtgattttctcaagactttagtgtcatttctttttctttcccgttaattattttatttattttggataggggaggatgtcagtttttcatgttatctatttttgaatgaaaagatatgatttttataacaggtacagttttcctttaatctttaagtgcctgcctttaaaatgattcttagaattgagaccctgaccacttgcccttgttaaatatctggtgatccttctccccaacagatgggaagggcctcctgatatgcccctggcctcatttcaatgtgggtaattgcattctgtcaacttgaaatttccccaccagtttcatctgcctgggctctgatgcctcgccctcagccctgagctgcctggcgtgccgtcggaggctggggagcagctggcgctttccacccagaagtggacacattttagtggcaggtgcaaaggttttctttggctgaatacaaattctgacctaggaatacgcttcatggatgctctttattttttcaatggatgcaagtaactcctgggaaaccaaaaatacaaaagtatttaaggcataaatttgaattggaagaaaaatacacgttcactaaaaccagtctattgtgtgatcattttgcactccatgaatcttgccaagcttctagatttgacagtaagaagaaataaataacataaagtaaataacctttccccttctgaaaggaagaattttatgcaaatctacacatacatgcatatacacgcacaatacatgtatatcccaactcttaacctctctctggagagtctttctcagttt

SEQ ID NO: 60647 - DNA, 1159 bp, Bovine  19866880686940
  misc_feature (1)..(1): n is a, c, g, or t
nctcgatctgtgggtcaggaagatgcccctggagtaggaaatggcaacccactccagtactcttgcctgaaaacaattttatggacagaggagcctggtgggctacagttcaaagggtcgcaaagaacttaacacaactgagtgactaagcaaaagaagccttgatggatgggaagagccaaccaatagtttgcttccaccataactaagaagctatcctggaaggaaaataatgaagcacgacagacatcacagttgcctaaattgtattttcaggagggctgaaattccacatcaggtaattaacaattctccagcctgttttgaaaagactctggttagaaacttccctgggggtccagcggttaagaatctgcctgcaaatacaggggacacaagtttgatcactggtcctggaagatgccacatgctgtgggcagctaagcctatgatgcccacgttccctagagcccatgctccacaacaagagaagccccactcgccacaactagagaaaagcccacacactgcaacgaagacccactgcagccaaaaagtaaaataaaaaaagacttctggttggagttgaagttcttcaagagaggtcttcaggtcctgggctgggagtcagagacagtaaccactggggtgtctgtattctcttttctgaaaagccccttatggaaagaaggcaaaataatttgttttactcattttctctgtgattacatgttgaaaaatttaaattatcctttttggaaagagacaaagggaaccacatacatgaaaattttggcttatgttagttccagaaaaggtgccaaacactggtaacatacacaaaagaaaaatgttacctttctaatcagcagaatggttgcacataatagctaattgatttggggctgcatttaagacattagcctcaacaaggggaataccatttatagtctttatgaaattaaaaatagtagctctgattggaaacttcctctctgtcagcaatttccaaaagaagattcaggactggtgaactgaagtaaaaccaaggacaattcctagttgttcaatgaagggaaacgtaagtttttaggagtgtctgctatgctttccaggaatcaaccaactactgccgtgtgataaaactctactgaccaca

SEQ ID NO: 60648 - DNA, 1826 bp, Bovine  19866880705285
  misc_feature (1)..(1): n is a, c, g, or t
nacaatgtaacaatgggacataatagccgccttcctattacattgtcgtgtccactttgtgccgtttgccaacacggattctcccattgtctgtccacggaggaataatggaccattaagaagcgcagtgcagagggtcagcacagcatttacctattggagaacagagaagccatcacatgcgtctctctaggtcaataagcaagtatgggtgtgaagaaggtgcgtcaaaagcccattctgctcccaatttttacacgtggagtcagggtgcaggctctagtgctgagaagagcccatccactcatcaactcctggaaatcaattttgtttcctgttcatcctttttgggaaccaggcaggaagtaaatatgaaaactgtgccattgactgaacaagggttcagtggggtcctcttctgagttctgaggactgcgctatgtggaagaaaagacagacaagatggggattacctcctaaggggacaaggaagcccggaggagaagcggcctgtaacgccccatgctcctgaagtgctgtacacggtgtggtgtgtgtgtgtcaaaccacagagaccgatagggcacagcggaatgctggaaggagagagcttatttctgacgggagataatggagatgaatctgagctctataaaatgtccctttttcttactctataatatctttctcagctttattgatgtgtgatttacatctgatcaatgccccatttccatgtatagtctgatgagttttgacaagtacatccacctgtataccagcataacaaccaagattgagcactttcatcgccctcaaaggtcctgattcctccttgcagtcatgcatccccagctgccagccccgcagaccctgaactcccccgtcattacagatgcacgttgcctttcccagaaactcacacaaagagaatcacaagcatgtacccttttctggttttgttttttgctcagcgtaatgataacctttagacataagaaggaaagggaattttagtgtgagcaaagatttagggtcaggtaattaaaaggtgagttcaaggacttgcggggacagctaagttagactaaagaggcctgggaagggagacacacgacccagccatctgacctcacacagcctagaacctgtgaacaattgtacaccaaccctgcaccagtctcctgctctctcaggatactcagaccacactgccgcaggacatttgcacgtgctgttcccactggctggaatggccctctcccagactgcacacacctggattctccctctcctccttgggcctgtatcaccacatgttcttaaagcccttcactgcactaggcacaatctgtggattattttatttatatatttcactaaaacagactgtcaagaaccagataatagagaacaggatggttctgctcataaatggacaaatcaccaagacttgagagacgctttctggtttggttcatcttagccactgaaagaatgaagaagcgagtgagtgaaagaatgaatggtaaatgtgtaagaaatacctctgttttcacccagtcacatatatcacctagggcactgtaactcacacaacactctgtgacaaacaactctccacctttcttcttctaaaacacccttgtgtcattatataatttaaaggcaacagagtcttgtaaatttgcaataccaactcccagatggcagcatcagccctgatctatgtgtgtgcattttggggcaacaagacaaaataattaacatccagaaagacctggaagaggctaggtgtcaaagtcaccaagactaaaagacactaa

SEQ ID NO: 60649 - DNA, 1537 bp, Bovine  19866880766740
  misc_feature (1)..(1): n is a, c, g, or t
naatgtgtacaaattactctttaaagagaaagtcatggagaaaaattgatgcacttaacaatcacagtgagttgtaaatattttcccatgcatatttagtaagaacaataatggctagaacaatcatgaatgcttatttaacagaatgagagtcattaagatcacattttggttagttttcccaagtggatgaaggttaaccaaactctctgaaactaagagatactattatttttccagaggacttttcggcccaacaaattgtcttaaggaaatctcctcctaagtgataattgtgatctagttgcttgccagctgagccccacaaaatgtgccactaggacagtaacacagagtaaatagaattttcatcactattttattgagagagttgtgaagtcaaaagaaggtgagagaaactgttggtgtaaggcctgcttcttaagaatgatctggactaaaaagacatgatacaaatgaacttatttacaaagcagaaagagactcacagactcagagaacaaacttgtggttgccaaggggaaggatgggggaaagggatagggagcttggtaccaatgtgtacacactgctatatttaaaatgggcaaccaacaaggacctactctatagcacagggaactctgctcagtgttatgtggcagccctggatgggaggggcgtttgggggagaatagatattatgtatggctgagttcttttgctatccacctgaaattatcacaacattgttaatcagctatactctaatacaaaataaaaagtttaataaaaataaaaagtatgatcttgaaacacccttaaatgtctgtgttcaacatcacttgacttgtgaactcagcttgtactggtctgcttcaccaatgtttctctccggatgacttaccttccatgaaaccaataagtggacctttcaaaactaaaagtgatcaggataacaggtctttttagtaacttttgtttttacaaggttcacataaagttcaataaagaacagacagaaccatgatatcctgatagaaattgtatcagggcctgctgaagggtagggtacagagcattgcctgggagcaggaccgtgggaagtttttggaaggaagggactgtccttatatcgattgccatcgcgcacacctgcatgctgagttgcttcagtcgtgtccaactctttgaaacactatggattgtagccctccaggctcctctgtccatgggattctccagacaggaatactgcagtgggttgctatgcccttctccaggggatcttcctgactcaaggatggaacctgggtctcctgtgtcttctgtattgcaggtaaattcttcacccagtgagccacctgggaagccagactggggtggaagttaaggttatacacgtgtgtgtgttagtcactcagtcatgtccgactctatgctaccctctggactgtagcctgccaggctcctctgtccacggaattctccaggcaagaatacggagtgggagccattcccttctccaggggaccat

SEQ ID NO: 60650 - DNA, 4972 bp, Bovine  19866880779030
  misc_feature (1)..(1): n is a, c, g, or t
natataaattttttcttttttaaaagacaccttatttaatatacatttttgatccattaacactgaactcattaacatataactcatgcctgaaggtagcttatctaacatacatatattctccataaggcatatcgcggccttctcatgctagctttagcactccagcactatacttgggagtgattttaaacaacaaaatgccaataaaaggcacaaaaatgtgaagaatgttgcactaaatagactacaaaaaggacacttgtttacggcaggggagctgaaaacaagaaggcagagtgtcaccgtgtcccactgcagttgggaacatgccctttggtgactcaggcttttcactgctctgtgcgtgtcagcaggtaaccatggaagcaccacaagtaatgatttgggaggttacacataaattttagcaagtaggcaaatttggaaatacagaatctgttaatagtgaggatcgacgctatattcactatttggttatccataaaatacaagttctttggagtttttttcccccatttgtatgtacattaagaagtagtcttttgcgtaatttctataaatgaagttctttagtagattcatcagtcatttgagagcagagtcctgaaatagaatacttagttgctagcatcttgcttggaataaaacagaaataaacagttgttctacaatgttcttattaaggcatgattgggatcagtacctggtgccatctgatcatcccaaaggcagctccattcctcaaggatgggtccttcccccgctccccagcaacgacatctgggcaaccgctgttaagctgcattagtaaaagacgttgcaggagtgtcatccagccaaggctccttccagctctgagtatcagcgatgctgccgtcttgtacagtagaccaaactctgtgtggcattgccctgcccagagggtacactttccttccgtcctctgtctcagccagaggtgcctcttaaatcgggagatgaatacgattcttcaagaaaagacccaggtggactgaggttatcatgacaggcactggccttggttcaccgaatttgcctctgtgttgaggggcttcgtccagagtgactcgcaagtttactcgtacctttcttgcgtgctaatgggtaagtacactatacacgcatatcctcgacacaggtgtctctgggtaggttagcagtccttcccccagtactgcttggtaaggcaagcctgatgcaaaatctccttacctttcttacccaaagacccccctaacttccaggaagaaaagtcagcaaggctttatcttcagttttgtgaattctacttttggtgcagctggagaggctaggctgccagaaaagctggtggcctcactgctagtcatgtagagaacttggaaagcctgcagagtacttgtatccaaactggactgtgttttaatggaagctggctgcatgtcccccgtgttagaaggatcctaatgaaagcacctgctttttaagttcctaaaggtctggttgttcacaatccccaacaataaaaattaatttccttatgggattgggaccctgatcaacttcactcagtcacccaccctgtgggaaccaggatagtggaaattgtggaattttcttaggaacttaagcgtccaaaaatatacatgtagttgaagtggggggcaggggggaagtgtattgaaataataaaatttattttttatattcattaataaatgctgttgtgcctggagatgatcaatcatataacattgtccagtttttttctttggtttggttttccttttttgtcattgtgttatttccaaaaagctaaataaataatatttttattttttagtttgagcctttgccctcaatttgttgcctcccaaatcactgcacactctttctcacggctgtaacacacacacagtataaagttcacatttagtaactaggcatttgctccaggaaggcagacctcaagcactagactttgtatgtggaatccagctctggataagcaggaaaggacacctcagctttggaagtgatttcatgtaattggaagcacttgggtacaagatactaactaacatattggtcccttttttgtttcattcgcactgttgagtttctatattatgcattacagagttaacagatagggtgtgagtgccaccactcctccaaagtgtgtctaagctcataagcctcagaatctgacatggtcaggctcacataaccccacaggtctgtgtgcccttttcttataaatctccaccattttctggtgagctgcaggacaagtagaaataaaagatgaattgtacaatatatatttggttccagagagccttgctttgaagatacctgcattgatgggcttagggagtgtggagcagggactcaggaaaactcaggcagtggaacccagggaaaagaagacacagtctcaggtggaaaaaacaattccctctttcctctcattcggcttctgcgaagttttaataaagtgagcattatttttgttatttgcttggttttttgttttgttaagtttttcctagtttattgccctgtgtcgtggtggtggcagcagccactggtacgtcatgagttcagaaagaagacttacagtagtgtctttcacaaactgtacttcggacaatatggacagtatctctgtaatcttatcccaggtcttcttttctttcttttttttttcaattgtggaaaatttaaaacattgaaaggtagaatggtataatttttttcatcatctggcttcaaaaaatggtcaactcctggccaatcttgttttatctgtacccctaccaatcacactggattattttgaagcaaatctcaggtgccatattacttcataagtgtttcagtatatagctctaagacattaaccatagtgctattattgcacctaaagaaataaataactccttagtatcatcaaatatccagtcagtgttcaaatgatctcagaaatgtgtgttttacattttgttccaaatcaagatctgcatgcaatctatgcatcagtgttagctgatgtgtctcttaagtttctcacaccctgtaggtcttcttcctatgtactgttacactttcactctttcgctcccttgcaacttattacttgaggaaatcagatcatctttttttctaaagagttcccagtctggatttagctaactgcatcattgtgattacatattcctctgttcctgtatttcttataatttaatgattagacagaactgtaccatagccatctatggctgttgggcacttgaaattgagtttgaactgaaactgagtttgacttgagatgtacaattacacacgtggctcataaagttctattggactacgctagaggtttgatcacattaagatcaggattttctggcgcaagtatgtcgtagacctggtactaaatacaggaggactaatcggttgtctccttttgtgattttagcagccattgttattcaagactcacttatttggatttgcaaaagacttgacagtttaattgtgcccttctttacttcagctgggatattaaaaggagaagcatcacctcatcaactatttgattacacaggaccaggatttgtataggaaaggcaaaaaataaacacatgattttatttactagtattcaaaataatgagttgcatcctctaaaagttactagtaaattttgtttttaagtgtcattatgaattcggatctaaatgggtttttctttcaacccattgttactattttttattgatcgcttcttgtttggccagtgggagcctctttaactccgatcctgagttcccactctatcccagtatcctgttccaagtttacctcataggtgtagcctatactgggcttcccaggtggtgatagtggtgaagaagctgcctgccaatgaaagagacataagagatgtgggtttgatcccttgattgggaagatctggaggaggagtggcagcccactccagtattcttgcctggagaatcccatggacagaggagcctggtgggctacagtccagtccatagtgttgcagagagccggacacgacaagcaacttgccacacagcgcaatttagcatgcagcatatagcctatattctctatgtattgaacatatataaatgaaaatagagaattaaaatccttcaaagactaaccagaaatgtgttaattcatcatgtcctatatacaagaaatttatctcgacaaattaacaggagacactagatttgtgagaaactcttaataagagcatttaagaaattagataagtacagggaagattgggaaataaaagagattagttgtatgttaaatactaagagtgttcagtgggagtgtctgagtttatgacgtcaaagaatttgctatagccaaccaatttaatcactctaaagccattcatgctcctatgtccacgtgatttttgtgcaaggattattgagaagcttagctgggattataccatctgttgtagcaatttacttccataaattttgtcctcagagacgctatcttgggaattacaaggtaagtgcaaagtatgtcttattccattcaaataagaataatatatagaaagagtgtgaatgctgtgaagtattagctgtgacataattttgggagtagagattacatgaagcatttccaactaaatttttttaaaaaaattacttataaccagctattcccacataattaactgtttacttttgggtgtacccattagtagtttctgatttgccacacctgactgtccatgaagaatttgtttccaatgaaggttccattttccttttggaataagctgggtttttcttagtctctgaagcaaagattgaagtcttggaggcaactggacttagaatggataactagaagagcagcagacacttttcaactt

SEQ ID NO: 60651 - DNA, 1621 bp, Bovine  19866880815588
  misc_feature (1)..(1): n is a, c, g, or t
nattcaggatagagaagagcagaatactgacccctgagttaagaagcctatccaaggggtgatttccatgagcccagattcttgcatttttcctgtacacagaaaaacactaaattcgttaccttgagatgtctagttttctttaattaacagttatcttttgatgttctgactactggggttttgctgcaaaagctctgtgggtataactggcttctctcttgtctctttggagcagtctgtcagagctacctgagaggctgtcactcacccagccttaagtcctcagcaagttcaccaaacgaaacacaattttcaactttcaggttgtgcttcccccctccccccaagaagcgattctcagaaaaccagcagcctcatgatagcaggagggaaactgctgaaattcacattctcaggccccaccccagaactagtgaattgcaacctcaggggcccagacatctgtgcttccacaagctctgtgagtggtagagagcagtaggaaagaatctttccttaatacctaccactgtttttatgaatgagattcacacacaaatataatagccagtctacttcttcacatcagtatccattccaggagattcttcatctgaagcttctaatgtaaagtgtatcatttttcatatcttcaatgaccttacttttcaaaatagtttagttttttctaacagtagcaagaagtaaaaaaaactgttgagtgatttaccaaccaattcccaacttgaacattttattgaccaaaacctaacatatttttatgtcttagccctggcatctttcttttttaaaaaactgctttcaaataagtatttattttccaatgttctgttttccctctttcacaaatcaagacagttgatagtagcaggggcagagtggggggggtggggcgcttccctaatctacaaactgccctgtccactgattatgtatgattatgttatgcatttgtgttttgtctaatctgccatttcctgttgttttgtatttgttcccaatcttcaaaaccgggacaaaggcaaataaatactatctgccttgttttcctcttccaatattttagaggttggaaaatttacaaaataaatatccactcgaccttcttataaaagcattgcaaaagagcaaaagaaaaactgagtaatagtttccctaatttaaaaatacccagctgaggcacaatcaaataacaaatagctgcactgatactactttgacaataatcagcaatctgaaattaaggactatgattcttaattcattatccattattcatattatttggaggataaacttaaatatgtttaattggtttgcacagaaataagagagttaataacataagtgttggtaggtagtagatgaatgaaaacattttggaagggcatttaatcgctaccatatttcttgggaaatagaaacctacttggtgactgcggttcttggccttggtgagaaatatatttagtgggctcggaaatagatattttcaaggatacgaaaggattagcccttctaatcttccaattacctggtcccagctgaacttatatttaccaaacaagaactggccagaaaagcttgcaactagcaa

SEQ ID NO: 60652 - DNA, 1822 bp, Bovine  19866880866682
  misc_feature (1)..(1): n is a, c, g, or t
ntcttttactgcatacccatcttcacagcgttttcagaatcctagctataaactgtcatatgggcaatggccatgtgttctctctggaattttgccaacacagaagagctgagaaagatcttttcatctctgattcagacgaattttcaaatcacaaaaatcattctggcccttgccaacccagggtctggttactgtcagttaaaagaagatcgtgtttactcctatagctggcacctggttctaggaagtgcagttgatgagctggccactgaaatctcactgccctagtcttgaagattggagagaggggaacagagtgagcctcacttgtccatgagctccttcactaactccaaaatgctattagagctggagcgtgaactcttcaataattaaagaggtaacacagcagaataaatcaacagcatgccaaccaaggcaggatttgtgattcatgtgtcattgcattttatctccaccagaacgctctgaatggtattgtccctttgatggatgaggagtttggattcagagaagttggcttatgatgttcacccagctaatagaggcacagaagacacaaattcaggcccatctgagtctacagattttccacgctcattgatggcactggagtagtggtgtgtgtaattccccaaaggccatgagatttcagagcctctcccacatccttcctttctcaccacactctgaggacttggtcatcatggaggcattccttctgtttattctgtcactgatcccagagttagaccctgtggttatgggattgcctgctcatagctctcttgtggctaaaataaagaaaagcgtggaagagaagagctaagtggggcacttagagggtatgaaggaaggagggagagaagcagccactgagggagatgactctgggggtgcagctgcttagtgacctcacgcttctctcgagggctaaagctaggctgcctccctccttccaaactagcccagggcaatgatcgcttcacacatgctgagcaggaatggtcaaagttgtgggcaagcattcaacacaggaccactgaagacccaggtcagtttttgtgatagcaccgccacagactgagaactgactctgatttatgcaaagaaccctgagttattatggaagaatataatcagtatttgaaataaatttaagtatggaccacgggaaacatgttagtaactcatgctatggcatgagcctggaagtggatatcttaggccatataggcaaaggttaattaatgggcactcagagcgggcaaacttggaagatgccaagacacttggccgttgtgtgtgtaaataggcatctacagagcatccactggtttacactgccagcagtccttcccttataaattggttggaagtgcaatattgcatttgtgttcctaacacatatggggcacccacatttgaaaatgaactttgcacaatttcattattaaacactcagcaggcttcaaagacaactgcatttcattaataataaataataaaaatgaaaatgcagtaaaatattaacatatcaaacacctctgtggtgctatttttatgcatgcaacatcttcctttcccaagagatgaagtccctgcctgattgcaagctaggtatttagcaaagcaaataaactccttcagaggagcctagaagtctccactgcagccctaggtggtaaatgagtgtctcattatttttttaatgtttttttggtaagtaatttcaaatacagaaaagttgtaagaagagtacaagtagtacaagagatgtaagagaaggtccaggagc

SEQ ID NO: 60653 - DNA, 2144 bp, Bovine  19866880992774
  misc_feature (1)..(1): n is a, c, g, or t
ntgccagccatttttttcctgacaggctatgtgtttagagcagagggaatgagtaatggatattccatagaaagtttccatgcttaatagccaaaggatataagagccgtgagagtgtgccaacgcataccgacttctaagagcttgaaatactcccttcttgtctttgttgtcacaggctggttgaattatatttatggaagattatgttgcctttaccatttcactggacccctaaaatcaaagatgaagacaataatccaaaagctctgaaatcatccatgaaatttattcattctttattaaatgaaaccataaattgtttttcttctctaaaaggaataattctgcatacttgattcatttgtacagagagggatagaacccacctagattgtttccaggaggggtgtgaataaatccatttagcagttatagatttataactgtgttacctgcgttttaaaattatttctggggacttctctggcagtccagtggttaagacttcatcctccaatgcagggggtgtgggttcaattcctggtcaaggcactaagaacttccatgccttatggccaaaaagtcaaaagataaaacagaagcaatattgtaacaaattcaataaggcttaaaaaatgatccacatagaaaaagctttaaaaatgttgaaaaataaaaaataaaattatataaaagtatttctgggtaactaagtaggaggtggtgtacaagaacaaagttgaaattattccattttgtttattatttaattttctcccttacttactgaaggggagtatttatatagcaagtggggaaagtgtaggagatttgcattacaccccatgaacctggatgggggaatagatgctctattttgttatatttttcagtagccttggtctcaggtagcctcagcctgcttggagtggggttttagtttctagccagagattcagcccaggtcatggctataagagtactgaatcctagccactagaccagtggtcagtgataaggccctgactctttgactttgcagggaagaattcccacaaagatggaaagtactgaagcaaataaactatttattagacaggaaaaaaaaaacaaaaaacaaaaaaaacacgagtatggtacatgtggatagacacacatgtctatccagtctccatgggcagactcagagggtctgtgcccttgaaatggtttatattacttttgggggcatttcttccagttttccttttgatttgcctggttgaaagtccgtatttggtacatcccaagattctcccatgtgtgtgcacgcatcttttagccaaagtagatactaccatagaggcctcttagaatcactcccctttgacttctaaggagcctactgtgcgtgtcgtcggggaggtctcctgattgctagaatgagaaatatgtggtttgggcaaggtccgtcccccactcttaattgtcctgctattcttgttttggagcttctgtccatggggaatgaatctccaatcactttacttgggttgggggtgaggggatgtctacctcctgcctcagtgtttgcagggtttgcagtagcccctactgagggacagccctagtaagtgacactgacgtgtgcctgggtggaatgtgtatgtgtgagtagaaccatttgatttccagaaaagagcatacctacttcaggctggtccaccaggaaacttaaaaagaaacggaagaagctcaacaccatgcaaagcctcttttctagtacctgttgttccaaattcagtgcagactaaagtaaatgctgtgaaatttatgagtgtgaggaattacatcctgagagtcacaggctccttcactggggtgggaccacagtctctagagcaaggagcccaaaaagcaaagtgacttgaaaaacacatttatttcattttcaaatattgggattaggtgaagtgaagtcgctcagtcgtgtctgactctttgcgaccccatggactgtagcctaccaggctcttctgtccatgggattttccaggcaatagtactggagtggattgccatttccttctccaggggatcttcccaacccagggactgaacctgggtctcccgcattgtcaacagacgctttaccgtctgag

SEQ ID NO: 60654 - DNA, 900 bp, Bovine  19866881272243
  misc_feature (1)..(1): n is a, c, g, or t
ngggtaaggaaacaggttgtcacttcaaaagattccactggattttctggatgcttccagatccttccctgctgcaggaatatttcctgatcaatggtttcacacccgcaggacatgggccagacagtccccagagagccaccgttgcaaagtcattaaagaaagaaacatagtcagatgaaatcaatacgttttaaaacctaactactggaaattctcacagacacaatgcaaatgggctctctgaattctccaccctagtttctttctcagcagttttacagacaggttttttttttttttttttttttcccctctccccagttgaacaagaaagaacaaaagtagattccccaaaggaggaatcattcgtactaagtttctttatgtaggtcacctctgatgtgttcttggttgcatttcaactgctgaattccccatgtcaagctttcagttctgatggctctgcacataaattctactgctttccaaaagaataattaagttccctgtttgaaagttgaaggattctatatgtttcacagatgctcagtacattattatgttagtagtgtgatacaaaatgctggaatactttacatggaggtgtctctgggtatgtacaatatgttaacaggaaaaaaatattgttcattaagctaatttaaggagagttactatcacctatattcaaatagactgtaaaagtatgttctttgccacagccagtataccatatgccaggccagcttccctctccccttctccagatttatgtcttgtaaatatctcttgagcccatgccctctgctctacttcaaatgtcattgtttcagttcaaacttttgtcaaactattctatacttttcgtcctcagatccattttcactttaccatcaa

SEQ ID NO: 60655 - DNA, 1328 bp, Bovine  19866881277196
  misc_feature (1)..(1): n is a, c, g, or t
ngtctcagattctgctcagagcctggtgtgaagttggggtcaggtggaggagcagttctccccccagcacactgactttaagctgaatttccagccatctgcagctggacagctgccccagctctgaacgtctagctggagcccagttgtgccatgaaaagagcagatgcttgaaagcacaaggctcagcgggtcggcagagagagagggaggctcctgtggggccgagatactcttacagatgtgaatgtacagatcctgcaaaaacaaaacaaaacaacccttcttcacacattccttgcacatgaaaacacagaaaatcttgcagagggagggaaggagtttagaatttccttcatacttcctgtcccagatttgcattgatagttggacttggtaacttgccagttaccaaccagctttgtacatttcaggcttgaaaactcccaagtactgttttcctttgagaggctgaaatgtacaaaactggttttctgaaaatcttccagcaaaagaatttttagaaataactccaaaaatttctttccctgtaggagggtgatacgatagtgtggaacgatgatccatcgtgtctcatgttagaatgtatactattgtaattggtttaaaaagaatgtgtattattgtaattggttttaaatgagagaaacaaaataagaagctaccctcccttttcagtttttttttccttttactcttacaaatctttgttactgttgaagttcttttctctaatgtagtcatcattttcacaacactatgtctagtgcctactaaaaggagtagaaaggtaagaaagttcatgttttttttgttttccgaaataatcccaagcttaagagaaacaccatgtatgttgctttgaacagtatctttccaacacattttcctttcactttctctcaatttggaaaaaagaaaaaacagaatttcaactcaaaaatatttccatgaagtaataaaatgtagttgagtgttggaggtagaggccgtgtgaggaagaggccaaagagaagggaggatacacgtcatttcagatctctctggctccaggaattctgaaaagctttgtttttgtactaatatgatttacacaatcctttctgacattatcagtctctttggcagagagagggctcggtcacaatgatgcccgtgccagattctaagaaaaccaggcttttcctttaaaagaaaatctttggagtgttggacttcttattcagagtaaatggttgatgtttatccaaaattggcttcgagtactacattaaaattgtgttttgtaacagtctcataagccacag

SEQ ID NO: 60656 - DNA, 1094 bp, Bovine  19866881314761
  misc_feature (1)..(1): n is a, c, g, or t
ntgatcactggtttatggatgtttcaacaaatcatcctcaatatttcttttcatttattgacttagaacagaggaagaaacataataaaataaagtgcacttttatccttcctgattagttataatctagttgtagagaaagtgcattacgtcctttatttttctagtttcaccaaaataattgagtaagaattgggaaatattatttgtctcttttctgaaaaacaaaacaaaaaatattttcttctaagagtaatacatgttttttataagaaaaaaagtggaaaatatagaaagaaagaaccagaagttttaaaagttatatatcttttaaattttcctatgctttcttggtgattaaataacatttttttgtgttttcctgattataaaagtaatacatgtctataacagaaaacatggaatatagagaattctgtaaaatataaattatattgattatagcagtgttactattttgacacactgcatttctgcatctacttaaatatttgttctgtcttgtctcccctctgtcacttatccctctgtctctcacacgcattgtatgttgctttcttaacatatcacaattgtttatcaggttattaatggttttcttgaaaatgagttttagtagagattcagtacttcatcatatagatgcaaagtaatggaatgcttatatattaggattaaattattttttgtggaattttttcatggaataaacttcaattttttgaattatgttataactttatccataaactggaataccaaatgaaattagtaagcttgaagtaaatatcatatattcaactcaggaatagtttttacacaattttcaccagaaaatacatacaagtaaattctttttcagcttttccatgtgtttccaaacatcattttattttttacaaaacattccccccactgttggacatctgggctgctaattgacctttacaattgcttttgatgacttgatcaaggatcaacatgattttctagtaaagactgacttctattttcatttttaaagccacagaaacagcaaagaagttatcaacaagcgtcacagctcaccacac

SEQ ID NO: 60657 - DNA, 932 bp, Bovine  19866881364942
  misc_feature (1)..(1): n is a, c, g, or t
nacttgagaattaataccaagaatcttgcaggaaaaataaaaaagagaacacactaaacaatacaccacgtggtggtgaggcaagctgtaatgtttccttgcagatccatactggacaaaagctgtctcatatttctaatgccgtgacatgtaaaccacgctgcatatacacgctttcaactctggcatttagaatgcatgtatatgagcagagggccattctgacttcccatcttttcattacaatctctgtagcagttccaaaagtccttagctggaggatagatttggattctgctgcttttctgctctccacacattcaggtaaccattccaaggctgccaaaataccactggagagggaacttggtttctgaaactagcagtaccctatggtccttccccacctacaccctcatgtcctcagcctgccttttgtctacagttgaattttagccaaataataagtttaatcagagaagtgcaaaaacaaagggagacagttcaacaagactaataatagtttagtcattaagcaaagtcaagatgtttagttgctcttcatgggctatagatattgttcggagtcatatcctctgagctgccttatagagactaagacctccaccaggtggaacaagttaactacatgatgatcagactatagccataagctgccacaattctaagaactggcttgaaagaaatgggagcaaaccaaccctggaaatgaaagttcaaactaccgcacaattgcactcatcctacatgctagcaaagtaatgctcaaaattctccaagccaggcttcaacagtatgtgaaccatgaacttccagatgttcaagttggatttagaaaaggcagaggaaccggagatcaaattgccaacatccgtggatcattaaaaagcgagagagttccagaaaaacat

SEQ ID NO: 60658 - DNA, 2231 bp, Bovine  19866880488909
  misc_feature (1)..(1): n is a, c, g, or t
ncgaggtaggggctgacttcttccttaaaatgcaatttttttgttttttcccctcacagatgtcacgaattttatttccaagttagatttcctctctgctcgtaaatgtttattgcagagattcccaaacagtctcagttcacagcaccctcattatcaaagtggcttttttcatggcgtccccaggccaaaagaaacactaagtggtccgtttattaggtgcttaaggccaaataacttagtaagtatgtataacctaacaatttaagaggcatttgaaacctatgtatgtaaattcaaagaaaaaaaattttatttttaataaccacagttcttactaatggagcgtgtgtgcctattggacactgcacagcttctcacatttgaaatcagattgctcaccggcattctcatttcctgttccacactgattttcacccagtacttggcttttatcacagcaaccccacttcagagagatatgacatcatggaaaggaatgtagcagtctgaggtcaaaactacggtttccgacagatgtcaagtattgtgttttccttgaaaattgaaaatgtcccgtgacacccctcggggttttctggggctcctgggcatgccgtttgagtacagtgggtttattgcatgatttaagttttttttatttgaaggttataggtggatttatctttttaattttttgaagtctttattctaccccagtctgaaacagcatgttctccccaagtctgagcaatccaaggtggtttctcgtaagtgacttgatagttatgtcggaatgtttcagactcaagtttacttttacactacatggcctagttctttaaaggagaggtaactgaataaaagtcttgagccaacttcctcacagaaaaaacaagtttaaacaagtgccctaaaagcagtctcctttgaagctgagggcttacctttattttgttctttctcaccaaatctgggtcttggcttgacctttgtttagcttctccatatacgaactcaactcccaacatcaatagcgtgagaaatgctgattcaagaggctccctcataagcacagattccgggaacagccttccagaaaggaatagtgagaagagcaattccctggagaaggtaagttcctttcctgtaatttcggtgttttcttataactgatggattcagcccaaagtaggcatgcttcatgttcgcatgttcatcaggttggacctttttttccctttctttctgaaacaactcagttaaacctggggtagtcggtcagagtatgatctaagggtggggcccatcccctgcacccctctattcctgttccagcatttcatcagtgttcacagtgagcactttggttctggaagtttagacagatagggaaatcagaatgccacttgctaagaatctccacggtctgtgtgccagagaacagtgtttataacacagttacccatgcaaatgggcgctggatccaaagctggctccagaaaagattaattatggatgactcagggataaatccttattgggaatcactccattcaccctgtgcccccaacacaacacatctgctcatattgaactatttttcttgaaataacaaaaactattctgaattttgtacgcatggataaaacttagatttagacctggaaccatgatagatgagtctcaccttggccactgttttcctaagttatttcaagttataggcaagcacggtgtatcggtcaacaggtgacccacttagggatgcattccaaattctcagacacacggaggccatccttacttggaatcaggtgcgtaaccttaccatggggttgcgggtctggcctctccccgatggtgctcagccacggtcctggagccatgcggacatctccgtgcaggggtcatgacctgtcgaacttttcccttgaccctgacacgccttcctgcatagagggagaggctgctcagaaggcactcggcttgtgtcgtgcatggtgctggagaggaggaggaggagagagaccagccggccaggagacaccgagccaccgtggacttctcgctcctgatgctgccacctctgccggaggaggccccgctgggaggaggcctgagctctcccaggggcactgaggaagtgggtgggcagcagggtgcccccgcgctgcagctttgccactgatggacccgggttcctccctatgatggaactactcacatat

SEQ ID NO: 60659 - DNA, 1095 bp, Bovine  19866880577536
  misc_feature (1)..(1): n is a, c, g, or t
ntcgagcctgaaaataattgaaaaatgatttattgaattgaaattgaactgaattgaaaaataattatgtattttttcaattgcccaccaatgccttgaatgaaatattgaagtgaaagacaaaatatttttttcactgatctttctgctttggtatttggggaaaaaaaaaattcctgattccaattggaattataactttgaagattttctaatttcctgtgttctcttttaatgagatgagattcttgttctttttttttttttttttttttaatgtgaatagtttggaagtgaacctgctgcctggtggcaaaactgccctcgccctgtgccctgagctgtgtgaagtgtgcagtgttgcgctgagctgatggtggcgtgatagcatcagctcagggcctctggccctgctgggctgagatgaccctgtttgcccctatcaggccgctgcccgtggtcctcccttaaggctgctctagaatgtaacagaatgaccatgactcagctccaggcttcagtggctgatctgcggcagcaccttggacttaatttgctgtttcagccactgacgtggcttggtttggcggtgtcttctgaagcatcgtttctgtgttccgtcttagcacataaacttttctgcatgaagttttacttggtatttcagaactaagccagtaaccacgactgtggttattcagtttgaaaggtccgtgccttctgccttgtcctgggagagtgtgcaaaggagacaagacagcactcccatggattattagcacacgtgtgtgtgtttgatgacgatgtgcctgtggtctgttgacaaatcatggatacctgccaacttacatgatttgactaaattctgaaaatctttctcttccaagggagaaaagtgaacctaactttgttttacttgtaacaaaggagaaaagtcacctgtgttttctcctcctttagcaccaacaaagtggcactttgggaaattctgtcgttcgctgtgacaaactagaccagtctgagattaagagcctgctgatgtgtttcctttacatattaaaaagcatgtctgacggtaggtaaaaaaataagaaa

SEQ ID NO: 60660 - DNA, 2105 bp, Bovine  19866880614444
  misc_feature (1)..(1): n is a, c, g, or t
nggaactctgctttgaacatggtgaagatcaatgacgggacacatgtgaagtcttgagacccagtggaatgcttggcacataacagctacttgctatgcatccgcccacttctcccgcctgttgtcactgctcttgaccatgtagaatagaagtctatggccgtgtatctttgtgggccttcagcccctctgcagccacccactccctcatctcaggccccaaagactcaatggctttttccctaagagaaatcttataacacatgtctcagcttctatataaaatgtaaccatgtaaaaatggttaactcccagatgataacactgtgtgtgccgtgctgcatgggtaagggtcaagtgaattcgtaggatttgccttaactgaaaatgtgcccagttgcttgtgataaagagtaggttgacccagaggttcaaccagtaggcgaggttcttaagcacagatacattataccatcgggctgggaaacaggagctctcatacactgattattcagaaggcggtttgacagtatctgttgaattttaaatgtacaaaccattaacacggttacttcacttctaagaatttgtcctgtagatgtggttggacaagtgtgcaaagacccatgttcactaaagcatgatttataacagcaaaaaattgaggggaagaacaagtaaaacgtctgtcagtcggggacctggtaactttgttatagtgcgtccatggagaagaatattatgcagcttggaaaagattgggatagatcgaagctctgttgttgaattaaaactcagtgaaacagtgcacatagcatgcgtatttccatttcagtgtgtgtgttgggaaggggttacttatgtacatataagaattttcaggagattctctactggggagggattctgtagttggtaaagagtgaacctccctttagattgtatgcctacaatgtattctttgaattttctaacccatttaagagctcatcatgtataagttaaaatatgtaccatgtcgggttagatgatacatgatgaaattaaagttcaagtgttcaaatgtagcttctttaccctgactaagctgttgtacgtgtcatctggtatagagtggtcaccatagttcattctttgatcaattatgaaagggggctgggagggtttggaggcctacactcaggtctcttcccatattacataatgtagaaaatatgtagaaaataagcatcctgattctgaccaaatacatgtttactttccagatgctttgtttacgtattggaacaaggcctcaacagctgaacttatggatttttttacaatatcagagtgagtagttttgtctttgctcattgactcttgatttttcctggctaattaaggggtgtgaaaaatactctgttgttgaaccaggaatgcaatgtatggtcacatccacacttatccttagttaagttctttctcctggagctgaccccaacacccagtctcaggaactcatggcccagaggacagtgacagccctgaatttacatatatgatgattatagatgagaggttactacttgtgtggttaagccgttttaataaaataacacaacatttgttagctgaattgggtggatgctgcatttctgagttgactctaacttaagcagatacagtacctaagacagaaaaattgctataatttaaaaatatacagtaagtaaaagtgaaatcttaaatacagtctatattatttgatctctttaagtttctattttttcctttaagctttttatttttagaaacacagatccacaatcccttatccaaaaccagtggggccagatggtttttcaaatccagaattttttggatttttgaaaaattttcatagagagtatattccgtaacacccagtagggtctcagggagcaacccacagtcaagcacattattgtttttgcattaagaacttatttatttaataccgtgattgttcacagtaattggttaaatcatgggcttcccttgtggttcagctggtaaagaatccgcctgcaatgcagaagacctgggttcaaccctgggtgggaagatctccggacaagggaaag

SEQ ID NO: 60661 - DNA, 2620 bp, Bovine  19866880628084
  misc_feature (1)..(1): n is a, c, g, or t
nccccgtctcagcctggagtggccagtgaggactgagtcccgcctccagctcccctcgcctccaacccgcctgtgagccccaggttcgatgctcaggtgctcccggggctgccgccaagtgggctgggcagttagggtccggctgggttgcctggtgttctggcccggcttcttgccctcagcggagaaaccagaggctgaggcgatgctggaaacctgctccattcattttaggctaccgagggaccccaactggcttccctcagatgcagatttcaaacctctgcttcagaacctgaccccttagttttacttcgattttttttttcctcctcagtctctcttaggagtatttagataaacaaaaactgattaaaagtacttgaaagtggaaggaagtttagaaggagtttggcacaagcaaggccgttgctgctggatgttgttatattttagtggagtatcagcggtggggtgtcaacagatggagggtagagaaatatatagagccttttaaacagctttctttttctcgctgaaatggcctaattgactcaaggaaatggcaacccactccagtattcttgcctggagaatcccatggatggaggagtctggtgggctacagtccacgggctctcaaagagtcggacacgactgagcgacttaactttcactaactttcaagatggactgtatgtcagctgaccagcattgaggttaggcattgacagagcaacagcgaactgtttgaatagctacagtttttgcaactgcttgtctgttcatgcttatctccaaatgtgtgaagttaatcttaccaagtacagaggcagttgacatttccaaatgttcatgatctcttgtgaaagctaggaatcttttcgagaacacagatcgcattattgaccaggggatttttgcagaaattaacacctgtggtcagcagtttgttacataagtgagtattaatatgtctctggtcaataaacgttctggtaacaaaagatgtattaagatacctggtcagtaaattgatgtcttagtctgggagtaagttagtatcagggtgacaggcataattataaatcttcctcactgctcagcttcgcaggttttgaagtgggcttagtatttatgatttcccttgtttcatgatttgatttatggcatttttcaagcactggcctcagagtaccttaacagctactaggtagttaatcttcctcagagtaccttttggatagagaacatcatgactgttgaaactgatagttgagaaggtggtgtgtttttcctgtgatcctactatgagccatacactgctgaataggaaattagcggttgttattgttcagtcggtcagtcatgtccgactctgggacccagtggactgcagcaccccaggcctccctgtccttcactctcccgtggagtttgcccaaattcatgtccattcatgccatccaaccatctcgtcttctgtcgtccccttctcctcctgccctcactttcccagcatcagggtcttttccaataagtcgactctacatcaggtggccaaagtattggagcttcagcttcagcatcagtccttccaatgaatattcagggttgatttcttttaggatggactagtttgatctccttgcagtccaaggaactctcaagagtcttctccagcaccacaatcaatggtagaattcttcagtcttatttgttttctttcgtcatttgagctatccttccttgttaatcaaaaaacattaaaaaagtaaaacagcaagcaaaatctgttactggttactatgctctgttagccattatgttgccaaagtatattcaaatttgatataaggtgactctggggaaggtaagacatgcttacttgtggcacatggttgataagtattgatttctaggatccaaactgcagcccagggagaggcctaggccggaggctactccttagctgtcttgccttgtttccgaaataaatttatcagaagcataaaaatggatggaatggccattcctcagaagtccatgtcttatatgctcctttaacaaacattttgagcaactcttatggattggtttctggagatgtgacaactcttgctgggttctggggacttgacattggacaagtcttggtcccagtgtttgcagagcttatagtgttatttaggcaccattttttttcctggactggtcttttggcaagtctaggcaggaaaattttccttgctctaaagtttttctttgtaaggctccccactgaaagggaagtgatttcctttagataagtcgtgtgccctttggtaaatgagagttctgatcctaagtgtcctgaggatgaatgtttgcctaaccctgccccaaggcgtgctttttaagggaaaaatccctgctctttcctaccacctgcatatttcccacctctgtgactggtagatgatggtgtttgcgtgttacacttgctttcctctctctctcatttatttatttattctgcaagtatctgttgactacgtgcataagccacatactgtttgtgtacaaaggataaagtggtacacaggatgaagcagaccggcatccaataagtgtgttacca

SEQ ID NO: 60662 - DNA, 1592 bp, Bovine  19866880654694
  misc_feature (1)..(1): n is a, c, g, or t
nccctcttgatggagatacactttaggacagtctagctgtggaaatcccatggacggaggagcctggtgggctgcagtccatggggtcgctagagtcggacacgactgagcgacttcactttcacttctcactttcacgcattggagaaggaaatggcaacccactccagtgttcttgcctgcagaatcccagggatgggggagcctggtgggctgccatctatggggtcgcacagagctggacacgactgaagcgacttagcagcagcagcagcagctgtcagcagtagaactctttaacagttatgatattcctgaaactgtgatcccagtgaatagagaatatcctcagggtatgaagctgctctcaccttgcaggtgatgtcagcttcccagcaaacctcagaagtgcatttttgtctttctgaagaatgttgtttgttgttcagtccccgttcatgtcctactctttgtgaccccatggtccgcagcatgccaggcttccctgtggttcactgtctcccagagtttgctcagactcatgtccattgagtcggtgacactatctaaccatttcatcctctgccaccctcttctcctgccttcaatctttcccatcctcagggtcttttccagtgagtcgtctctttgcatcaggtggccaaactgttggagctagcttatctcaaagcagtactttgtgcactcctcgtgagggcttggagtgctatctgctgttaaagtggaaacgcaagcggtttcctcagctatagtcacagcggagccggagaccagcctgatattgacaaacagttttaaaccccgtgacaattcagacctcattcctggttaggaaaagactccacactgacttgtaaaacatttaaaacccatgttcccaaatgatgcagtaagcctatttgttttttaagggctccaggtggacactgcaagcaacgaccatgagtgggaaaattgtaagtctggggcacggagatatggacaactccgggttactattcctttgccttctttctgcttccctctcataacatttcaagccctcaagtgatcctctatgcgaacttatcagtgagatatcccccctcttttttagggaatcattgaaatccagccggatcagatgcaggtaggagaaaatatttcagttgctttccgagctcagagccaccactgagacagtaacagcccctctccgcttcacctgcagacggtgaacgccatcctgatcgtcatcatggtccccatcgtggatgccgtggtatatcctctgatcgcaaagtgtggtttaaatttcacgtaggtgaccctcggcttagggtcagggttggggctgtgttccctcgcctcccagagccctggtggtagcaatgtctggctcttctcccacgatcccatgtgtctgagggagttttccaagaaatatttttgaatcagatgtctatgtgctgacgtttctgaaaatttgcccttaaaataatagtgctattaatggccatctgcagaagcatctaattaagactccctggtgagcgcagaggatagaaatttcaactatgatccagaggagt

SEQ ID NO: 60663 - DNA, 1253 bp, Bovine  19866880656134
  misc_feature (1)..(1): n is a, c, g, or t
ngagtctgtggctcccttcttgccaggggtggattttagttcggtttacagctggtggcccaatggcagagggtggaatgctgcaccatacttgagcaggagcgaggcagaagacctccattgacttcatgggtgcagatgcttgggaaagggcctcagggaggagggtcaagggagtagtgaaaacttctgtttttcctaagtggttttaaacccagcataatggaaaggggcagtttattgaaatgacacactcctcgcccgagtacagaaagtctgtctgtctggaccctgtcctcaggaatggacacttttgtctggcagtggtcagtgatctctgttgatttctgttatcagtagggtgacatatcaccccagaactttgtgcctgaaacaaatagtgatttagtgtttctcccgattcctcaggttgacctggggcttttcctcagggctcgctcactgcctgtggtcggcgggagagctgctggcctggcccggatggggcagcgaggacactgggcgtcctttcctgggatccagttaaatatttaggccaaggcagcagcagttaagtgcagatgcatggcactgtgtttgttggacacggccttctcagaaacaagctagggtgtatgtctttttctctgttaaatgatgttgctggttaacctatgtttcactatatacctacctaagaaagttgggggcggggcgtgtagggagaaaagtagaatttttgcttagacatgagtgatttattaatgaatccatatatcatgttcagataagtggtttgatacttgtttatacaaaagctggagccttcctcactttctgtaatagagctgggtcactgttcctgtttgcacatttgctgtgtttgatagtgtaacttgcacacgcaggtgagattgagaaatgtttgtgtcctgagtgtgaagacccatgattaccaccagcctgatccttaagtgaggaaaacgaatctgaccttgaaagaccgtggtctagcggttgtcagtacccctgtgagttactgaagtttcctttttccttctctcctgcagaacctaaaagcagatccagaagagctttttaccaaactggagaaaatcgggaagggctccttcggcgaggtgttcaaaggcattgacaatcggactcagaaagtagtcgccataaaaatcattgacctggaggaggcagaagatgagatcgaggacattcagcaggaaatcacagtgctgagt

SEQ ID NO: 60664 - DNA, 764 bp, Bovine  19866880705896
  misc_feature (1)..(1): n is a, c, g, or t
ntgagttcagcaatgaattgtgctctcacatgtattcaggacccccaaaggacatttgcatacccctccaaatatagaacccttgtgcttgacttcccctcagccagctcacagtctcagcagagctcagtggaaaacaagaattcaacaatcagtcccttcgcttctccttctgagttgaaaagataaacaccccccaaatgccactttataaagaacagctagacaagtagcacattagcaatttaaatttacagattaaagaaaaggactcacacggtgaactttaaaagagaaatatgagtagcttggataagtaacagaaggcttaacaaatttctatacgtgttaaagcaggtgaagacacaaaagaggaagacagataattaacatcagcatacaggaagcatgtctagtcacggtcggatgacacgacagcaagaaaatatatctccctagggcttttctcaagccctaggaaaagatctagctatactgaggaatggtgtacatgaagttttattctgggggtgtggggctcagagggcaggctctcgcaacagcatgactctaagtcagtctggggttgcatcctgcctgtgtgtcctaaggatgccgtgactcaaactgcagaaatgcatcattccctcacagttttggaggctagaagtccagcgtccaggtgtcagcaggggctggtttcttctggagcgtctctgcttgtctggtggctgggcccgtgttctccctgtgtccacacctgg

SEQ ID NO: 60665 - DNA, 1666 bp, Bovine  19866880706508
  misc_feature (1)..(1): n is a, c, g, or t
ngcagaccgcgaggcttctgtgcccgtgcccagggccgtaacaggagaatttcagtgcaccaaggagcgggccaggggcttcccggggggttgaaagatgaacaggggcttgggggtgagcatgttccaggccctggatgagaaaggggccagccagggagctggagaaggtccagacagtagggttgagaatgtggaggcatcattgcatattcagggggatcacctggactccagactgagaaaggatccggaaagtcgaggcctgagctcggaagaccgtggggaaaccatgtcaagtctaggccagagaggatggagtcctgggtcaaggagaggttagaaagaaaaggagactgcgttaacagtacttggtgacagtacttagtactggctgtggtgcaggatggggggacaggtcacagtttagttgagtaactaggtcaaggcattgctaatatagacccccaaaagacagattcccccatgccatggttaatatgtacatgttttaataataaatgcagagggtcatccacttttgaatactgagcccatataaatccaagccaaaaccaaagaagtaaataataaggtctccatgtctattagagaaggtgatccgtaattatccaagtgacatgggctcatatgcttctcattcctctacacttgcctcgtcaccattttgctatacaaacaaaagacgcaaggagagcagagtcaccttctggaataattcttggaagtgggagggaaatactcagacactgtttcccacactggggcgacccctgctcgcaggcttcccattgccccatcccccatgcacaccgtgaccaaagtcagaggccgagccaggggcatcacgtgaaggtgaattgattagctcacatttgtgtgtccctcagattgttatttcagtcagccagctgatagcagatgttgttggcatcgggggaaccaggttccagcagtccttgtctatcatcaacaactgcgccaacagtgacaggctcatcaaggtaggtggcccggtgccgatttactttttaccccccgagacccggccttatcatctgggaaacacacgcagacagacaaatcacagctgaaagcctgtcttccctccacccttgttccagcacaccaccttctcctcggacgtgaaggacttgaccaaaaggatccgcacagtcctgatggccacggcgcagatgaaggagcacgaggctgaccctgagatgctggtggacctccagtacagcctggccaagtcctacgccagcacccccgagctccggaagacgtggctggacagcatggctcggatccacgtgaagaacggggacctgtcggaggtagccccacgcgcctgtctgtccaggctttttgagaaaacgagttatgccccactctctgaaagaagctgattatgagagaaacttcccagtaattccaagaagccagctaaaagcatgtgatacttcagtgttgggctcagagctccttcatagtcatttagcagttttccagtttggaatatcgtaaggggctttctctgtcccaggagcgttgtttgtgagctcttagaagacacctgtgctcacacatgtgcccgttagtgcagatgcgttcggcttctgcatcagaagtcctctcctga

SEQ ID NO: 60666 - DNA, 1052 bp, Bovine  19866880793344
  misc_feature (1)..(1): n is a, c, g, or t
ntgtctttgctgctttgtaaaatttgacattgtttcacaaaacacagtaatcatttcttacctttccgtgtgagatattctgccaccagggctgtgacatggacatagcacattgctgcctatagtaaaagacacatgcttcagaatcacctgttacaatgcacaaagctcaccatcagaaacctaatgactgtgtgtacttatgttagatctcagggcatcagctagtgttcctaatggctgacatcttacctatagaaaaaagtgggacaattcatataaattgaaattatgaaactatgaattcagatgaatggcaacaagcttggtaaggcccatttctatctagaattatttaacttttattaaagataaaagatttttaaaaagcattttatcttactatatctaagattttggcattatttctcttaaagggaaaagacgatcccttgaagaaaaggcatgtgcgttcctatattcagagagaactgctcaaacttcaggggctaatatatttttctgtcaacctgaaaaacaatgaagttatacattttttccaaaaatagaattctaaatgaaagtaatgtaatgtccaatggataacattataaacacctttaaaatgtaagaaaaaacaaaaataaattcttttaaccgaattgccatggtttataaaacatcaaacatagctgttagaaatgaacctactgtaaggttctaatgcctaagccctggttctcatcagaatggtagaaaaattactgctactaacaagtgcataattcatttttattatggctaatggatattttagattaaacttctgatcaaacagaatggactctgaataatcaaaaagtaagaattgctacatacacttttcagatataggatacaatttcactaattcaagcaattagcatgtttaaaagtaaaagcatatttctttgggttgttctcctgatcatacctaaatgccacgggcgtgaaccctgagcagagtttttgtgggaacatgaagagaacccgccttacagcccatcattgtc

SEQ ID NO: 60667 - DNA, 1459 bp, Bovine  19866880793701
  misc_feature (1)..(1): n is a, c, g, or t
ntgacccctatagaatatagcccaccagggtcctctgtcaatgggatttcccaggcaagaatactggagttgccatttccttctccaggggatcttcccaacctagggatcaattccgcatctcctgcattggcaggctggttctttaccactgagccgccagggaagcctgtgtaagatattagagacacagtaattccaaatgcaacataaaccatacctgttggtttttctcataaatacctgaaatgactctcagctgcacaattaaaagtattcttgttaccaatcatagtttatttaacaaggtaacagaaggaaccacacagcctttctctgccagaattttctgtttcttcccttgggtgtctattttaaaggtctgcctttctcatttttttcttgctttgaatctggtctgtaattataagctgcccgaaatcctttattgaagttggaggagcataaataataaatgccctaaaagtcaatggagaacattatctagcaaaatgtgttccccggttttcaaatgaatccctgaagccatgctgaaatctgtaaagtaccctagagcatgtagccctgagacagggaagaagccataggcaccacgtcattcctcaggggtttcttaggaggctgtgcagagtatccgtaacttatgactataaccatttttttcctgcagaccctctttgaatacaaattcgaatttctccgtgtggtgtgcaatcatgaacattatattcctttgaatttaccaatgccatttggaaaaggcaggattcaaagatatcaaggtaatctatctttaaatatattaatcctagtcttttcaaaaagagagccattcattttaaataagagaattagttcacgcatgacattaagaatatctgacatttttcattggtgaattcattttttttctcgtttccattttttttttttaaattgataaaatgcttcataggaacttaacttttttttttagcaaacttaccagactattgatcatgccagtgtgactcttttttcattgaacaattccattgcttaaacaatagaaatcctttttatttactgtagtttatttttatttgtttcacttttccttttttcttatgaattagcttttctttcaccaactgtggagtcaaatgacactcctgtaggtaggtgtgggggtgtgacgctgctttcttgcatcttcctcctttaaaagaaaaagaatgcaagtgattgctgaaacgcttatgtgtgctatgcgtttagacatttcccatatacttggatcaattttaaaattcacgataagccagtgaatttgttctcactgtagctaacacatccgtaacatccccgggaggcgtcttgttttttgctcctgggatcactaggtcctctaggaggtttctttaagaagtaaagcaaacaaacaaaaaacgctgcttca

SEQ ID NO: 60668 - DNA, 800 bp, Bovine  19866880805737
  misc_feature (1)..(1): n is a, c, g, or t
ntcgtctcttctttgatagcagcgttctcttgtccaacagtttgagccctagtgatggtctggattgttttgttttgtccaggtcgagcctttctttgtcactctgtccctgtttgacgtaaaatgcaaccggaagatttctgctgacttccacgtggacttgaaccacttctcagtgcggcagatgctggccaccacgtccccgtctctgaggaacggcgaccggcagagcttgcctgcccctctgggcatcctccacgaggcctccatgcagtacccgaagcaggtgggggactggcccagtggtcacgccactaaggcctaccttgtacaagctgtgtaaatacataaatgaagcgtaaaatgcgcagtttgagtaaatgagactcttaattagattgattgcgtatatcacgaggctgtcaaagcaagctgaaagagaaatggcttttgacttctcatttctttttttctaaacttgctgctagttgcctcccccgccaaagagcctttttgatcgaacgatgaactgtttgttgttgagttaaccagtttggcattgggtgcttctgagtagttctgctgtttgctgattgagaatctttaatgtttgtgagatttgtttaatgtgactgtaaattctgcttgctaaagaagatggtttgttccctaggggatattttcagtcacatgtcctcatcctgatatattccttgtggctagaattgaaaaagtacttcaggggagcatcacccatggtgctgagccatacatgaagagttccgactcctccaaggtat

SEQ ID NO: 60669 - DNA, 776 bp, Bovine  19866880826017
  misc_feature (1)..(1): n is a, c, g, or t
naatactagagtggacagccttctccaggggatcttcccgacccagggattgaccccccctctcccacactgaaggcagattctttaccatctgagccaccaaggtcctttagatcttcagtctaacgctctcccaactaagctattttggatacccagtacattaattaaaactgtagcaacagctaccacaatttcccacattaatcacgtttgtcaaagggagaggagggaaaaaagacccagcaactctgatacctattttcaaaatatcacattagatttttaaggaaaagcttaagactataaatttaattctttaaattcaatttaatcaaatttaatgtacttgcattaaattgttttcaaagatattctttctataagctacttgatccaaaatgtcacctggttttatttaagatcaacagtaagaactttctgagaatagcagggacctctgtaactcggataccaggaccaaggaataaaaaaagcagggtcccaggtttcagtaactgctagaggaatctgcttcctgccatggcctggagtcaggatcggttactgtaactaggaaacctcaagccgttacctggtcccctgagatagacagtgcctgtgccctgggcccatcagataacgagaactcagggttatcaccaagggaagcaaagctcccagtgcccacctgtgcccctcacctccctactcccaagaaaatatcagatggttctgagaataagggtcattctgcactaaaaaacacacaacag

SEQ ID NO: 60670 - DNA, 1155 bp, Bovine  19866880857000
  misc_feature (1)..(1): n is a, c, g, or t
ntattgcttgctggcccagtgtacacatctctagcccaaatgtatcgaggggaagatgagaggctgagggtctgggctcttctgaggtgcttggagtttcacactcgtgtggacagggactgagaaataccagaagtgacccaggcttttgcacaggcttgagtcggcggagtgtgcctggctgtcattcagaagctgcagtgattcagtgcaagtgggaatgcggtctgattcgtgtggttcgtgttcctgctgtccgctcctctttgggctgcaaggtttctcgggaggcatatgccctacaggtggttttgccatcctcaaagcgagcagctgagttcagggcacgctcactggctggggctgtgctgagcccaggccctggaggaagtcctcagcccgatcacaaggaaagaggccgacctgggaaaccactgtctgtaactcgggaaggctggtgactaagagaacttgccctttcagcatccacgaaaaagctgtctcctggctcctttcttccagatgaacccaaatgaacatttatcttcttgtttttgggggatggagccaaacaaagttaacgaggtgatacacagaacacgtttttctcttttggcagcattagtgatgatggttgaatgacctctgtgaaattctctgtaacatttctgtgtgaatgcattttcttgggggaaagggtgtctgctttcactggacggttagctccagagtgttaaggactccagtggatactaggtacctgcccacactgtgaatgggaccccgcccgctgatgctgaatgacagtctttgaatcaatcttaaaggagaaaactttgaaataggactccgtctgtatgtgttagacttggttgctggacgttgtgaggcagaagcctgtcctctggggtggagtcacgtggaatgccgagaccctgatctcacgttttcctcttcggtggttgatgcatttccagagacccaccgctaaggagttactgaagcacaagttcataatccgcaacgcaaagaaaacatcctacttgaccgagctcatcgacaggtacaagaggtgggaaggccgagcagagccacgaagactccagctcggaagactccgacacgtgagtccgctcggcctgagtccctcggggt

SEQ ID NO: 60671 - DNA, 1400 bp, Bovine  19866880922110
  misc_feature (1)..(1): n is a, c, g, or t
ngaagggggagccgtacctgtcaggatggtgcgccgtttgcactgctcctctacgcccccttgccgcttcccgctctgggtgaagggcatctcaaacatgaagcggcgaatgttgtgggatctttcgaactccgttttcctttcttgcagttctttctcatcaaagaacgggatcacgtgagtcacctggatgtaggcatacttggaatccagatccttggggttgaccttaaaatgaataaagggaatggaatacagcttctggtgtgtgaaggactcctccaatgcacgctgaagcggtgttttcccactttgtatgagtaaaagttttggagactcagaacgtttgaaaaaaacagtacaacaaatgccacatactcaccacttagaacaattgctaatactttgctatttgtttatatatgtctccttacacacacgtacaggtagatttttttttagctgaaacatttcaaagtaagtggttcacatcatgacacttgagccagcatctcctaaacatgaggacagtctcctccataaccacaatacatcatcattttgttaatgttacaaaattaacactaatctcctaatagtacccagtataccaagtttagatgaaaaattctcaaatgtcccagaatggtatttttggctatttgtgtttgaaccagaatctaatcaaacattgcattttacatttagtcatgggtccttagtcttgtttaatccagactattcttcttcatgacattgacttttaaagacatcgtgctagttttcatgtggaatgactccctatctggattcctctgattctttcctaagctgtatttttacatatttggcttagagagaaaaatgtttattttagtaatagtgtttaaagccaagccctcaagtcataattaacctgtagatagattagacataaacacatggatatgaattaatttaatacaagtaagagatgaatgcatgagcatcctgagagaagttgttaggtcaaagacacagactgatccagacagaggttttggcttcagagaaaaaggcaagttggacttgagtgatttggtctagaaaggaagtaggtcttaataaggttgtgttgaggtttctggctaaaaatggacccacaatgcatgtttctcctcttcctttgtacagctctgtcacaaaggataggattaactgacaaggacaaaagagagggcggaagaacagcagtgggtgagtttaatgaatatctggaaggcaggtgcatgggggttaaagttctaatccacattcccatggaaggggcaacaaggaggaagccagagcaccccgcagaagcctgctgtgatggactggacatctgtgttcccccaaaattctcatgtagaaatcttaac

SEQ ID NO: 60672 - DNA, 1101 bp, Bovine  19866880938191
  misc_feature (1)..(1): n is a, c, g, or t
ncgccaatgaagacactggtaattcatgcaacaggaacagaaatggctcgaggcgcggttttgacttgctttagacaacagtctttaaaccatgcagcctcacgccttggcatattccattccttccgcttggactccccaccacaacctcctggtcctttccctggcagaatcctccctcctcctcctcctcctctaaggctcaagtctgtgcctgacccttgaggcctcaaccctgaatgcccgtcagtgtaggggagatgtgcccaatattggaaaagttagttgcagtttttctttgcagccatcgtggtaaacactataataaatgagcgcagaaggacaaaccaggacatgctggagtgtttgttgccctgaagtgttacactgtcagctggaccctctgccagaaagctctctccttcacccgggatttttctgtggcctctttgcttgctctgctctttccagctaacagggaggggagaaaaatctctgccttaggggcaaaattccaggcactcttaccccctcgctgctgcccctttatgccaacaagtaattctgactccaccaccgagctctgaagggggcactgacattttcaagatggtttgcgggaaactaaagcaaaaatcaatacataaaataaatcacgcagtttttattatcactcagaaatagcggtgtcttccctagaaggaaggtttctaacatggttcagctaccagaggctattaccctggagaattaagcttcaagatgtaaggggaaatgacccttgtctgctgtgactgctgcaatttttgtgtctgtttccctcctcagctgctttggcagagatcacggaaatggtggcccagcttcacggtacgatgatcaagatggagaatttccagaagctgcatgaactcaagaaagatttgattggcattgacaatcttgtgatcccaggaagggtaagttctctctgtatgctctggaggtggagccagaaagacttgtgtgtgctaagtcactttaggcatgtccaactctttgcaaccccatggactacagcccaccaggctcctctgtccctggggttctccaggccagaat

SEQ ID NO: 60673 - DNA, 1710 bp, Bovine  19866880968810
  misc_feature (1)..(1): n is a, c, g, or t
ngcccaggagtgagcatggaatatttgatggtggaacagcctgggcagtgtttaagcagaactgtcattagctatggatagcaggccacgtgaccacacccaccaggccaactaaaacagaatctctggtgggacaaagggaatggcatttgttaaagattcccaggcacttctaaggcatagccagcaggattgggaatcacctgtccaaaggcctgaaataaaatgtgaattgtcaagaatgtagccagatttccccacccactgatttaatctgtggcttctgcccatcctaactctgactcgaaaattccaaaggatatgattaatgataacaataaaaaccataattagcattttaagtgcttactctctgccaggcacttgagatacattatcttgcttaaccttcccaccaaccagcaagttctgtttttattcccactttacaagtgagtaaaccaaggctctgaaaacatagggagctcgcctgaggtctcatagctgacgaagggtattgctgggacttgaactcaggtcctcctttctgcctccaaagctgtggttcttcccattacacgatttccttacacaaatgatgtcagcgtaggacatcctactgtaatgccgacagcccatctgtaaggagctcacgtgtgtcccacctccctgtacctgtcagtaatctacttcctgcatcctctggggaaacggaagacacggtggagcgttcgcacacctggagagagccacacctgcctaccttcatgagagtctccgttccgcttttcctgcatcacagcttcaaagttgagctggagaatcttgttcagaattgtgatccactcttccatttccacttcactgtctgctgccaacaggtaactacttttgtcctgcatcttgagctcaaaagcaaaacgcctgactttgttgttctgaaagggggaaggaggcaaagaaacatattttagaagaattgggtcatccttgaaaattcttctctttatcgtctgctggtgagtactatctcaccggcatttcagatcgagtcatttaaaaaagcaagccccttccccttcagccctcatcactctccaccttccctgatttatcttcttcgtggctttattttcccatttgacacattacagattttacatatttatcttatttgctgcctggcccatccagtggaatgggagctcctcagggcagaatttctgttcttccctccttcatccctgtttctagaacactgtctggcaggtaataggccctttaaaaatatctgaatgaatgaaagttcactgaaaatttttcaatttctctagctcctattttttttttaatgaagtaatatgtggtatcacatttttaaagcaaaccattatcagtggacttccctggtggctcagatggtaaagaatctgcctgcaatgcaggagacccaggttcgatcctgggtcaggaagaccccctggagaagggaaaggcaacccaccccagtattcttgcctggagaatcctatggacagaggagcctggcgggctgcagtctgtggggttgcaaagagttggacacgattaagcgacaaacactactaaacactactattatctaccagtaggtctgactcccttacctggaactttctcaccacttatgagtctcagaaggtatttaggcaccaggtctcccttcccccg

SEQ ID NO: 60674 - DNA, 1473 bp, Bovine  19866880990414
  misc_feature (1)..(1): n is a, c, g, or t
ntgcctgtctccggcgagctctcttctctgtctcctcctttagatttgacttgggttccactttgattcttcttcgggaggaaagataggttgatgtcctgtgggtgaaggtggtttccaagaggcttctttgtatatacaacaactacatattgttcaaaattgtctcacctcgctgcactgttgccatatgtaaacctggaaggcacactggaattgccttttataggattgaaaacgatgccctttgcagaattaaaacttgttcacattatgtgtttgtgaaaattaggatggtaacgtgggggtgtggtttaaggaacctagctgctgaacttaaatgtgtcctcaccccttttaggaagtttgccttgaattgaacaaagtaagaaatagcctgtgcttagaaaccagttgctagaaaagtttctattcttaacattagctaaactcagagcagtctggataaattcaagtgcctcggtagactttgtaagggcagaatgtgaaaaatggttttgttgttagcatcaatgagtaggttgtgcttctctctcggaatttcttcagtacaataaaggcacataacttttaaagcaaactgcagaaagccatcaacatgcacatgggaggggacaattaagcctttcaaatgatctgttaaagggattgttatactcatatgtagcaattttacatagtgattttttttttaaacatcaaggttcatttgctgttataaagtattgggttagttaacttatttttcagttaatgtttttaagaatctaaacctaaacttctctgtaatggatttgacttgaattaaatcgcctttgatctgtgagacagccatatattgtactgccttcaaaattatgttgctaatcaggaactgagagagtaaagggtaaggggctttctggatgtaggttttcatctgagagatttaggcccccctaaccccaacattgtttaaagatgtttttcgttatcttggattcctttctgctagcacaatagttcatttatccattgagaagcatgagctgcttacatgcggtaatagattaaaccggttaaagctctcagctgatgtcgcttgtgatttcttggaggaagttgtgtggtttgggttcccttgtgaatattcttaaaaatcttttgtcagtgattctccagatgtgtagaaatatttgtccagaagattaaatacactgtagaaagatgctctgtgattttttttttttgaatcaccctagtgacttttaaaaaatttgtttctctttcttgtgctcaaaaaaaaaagaaattcagccactcacgtcccagttatttgtctaggtcgaaactcaccccaggcagttccagggggagtttgttctccgctgtaatggataaggctgggccggctgcagctgcacctggtaggggtgctcgtgggggacccagaagctcctgggagcgtgggga

SEQ ID NO: 60675 - DNA, 2090 bp, Bovine  19866881054250
  misc_feature (1)..(1): n is a, c, g, or t
nagggtgggatttttgaaagaataatattgaaacaggtatattatcatatgagagacagatcaccagtccaggtcgatgcatgagacaggttgctcagggctgatgccctgggatgaccctgagggatgggatggggagggaggtgagagggagttcatgattgggaacacatgtacaccattgctgattcatgtcaatgtatggcaaaaaccactacaatattataaagtaattagcctcaattaaaataaattaattaatttcaaacaaagatacaagtaggtgctcctgaaattctaatgtgttatcctacaaaaggtgaaagtgaaacttattcagccatgtctgactctttgtgaccccatggattatacagtccatgaaatactccaggccagaatactggactgtgcagccattctcttttgcaggggatcatcccaacccagggatcaaacccaggtcttctgcactgcaggcagattctttacagtctgagccaccagagaagcccagatacttcttatacttgacctcaagtcttcacagcagctcagttttagggtcactgtttcagggatgaaaaggaccaggcttggtttacctgcaaatccatacacaggagtgtgtgctaagtcacttcagtcgtgtccaattctttgtgaccccgtggaccataacctgccaggctcctctctccatgtgattctccagacaagactactggagtgtgttgccatgcctttctccagggtatcttcccaacccagggatcgaacccacgtcttttaagtctcctgctttggcaggcaggttttttaccattagtgccacctggaaagcacacctaagaaacagtgcctgaccaaggcctgggcgtttttgccctcaccagactgcctggtgggtgacgcatggcttcacagagtgcctgagagcctgcggtgggtgagaaaacccagccgtcactgatagggtatctgtttcatagacctcacttcagtacttttccagcccgttcattagccgatacctgtaacgactcttctctgctggaactgaggtgtcacaaaccttacctctgtatcagttgctgggcacaataaaaataagtcaataaatgaagcccggtcaatactgagatactgtggtcctttaaaccatatcaccgtttgctgtcaacttttaaaattagtccctcccttagtaataaaagcataaatttattgataagcttatttgtcctacaggagacttctgtgctctcctagaaggtttctggcaagcttgtttaaattataagttgtcctagtacctggaaaatgtaacctttgaggctggcagttatatgaaacctgttagcgatgtctggcatgtctcactgaccaggctcttctcctgtattttaagaaccagctcctggctgaccatggacataatcccctcatgaagaaagtttttgacgtctacctgtgttttcttcaaaaacatcagtctgaaacggctttaaaacacgtcttcaccgccttaaggtcactgatctataaggtacgtggtctcatcaggggaggtcgtcctcgattgtcacctgttctcctctgtccccccggggctgaagggggcgctaactaacctctctgggcccatttgcttcctcgtgtccatctagttcccctcgacgttctacgaggggagagcggacatgtgtgcggccctgtgctacgagaccctcaagtgctgcaactccaagctgagctccatcaggaccgaggcctcccagctgctgtacttcctgatgcggaacaacttcgactacagcggcaagaagtcctttgtccggacccacctgcaggtgcgtgcgctttagctttcaggacacgtgtgccctgtgggattctgcttccgcaggaaggccgtgcatgtcgacgtttaccaagttacctcagtgtgagttctgaacggtctggcagcaagacagaaagctcaaatgtcacatttactggtttggttaatttcctcctccacgttgtacgatttgggcccaggatgtgtctctgttggtaaattgacatttaagtattgagtcagt

SEQ ID NO: 60676 - DNA, 1988 bp, Bovine  19866881121889
  misc_feature (1)..(1): n is a, c, g, or t
nttcgggcagtctgttgctgtgttttgcagtttgtgatttttcattgtgaactcattttccgtgggttttgtttgctgctggagccccctcgtgccctagctcatgaaagcatttctgcaggaggactttgtgcttccttttgctggatccccaggggtttttgttgtcttggaatagcttttatgttattttcttacgttggagttcccaagccatttaagcagggtaaatctagaccacaaattcaggtatgatattggcctttcattgtgattagttgttgggattgtttattgttttttttcccaaggcctttcgtgtaagctaaatgtcataaccgctttctcagactgaatggaatatttttagtcttctctgtaaaaagtacaggtcttttagcatctgtgctcagtcccaggtcttcttgcctgagcagcttggggccatgtcgtctgtcttaggcctgaaaattcagccccaacaccaggggcgtgtgtctagtacctaccttggggatcactggagcagcacatgccgttatttctgtttttattcagatatttgggattattatacggaaagttttaagcacataaaaaagtgtagaaagcactataaggaactcagtttcaacatcacccagctccagcaatggtcaactcatggtcatcttattttatctgtatcttcactcacacttatgtgattccagtggacctctctttggtgtgttaatccaggagcagaaatatgtgtgtgtgtgtgtgtgtgtgtgtgtgttcttctgtgtgctctattgtatgccattggtctctttatatgtccgtgtgccccatactctaatatctttaagttattttgctttttagtggaacaagcaactttttgttcagctattgcaaaattaccctaactacacatgtacttttattcttccatataaattttagagtaagttaatcagttatcttaaattcagctggaatttgatacagtattgcttttatagtttgatttgggagagaactgatacctttatccagttttccaatccaagagcataaaggatctctccatttatttgtaacatccgtgttgtttaattgatttaaaaatttttctcttctagatcttttgtagtcctaggtttttgtttttgttatggtgaatgatgttgtgtttatgtattatgtttcccaaatgtagctattttattgctggagtagagaactgtcagtgatttttataagttgatcttggatttggcaactatattgaactctcttatttattgattgtttatttttctaggtggcatggtaagtatatgttttactttttaaggaaccgccaaactgttttgttaagtatctgtaacattttgtgctctgattagcaatgtatgaaaattctagttaatacccatcctggggtcatttagtgtattaatttttaaagcaagtttttagtcattccagtggatgaaatctgttacaattactgtcattttagtttgcatttccctgtgttgaatattttttcatgtgcttgtgtattattaatccatcttctttcaaatcttgcccccttcctttttaaattgggttgttttcttattactgagttatgagaggcctttgggtttcagatgcaggttctttatcagatgtgtattttgcaatattttctcccagtcttgcttgttttttcattttctgaatagtgaactttgaggagcatagttataaattttgatgatatctagactgtcagtttttttttaaacaactcatatttattgtatcctttctaagaaatctttctctcatccatgagtatagaagatgtttttcttccttttgtagaaattttatagtttaaagttttcccatttaggaaatctcttttagtttatcaattgcctagaatttttttttttaatcataaaatagactgaattttgtcatagtttttttctatctattga

SEQ ID NO: 60677 - DNA, 1415 bp, Bovine  19866881125517
  misc_feature (1)..(1): n is a, c, g, or t
nctgttaaagatgtgcccagcactgaagtttttctttaagttttaccatagaagttatttttaaaatgtaaatccccttcattgtctaggtgactagagtgccctaaatagagcctattctgtgatttgaataaaacttcagctaccccgtttatcatctctctttttccatccctcctctgactttttctccaagtggaaatttttttttttatttttttggaccttgaaagccttgtggttatagcagagatgaaaattttgtggggaaagatctgcaaaataaatttcttagaatgaactgggatagatggctcagctctcaggcccagacctcgcctcacagaatgaatgagccaaagttattgactcaccaaagatttccctgaagtgcgctgtgaatttaataaagctggatagctctaactggccatcattgaagaagtcatcttaccattcccttctgaattctcaatgccaggaatacttttgggaattcatgtgttggagacagtcctatgctttggagagataactctgttgaggatagagtgccttcaggagaaattcagctttttttttttttaaaataagctacaggtgtacaatatagtaattcacagtttttaaaatttaaatgaataactgcatttgtagttattataaaatatttgctgtattccccttgtaaaatatatccttgtaacgtattttacaggtaatagtttgtacctcggttccttccccttatattgtcccttccccgttccctctcctcaactggtaaccactagcatattctctgtctctgtgagtcttctgcttttttgtgacactctctagttcgttgcatattttagatgccacatacaagtgataccatgcagtgtctgtctctctctgtctggcttgtttcactaagcgtaacgccctccgagttcatccaggtcgctgcagatggcgtcgcttcctcctcctttcggccgagcagtgttccattgtgcgtgggtgctgtgtcttctttgtccattcttctgctgctggacacttgggtcgtgtccatatctcggttgttgtaaataatgctgcaggaacgttggggtgcttgtatcttcaaatagtgtttttgtgtttggatatatacacaggagtgagattttgagctgcagtttttttgaagtataattgcaatagctttaaaatggcagacaaatattatgtttatattttcctttccttactcatattgagacaatatttctatactgacacaatgacagtacaatttttaaaatgttcagctgctaaaatccaagatacatgtacttgaagtgctacggaatctgaattttgtctctcctcacatgtgagaacagctttccaatagctgtaactccgtatttgaagcacatgaa

SEQ ID NO: 60678 - DNA, 797 bp, Bovine  19866881148611
  misc_feature (1)..(1): n is a, c, g, or t
ntgaggcggcaaagacagcagcaggtaaacgataacaatccaatcgaaagttgagaggtactcaggggcctgtgtaaacgtctcctctgagatcgtacatgtggttgggaccgtgtgtcattcctctgccttgcatcatggatatcttgacatgtttccaaggtctctgatcgcgactattcttagtgttttctttggaaggtaaaaaaaacaaagtaacttgccactgaaagactggtcaaactggacactctcgctccacttccaatagataagcatgatttcttagagaaacaccaacctagttaacaagacggaatatttatctgtttttatcatcttgtaaaagccacagtgtcttcctgttaaaatgcttattattgtgtgctctggagtaaagagcagatatcagacttcttgattttccttagttgaaatggagagactatgaaggtaatagaagttcaaggaaacaaccaatgagccggtcagataagtgctgggttttctcagccttgtcattaatcgtcaggaaatatcgagcacttgcccacaaaaacggctccgtccaaacaacatgattccacactggtgtccccagggttcctctcagtcaagctgagcctgcttgggcgcttctgtgatccagcacactgggcttgtcatttcccgtctccatcccctttaccctctggggtatgagaagagagttctgttctctctcacatcacctgcccgcattgcgtgtgagaagtcgatcttcattgcatgtggtctggaaagtgatgtcaggtgtg

SEQ ID NO: 60679 - DNA, 817 bp, Bovine  19866881159055
  misc_feature (1)..(1): n is a, c, g, or t
naattccatatcttgaggagattctccttcccacacttactgaggatgtgccctcagcattttttttttaatgcctttggaacatggtgcatgaaaatttctaaaaccaattcatcgcctggataaaaactactgtaagattacattcattttaaaaggcatgcattcttaggctcagagttcttttttccacctactcagtgtattgctttttgctgtctgtaccaaaggggagagagttgaactaaagttctccgaaaagttatgcaccgggccaggatattaaatacagacaaacacagacaacaggaacatggttctaactaagcctgttgattttgatttattgcatttccacctgtttgcctttagattaggactcttgttctggaattgagcctaaactctgagaattcagggtctaattttactttccccagagtctctttctcctgagctccatgttctacattaaatatgaagtccagttatattaggaggctgatagttataatttggtcacagcgcatgtctcttttctgagtacagaaaaagactcattgctttttcatagcgttttgacctgcttctcgtggcagtcacacagttcctgtcctggggccgtgctgccggtggcccgtggtttacatgttcccgccttcacttgttttcggattctgctgacccttctttccttgatgtacttaacacactgaatcggttttagggatggtggataagcctgtgggtggggatggactaacttggaggtgtctcaatccacggcagctaattggcaggctgaaacccagaaggg

SEQ ID NO: 60680 - DNA, 1668 bp, Bovine  19866881227703
  misc_feature (1)..(1): n is a, c, g, or t
nagcactcgttattttttttttaaacctcttctggcaatattcaacgttttcattgtgtcttaacagaggtgtgtggtggacactcttcggctggagttaaatgtttttcttccttacagaagtagtattaaaaataaacggcctggagaaaacacgtgttttggaatgcacatagcactgaagtcgaggctggagggtaaacccttggcctctaggctaagctggaaaatcttgaaaatatttttttttcctgtggcacattcagattgaaaacaagaactatttttgtgactagtttttgatgacctgaggaaactgaccgttgtaatttttgtaccagtgaaccaggaaagccagtgcttttgtactcatttacttgcatttaagaaataggaaagctgaagaaactacgggagcttaaaactagtcaagcagtttagaaccaaaggcctgtattaataaacacagctatgctaaacgtttaaaggagtacagtatactgttatgtacatagagtttgttaatacagtcttggcattgtgtacatacacatatgacatttctacgtttttaatacatcagcttctgcataaagttcaattgtgacagatttgtgctgttcttagtatatgcaacgcacttaactctgctgttttattcttgtatataaaagcagtgcagtatggaggtgtatacagtctttgctatgttaggtttataaaccattttaaaaatttcatccttttgccaaagtggtggagtgtgtcattgataaatcataaatcctgtggtgaatagtggtgtaatgtaaagccttcaccatgttctattttcttttcagacattaattgagtaattttatatttgggaaaaataaaggtttttaattttatttaactagaatctctgccctgctgtagttaaacattctgtaccacatctgtattaaaaacaacattgctgattttcctgtagcgagtattgggtatttattgtcggacagccttaagagagggcaggatattgaaatatttgggggtgaaataacgtggtatatgaaatttgcttaaaaatacttgaaggggaaaaaagagggtggggatttgaaaccagcttgacaaatgttggttggtagttgtagaagctgaggttgggcgcctggggaccgttgcaccatgcctctgcctttgtcgaagtttccacagtatagatttcaagaggcggactggggggctggatctcccagaggacttggatcagcgctctgtcaccctgcagtctggctctgaattctactggttgttcccaaggatacgtagacacgttaatccctctgtctgttccccttccactccttcatcacctccctggttgactcctctgggacaggtggtcgtttatcccagcagggtatcctggccaggtgagctcaccttcttgggcccctacagcatcaccaaccctggacctgagtcaagtgatggctcagaccacaggtgctggtcttgcctgtgacacgcccagggccctagccatgatccactcagccccagagagttccagcaacagaaggaaaaggagtctttccacaagaaataaaatagccgcttttcctacttggggggttttggaagctgtcttttttcataactggggaggaaagaaaa

SEQ ID NO: 60681 - DNA, 883 bp, Bovine  19866881228350
  misc_feature (1)..(1): n is a, c, g, or t
ntttaatggtgaaagacattttactgcaacggagaattccttaaagcacgctgacaaaccttcttcttccaaaggatcgggtgaataaagagttccaggaatagtactggtatttcttttatgtgagttgtttctgagctactgacagattgagtgatagagaagggggttagacaatgacgcttgttgttaggcttgttgttagctgttccccaagcccctgtggttagacagtagcagcagtgcagcatgctacactatccttcagagagcaacattttggaaggatgttggggcattcagaccattgtagggtgcacctgagacccccaagtgatgcggcgggtctacacatgagagtgtggcacctacctgctcgtgcatgatttcagaaagctcttttgtcatttccctgtagttggccttcatttcttcctgatactctatctgatcctctttgatgagcctttcgttcaccactaaggcttgaccgcaagcttccacaaattgcctgaaacggtgcgggagagggaaatcaaggcatgaacagaacaaagggtgagcccaattggcaggatctctttcctgaacgagcacagaaacgatcgctacttcaagagaaagacatttccagtgtgcgttacctgaaaacttctttaagcaacttcactttattgtcagggtatctttttgtgtttgtgtcatctaagaaagctcgggcgtatgctagtggacccggcgttgacctggataaagaacaaaaatttaaaattaggttatgaagaaaatgcccatcatcgttagtttcagctggcatttgctaaaaatgctgcttggagtgagttagttatgaccgctgccctccatgaacttaggaccccca

SEQ ID NO: 60682 - DNA, 1619 bp, Bovine  19866881316545
  misc_feature (1)..(1): n is a, c, g, or t
nctatggaacactgaagtctggaatggtcacaggtaatcaatccaaacttcgcaggtccatctgcagcggtatggaaattgaccatttcagatgctagttcagagagagaggctctgatgctcagctctcctctgcaaaggggtcatagtttgattggctggggatgggaaggtggacacatgacattgcctccaccttcggcacgacagcgtgcaggtctgtccctccctatatgtgtgcatcagatgaaacggcctggccagcactgggagtggaaaatgaagactgaggctcatcacactctatgaccccaagtgctggtttgtggcagactttcaaggacactgaaagcactgtctagctcttctgtgaaccatggcccaggtgctcctatgagacaggtgtgcgcctgcttacagcaactgaagacaagactcaccagtgaggaaaaaggtcaaggtcaggattataaacattggagtattttgacaatcttcagcctaaaaacagaaaaactctaaggggatttgaccatgattctggaaaccaccaatggtacagaaatggtgaatatgaacttgttccctaaatccagagcacaggggctggagactggggcatgcaactttacagatgcaggacaagcactaaaacagctgatgcaaccatatacaactcatcacttaagatatgaggcaaagtgactgcaggcttcaaaagctgaagagaagttcctagaccaaggtgtgatttagctagtggttaccatggggaaagggaattgggaggggcaatatagagccaggggaagaagaggcaagaactattaggtgtaaaataagctgcaaggatatatggtacaacaaggggaatatggccaatgttttataataattacagatggaatataacctttaaaattatgaatcacaattacaacctgtaatgtatataatattgtaaagcaactctactttaatttttaagacctacaaaaatttaaaacgtgtggtttcagggaagggcggcatgatttagggaaagggtggtatcttgggtgacacggaagcagaagtcacgggggaggggagcccctctaaaagtgaccagtgtcggactcccccgagtggtgagcaggtgttcagaatccctttttatagtaaatcatgttatggttaagcattctctttttggatgcctgtgtttcttttcaagctggaatgctttaaaataaactacctctaaaaaccctccgaatgctgttttgagatcaggatataattaacttacagaaaaggttgtgcatggcagcacttgagtggcctgtgtaaagccctaaaggataaactaaatgtttatctgtggagctagagaattgggctataggctgggaatggcaggacactggtgaggggctgactctgactttggcaggattcttggttctgcaaggctgtgtgatcctgggcaaggatctagatcttcatgggtctagacctccaccatccaccttcgtgaaataagggggcagctgcacaagaaggtggctttttggtctctattgacccccaaattctgtggtttaatttggcatcttgagaaaagaacgcacacaatc

SEQ ID NO: 60683 - DNA, 1471 bp, Bovine  19866881332438
  misc_feature (1)..(1): n is a, c, g, or t
nctctgtcctgaattaaactaccgccccccgcccctgactctgccttttttttgaagcttctttgattctttgttgtttaattttaaaaactaatatatgcttgtaacaaacaaataagcagatcctattgaaacacttaacattaaaaagccttccttccaccttctttttaatcccactccccagaacatcacttgctatatatacagttttctatatgttcaattgtttttggaaacttccatgttaataacaatcatcaaatcatattccttgaagttttttttccccccatcaaatttaagagcttccagtttacaacaaaggtgagaattttcacaaatattcacttgttcaaacttgtgagagatacttgtggagaaaatgatgattctttagttctttcctgaaaaattaggaatgccacagaaatgaaattgagcattagtgggatgttccactgataaatggtttcaaatcatgccccaaaatacagtgcccttgaaaacttcattacaagaataggttacccaactaaaggatgaataaatggaaacctcagaatgaagtctttcctctgtgattttgacaacagttttgttaacatgaggagttaaattagatgattataaattagactccatgttgacatatttttcctgcactgtgctctgaggaagctaaagggtatctcaagtttctttgagcgtgaagtattggtatctgttcttcttagtatcagttagagtaacaaagttatttctagttttgcagcctagaatgaaaagttttagttgaaaactggagatccagttgcttcagaaacataccaaccccagaaataagatacacttataatttcatttttttatctcaccaacagagaacctggatgtttaagcagttgtagaaacagatgattaaaactttgagaaaaactccttttttcctttcgcctgtaacaacttttctggggataccagacataaatattctaggaacagcaaagaactcattgacattttgctagccaagattgatgaagagtgttaagttctgtttaggggaagctttttcaaagattaaggagcttgaatttcagctttgatccccatcacagtaattgcaatgggccacgtggaagtttagatgctgccgttttctttctaggtgtcctcctgtatcctagtctgggaaggccatgtgctttcttgctaaattgtctcaatgcttttatgactatgtagttggttgatccagtgacatgtcttagtgatatcatgggatttcttctgtctctccctgcatttttaggcagaatgagggcagaattattattgtattatcagaggcagaggaaataaattagacaggggcaagtattttacttcatgtgaaatcaaggtagcaagctggttaggaaatgggtcaactagtgagcaaaacgcatagtggggttgagttgtaatc

SEQ ID NO: 60684 - DNA, 812 bp, Bovine  19866881343837
  misc_feature (1)..(1): n is a, c, g, or t
naatgagatgagggacgtccaagccctttgtaagtagtggggcctggtttcctttttaggtcagtggtttgtagatctttatcaggctcatgtaagccaaagaggaaaagaaacagaggaaaaataaatatcaggatgttgtttaaaggaaaatgaattaaccacatttttttgatacaatgctgagaacactctaggattctcctgtaactaaacatttccaaaagtgaacatttctagagcttccaattattaataattttcccattttccctttaaatttttttgttgaagagatctgacactgacaatacaccttgaaatgtcaattgaatgagcctcagagagtcacgctttaccctgactgctcatacagcttctagaagacaataatttcagatctgtatggcacagaaatctcataacaacctgctcttttttttttttttttccattgtggcataatattcataacataaaatttacatctcaaccatttttaagagtacaattcagtagcattaagaacattctccatcttgcacagggctcttttcatcttgtggaatcgaaacactgtacccattaaacaattatctccctttatctcctggcaaccaccatttcactttctgtcttgataaattgactactccaggtatctcgtataagtggaatcatacaatatctgttcctttttgactcatttcaattagcataacgcctcaaagttcatccatgttgtagcatgtgtcggaatttccttcctttttaaaggggaataatattccattgggcatatgcatgcaatt

SEQ ID NO: 60685 - DNA, 1362 bp, Bovine  19866881385094
  misc_feature (1)..(1): n is a, c, g, or t
naactcaagacaagtggctcaattgagtgaactccaggtccaagtagcagtcctggctcccctgtttaccagctgtgtgacttaaggcaagttttagcccttctgtgcttccatttccttacctgcagaatgggtttagtaagtgtacacacttcacagggctaccgagggattaatgagatgatccgtgtaaagttcacagaattgtggctggcacatagcaagtgcacaacgcatgcttgttgctgttactccccgtccagagtgggaaaagagtcataatggaatggaaacattattagtacccccttttccccacccaccaaaaaaaggccaacagggagataaggccctgaaggaagccttctgaaaataatcaaaagttgactgtgactatactgtccgccagcctgtgctctgcagttgccgacagtgaccttgtgttatgacccatgcaggctatggccactcggacgctgacgttctccaccagtcgttacttgaagccaatattgctactgaggtgtgcctgacggcgctggacaccctctctctcttcacactggcgtttaaggtttgtattgaacagctgttcatggtcagagcctttctgaaactcattttttgcttatttagctgaatcagcaagaacttcttaatgttgcagttttactgcagcaactgcttttgcccctgtaaggaagccattaatccttaaattcctttagcaaaagcattccacagttaatgaccccaattccctgaaatatagtacagcttaactctaagctgagcgccgaagaattgatgctaatagaactgtggtgttggagaagactcttgagagtcccttggactgcaaggagatccaaccagtccattctaaaggagatcagtcctgggcgttctttggaaggaatgatgctaaagctgaaattccagtactttggccacctcatgcgaagagttgactcattagaagagactctgatgctgggagggattgggggcaggaggagaaggggacaacagagaatgagatggctggatggcatcaccgactcgatagacatgagtttgagtgaactctgggagttggtgatggacagggaggcctggcgtgttgtgattcatggggtcgcaaagagtcggacacgactgagcgactgaactgaactgaaccggtcagagtgtgctgcctgcttgcaactggtggacacaggctttggcgaggttaacccttggccagatgaaagcatttaccaggaacgtggctttgctctgccctcaaggatgataaatacaggagcctaatcaggcatttctgccttcactgtctttaaacatatccaaatgtggtag

SEQ ID NO: 60686 - DNA, 1708 bp, Bovine  19866881589878
  misc_feature (1)..(1): n is a, c, g, or t
nggattgagagttggagaggctcccaaggatggagaccggggaccaggtatcactgatgggtgggagaggaaggtgtggacacggaaggtgggaagggtgggtgtcatgtgacaggaagagggagcccagggtgtcttcagggaacccatcaaaacacgtgaaccatctgactcagctggtgggtcttccaggacagaacactagctccccaaaactgtaatcaacgttgtcacatgactgacatgcagcaactgattccttgaagcaccccaacttagtttaaatataaactaatacacaactacaattgagaggtgttcaaggctaaatagaacatgtgtactattcagaacagtaaaggccactgtgttcactgaatattgtatgtaaatgatgaacttgttgacatttatctaatgtcatctcttgctttcctacatagtccaatttgatggtggctagagctaaccttccatctttaaacctctatatcatttggctcacattatttgaaaaaacccttaaagaaagaaatgtagctgaaaggatgaaattaaggaaataaatgaatggctgcccctctttggacatccccctcattcaggtacacaggaatagaagagaaagcagaggtgttaagtgttatccaaaatacatcttcaaataactagatttaaggaaaataaaataggtccttagaagaaaagttggagagccacagatctgaatgaccgggggcagtttaatttacataccttaacatatgacctcaagtggccctccaatccttcctcatggcactgggcaaccacatgaataatgaccctacacaccacaggaatgaataaagcaatgaatagtaatgtggaaatggaaacatttcattattatcacagtagcagtacaacaatgatgatgctactggcaccacaggaaacgaggaaatgaggcattggatggggtccccacatatggaatcaaaacaagtttcttaaatatcatgttcaacatgtactggcaccccagatacatatggctgtgctccagatgtggacagactgagagggaagaaggaccacctttccacctcgctcaccgtgtcacgttgaccgcaacctcctcctgggttgctcgggtgaggacgcggaagagctggtttaggatggtgggcaagaaggcgatcatcacgtgaccctccatcgcgtgcaggctctacgggcgtgggatggcaaggttcatgttatcattttaaaagtaaactgaccccaagaaatctccactcagcttcaaacacagatggaagaaacccattgaaacaaagggagacagtggcaacctactggacagagatgtctatgtccgaagcctcagaacctgtgactatgttatatggcaaaggggaattagggctgctagtcagattagctggccttgagatgggagactctgctagattatccaggagggcccaaagcaatcacgagggtccttagaagtcaaagagggagcaggagagtggaggggaagaatgctccgagatgcaacattgctggctttgagatgtgggaaggggccacaagccaaggaatgaaggatcctttaggagctggaaaaggccgggaagtagatcaactcccagagcttacagaaaggaactcagccctgttaataacgtacctgggtgggcccagtgagactcatgtcaga

SEQ ID NO: 60687 - DNA, 1085 bp, Bovine  19866881684100
  misc_feature (1)..(1): n is a, c, g, or t
ncagagagctgctcctgaggagcatgtggaccaccacgccctgggcacacttcacagcaagcgtcagaggaggggttgaagacgggtgtgaaagaagttctcagcactcctcatgcgcttcttattaggaaaatatggtaaaagtggggctagcagcaggtcttgattcccagttattcctctctctaagcctcagtttcactctccacaaaataagtgtaatcaacttcaaggtcctaaaataggggctcaagattcatttcgggtctatttttaaatttttagtttaggcatttctttgaactcacagcattgatcaactaacttttttacaatgtccaaaagcaatattagcaaaaaaaaacaaacaaacctgtaactcttaagccattaattttggtgattagcttacaaacagatatggagatagaaacaaatgatttaaaaattttgaagccttagatacaattcattaaatgcaaaatgccatccgccacacctgcaaaaggaatataaaggaagtgatggccactgagctcagaaccttagagtctgaaatatgctccagagacaaaatgatcaggaagtctttactgcaaaccatctatgcattgactctgtactgcagaccatctatgcactgactccgtattgcagactacgtatgcattgactccatattgcagaccatctatatactctgctgaagacaggcatcacaactatcttataaaacaaaagtaattatttctactttctaaatgatgttaccaattatatatagttttgctttaataattaaaaaaaaaaaagtcagtgatagaaaattcaactaaaacataaatgaaaaggtctctcagcttaagaatacaaatgaaactcccacttgggaatcccacacaagaagttacttcactgtcattgataatgcactctggtatggctccctttacgtgctgaataaacattctttgatataatttggtttacatagcggcagctttcagctgaggctgggtcacaagctgagagcaccatgggggtcaatttagctgttgatgcaaaattaattttcaacggacatt

SEQ ID NO: 60688 - DNA, 955 bp, Bovine  19866881720462
  misc_feature (1)..(1): n is a, c, g, or t
nagatgagaaatgaccaaagcaggaatgactgctaagggctccatataattggagggcaaacagggatgcagatacattaaaagaaaaaaaaaatcaactagccaaaatagactcaaagcatgctaatgttgccactaatatccaagagatatattcttcaccagaaaaaccacttaatggggaagaagggacaatgttagatgtaaaaataacctcagagtgtatactctaccttacacacgtcgacagctctgctctgagatagataaaaagcaggctcagcttcttaaagttcctcccagccctcccaaggcctagagtactttaaaaagagggtatgtctgataaatagtgtttgaaacaattaccaagtaaaacttaagcagtaagaaaatgtggctttgccccagagccagagaataataaaatacacgaaggtatcagtgataaaatggggtattcattcataacagccaatatctctatgctagatgttaccctaagagcatatttaaatttggtacaagcttaggaggcaagtcttattttatccttgtttaagggaaaacaatgaggcatgagggacatgtttggagcaaacactttgctccaaagtttgctccaaactcacaacactaaatagaagtctggcttctagccgaggttgtctggtttcagtaccgacactctttaattattagaccagaaaaaataaaataggtaaagaatataaacaggcaagtcagacagcaaaaaaaccaaatggcaaataaacatgaaaatatgaaaaatatcactactaagcagcagaatagaaattaaagcagagaaacaccattttttattcctctggatgcagagaaacaggaatatggagttgttacaacctttgggggaagtaacctggtaatatttaaagcgctaaaaacatgataaactgtgacccagaaatcc

SEQ ID NO: 60689 - DNA, 1094 bp, Bovine  19866881952059
  misc_feature (1)..(1): n is a, c, g, or t
nacgccctcccgtcctctccctcagagcctcgctgaactcagtcctttcgatcgcatgtgctgctctgggcttggccgcttgacatccacgcaaactgaagttccagatccacaggcaattggaagtcaggtaatgttctcagcaccaagaaaacaagactcctctggaatccagcagaatgggagagcgtcggcccacgaatgagctcgacattggccaagtgtgcacaaagcctcgaaaaccaggggatgagctgaacaaaaaggctttctgattctattgctctcccctctgacatgatggcttcccgtgaactttctagtcatttcttgcctttgtgtgtctggtgattaaatgttaacacaagctgaaacgctgaacgccactgcttgaaatagcaaactgaggaaacggcagctcttggagcactctattttaagacatgagaaatgcgtcgctctgcttataaagaatttaggacttccttgatttatctgtgagctacaaaacctcctccatcggctgagatgaaaaggcttcatggaactgagtccatttttcaaaatggtgcacttctccacgttgccccacaggacccagcactgctgctggggtggagggcggggagggggtgcttgcaataagaaggaacggggcttccaaaggcagatgttaatcctgcagccctgagcctttctgcaccaccgtcttgcacacaactctcactccatactcccaccgggaacttcttggaagctgtcagatttgaaggaacaatcctcaccttcctataattagggtgagcgcaggacatgagcaagctgtccccctcccccagtgcaagggctgttagcagatggatatgtgttcgttttctccatgcgttttcatgcagcctgttcacgtgcatggtgccaggtctttgggatcctgagatgaaaaggacacagcctaccccaccgcccgagaaagctcacgagccagtgggcaggtggacgtgtgaacgaggcagaacacggtgaccgacagcagtgggcaacccaggagtggcgcttgacccactagagtgaaactgactctcctcccctcccca

SEQ ID NO: 60690 - DNA, 1300 bp, Bovine  19866880519044
  misc_feature (1)..(1): n is a, c, g, or t
natttttcttgttaagttactgaattgaataaaaatatgtaataccccttttaccataaaataaaccaatggcaatttaatagttctcctaagccctgtaccatcatttcggaaatatatatatatatatatctttctttcagatgaaaattgaattcccaagggcatagttttcagaaaatataacttggtgatgtttttagtcatgtagtttgaaatgaaattaaaaacaggaggtggctttcttgaaacatgtgagactgaaggccaaggtatgactgactatgtaggattcttttttctagttgccaaaaaaagcttttctgagctgaacaagacaggtataaaattaaagtaattgcacacttcagattttactagcaacatgaaatcttgtgggcaatttgctgctttacagacatcgtggcctgccggcacggggtggggtgcatcacatgtgagtgcatttattgttcccagcgactctgaatgatcctgcggagtcgctcttacagcagtgcgtgccggcggcatgccagcttgtgttccagagcctgcctctttagatctgaaagttattccgtttccttttttttgttttgtttgttcctaattcattggccatgtgtgtaattataggttggagggatgattacacaaacgaattacaatcaaacttggcttgtgagcatacagagctttggttgttaatcacaattatttaagcaggagctccctctccctgagatgcagatgccacattactctcgttgacacttccgcaagtcagactctgctgatgtctcatgaagaccatgtccgtgtcccgttcagcaggtcacctttatataacattggatgttgcttcttggctttgagattgctaagactggaatcagtacacagacctggtatcagaagtagatgtctcctcaaaatggtcttagaaaatcaaattgtaccacacctagtgggaaatatattgaattagtgtatttccacgttattgctctaaatggaaataatggatttttaaaataaagtttttgatttgaggctttttaatgtagacagaagacaacaggattaaaagattcccagtctctcaaatgtcacattaccataaattaatacatacagaattatcatacagccaaaagcactttgcagagcacaccacacttgaaagatacagtatagactatgtatcctcacgatgactttgagcaaatctcctgaccaagtgagcatcagttctgaatctataaaatgagagtactaacctttctcaaggaatttt

SEQ ID NO: 60691 - DNA, 1607 bp, Bovine  19866880537940
  misc_feature (1)..(1): n is a, c, g, or t
naagctttctctttttttggaaatagatttagcttctaaaatctgacctcccatcttttggaaacagccccatgctccaatatagaacatttcctaagtgtatgaagatcatcgtaggctgataatgtgtcgtcatttagaaattctgacagtgatacataaccgtgaagctgctggctaagagtttagtgtgaaataaatatagcatgtagatacttgcactagatactggaaacgattgaaggcaaaaggagaagggagcttccccagtggcttagcggtaaagaatcctcctgccaatgcaggagacgcaggttcgatccctggtcggggaagatcccacatgccttggaataactaagtctgtgcgccatagctattgagcctgcgctctagagtctgggagccccaagtactgagcccaagtgccagaactccagaactcatgaagtctgtgccacctagagcctgccctccgccataagagaagccacgcgatgagaagcctgcacacctcggcgagagagcagcccctgttctctgcagctggagaatggtcagtgcagccacaaaggcccggcacagccaaaatagataacaaataaataaaattattaaaaaataaaagagggggatggtaaaagatgagatgtttaaatagcatcaccgagccaacggacatgaatctgagcaaactgccacggatagtggcggacagaggagcctggcgtcctgccatccgtgggatccagagagtcagacatgacttaggactgatcgacagcaatttacaccagaaagaacagggcggtgtataaaattttcactgttttggataatttgcttttgtaaaaagtcatgaacgttaaaaagaatgtcagaacttaaaatgacctgatgctcacttggacttacttctccagagtatttttttaatggaatttttgtattctcttagaagatcaattgcacttatatacatttgcaggaacaatgtgacaaatgatgaaaacaaaataaggtcattttatttcattcaggacaagagtgattcatgcaaaatagtattaaaaatgactatttaaattgcacattgcctgtacttttcagaattaaagtgatatatgatgtagagatgatggatgagggagcagtggaaagcatattaatatacaaagtagcttacatgttctaaaaggatatttaagattttttacactacctcatttaatactgaaaataaagctgtgagacagttattattaattttttagatgagaaaatggaggcagagacagttttctccaaacagctaatgagtatcagagttggactcatatcaaggctatttgacttggaagactgagctcctagccaccatgaggaatttgtaaaagataggaaaattggctatattgcttaatcagattcctaacacattatttagagtggtaagttttgtaacattgggctcagttttggacttctcccagactcttgcagtgactccttgtaggcagaatatttattcatcctgctgatgaaactcattttgggactaataagatgaatggacgtgaaatgtgttacttctaagaagcaacttc

SEQ ID NO: 60692 - DNA, 783 bp, Bovine  19866881491039
  misc_feature (1)..(1): n is a, c, g, or t
ntcttaaatttttaaaataacatttcactactatttaaatagtgatatatttaccgtggttattttattaactcctgtgggaggaagcagcttattttgctatacagtttgtttatgtgcaaaatataaacaaaatatcatctagaaatttaatgccaccatactaaatcttttcttctagccaagattgcatacataaaatatttcagctacatgaggttttaattttctctatttataaccagtacatttatgacatttttaatggtcaatgatacatgttaataagggataactgcaagcttagttgtttaaatatttattaaatgtgttatccagccctatgatagaaatttatttttgcatgtaaaaaagtagcttaagtgtatatatttttgctgcaatattcccaaactgaaaatcatattttttgtaatgacatctaaaaattaaatgtttggaaataattttatgttattaatgcatttgtgtgacagaatgattttttttataattatgcaaaaagttctctttcagacttgttattgctaattaactcatgtgccagatattttaaattattcaacaaacactacttgagccaatattaagtgaaagacattgtgatattcactggagatagaaaaataaacagtactctttttcagctagtgaagtaacatccagagcttgctctttagacagcataagtcaatgcccataaaataatgtaacatgtgggacatgagatgtcagggaggacacatcgctctggagggaagt

SEQ ID NO: 60693 - DNA, 1425 bp, Bovine  19866881602735
  misc_feature (1)..(1): n is a, c, g, or t
ntatatgtttatatatatgtgtgtgtattgttagtgaattgtgagatacatacatctcacatcttctttatctgttcttcagtcaattgacagttattttatttaaattttatttacctatttcactacctttcaaccacctaagcagttgtgtttttttaagcaccgatcacagacggtggagacctgttgtgtcttatgcttttacagtttaatttagggaactctcaggcaaggtagagtcaatcaagaaaaaaatcatggtgcttccttaccttctcagcgaggagatctaactttggatacttaattgaagggtcattaaactcactggcatttcttgagcaaaaaccctgttctcttgtttgagagtttatagacaagctgatttgtaaattattttctatagccaatataatctgaagcagtataaatttaacatcatatatggaacactaactataaagctgaaatatgcttttttaaatgcaattttccaactattacaagtggttgcttttcagtgatgttcagagctgcagtgtttattttgcaacctttttctggccttttacttcatgccatctggtaaactttactgataatcaaggctgaataacttataacatctataatcagtatgtaatcaaatctgacgaaaaaagcatttacacatgcttatttcattcatgtatatataggtatatatagtttctctaagtaactatttttaagtgctgctatttaatgccttttcctgtagtgctagaactagaaaagttctttttgttattgatgtcctgatatgagtggaaatattcgaaattaatgtggtgttaatgatggcaattaaaatcctggtcttcatgcttttcttggtttgcccttatcttcaatccagtactgatttggggattaattcaggtatttgtaggaaaactgccttctgaggagtcacttctaaaatacttggcatccaaaatattactaaatgaaaattaattgcttttcataaaaaagaacattttacaacactttgtaatcatattaaaataatgactggcctcactaatgaaaattaaatgtgatgctgggggttctgacagtgtggcctgggagctcggtttgcatgtaaaattgagatttctatcctcgctgagcagattttttttctcaaaataattagttctgtcaaataattaatgttgttgacaggactaagttgagaattttcaaccttcctcacatatattataattatttggaatgacaagatgatattaaacaataatcttcaattctggctgtcaaacttgatcaggtcatttattttagtactgaagttcatttaataaccttgaatgtaacatataagtcatcatctatagtgccattacatgtggaatattcattgtagtcatcaaa

SEQ ID NO: 60694 - DNA, 812 bp, Bovine  19866882076628
  misc_feature (1)..(1): n is a, c, g, or t
ntcccagatttagtgcttttagttccgttattgcctccatgtccataacttgattcaccagtaaactggagttttccaaacgttatctgtctcattagttattatatatatgcgtgcatgctcagtctgtccaactctttgtgacccgccaggctcctctgtccttggaattttccaggcaagaatactggaatggttgccatgccctgttccaggggatcgtcccgacccagggatgaaacccgcattctcttgtgtctcttgcagtggcaagtggattctttaccattatgctacacgggaagacatgtttataattcacattatcattttctaaagcactagtaatcaaaatattttgtgaagtatgaggtggttggattttttcagatttgggaatatatttagttatgctaaatgaaacagtgatttttcttatgacaaggatgttaagtagcttttctaaatctaatttgaattaaaaatgttcttgaaatttaggttaaataatagatttaatcacagtagactaatttccagttactttgtatttgtgcccccccaaaaaagataaatgcacacaaagtaaatctacatgcatgagatacgcatactatttgtgacttttaaatagtttagttgaggtagaatacaagtaaaaatttaccttgttgaaatatcacttttagattgaatcctttcaacctaagtcaatctgctctttaaactttcatgatatctgatattttgtttttttctgaaggtaacaaaggaaatatgtcttcatatccaaaatctgtcacaaggcaaag

SEQ ID NO: 60695 - DNA, 1966 bp, Bovine  19866880353039
  misc_feature (1)..(1): n is a, c, g, or t
ncccctgccgccccgcccctttcctaaagaacctccagtagaaggaaactttgcaaccttttagatgcaacacatacattgagaaggaagacttgattttcactgatttaagtcataatttaaaacagcaaataaagtgcttcagggtaaaatgttatataaaagaaaggtgatgagctattggttgcagtttcacaagatagcttatatatgcttgctttatttctttgacttttactttttggatggtgtgccgtatgaatatagttctgttgtaaaaatctagtataccacagacagaaagctttcctggtggctctgatggtaaagaatctgcctacaaggtggggagacccaggttcctgggtcgggaagatcgcctggagaaggaaatggagaacaacccactccagtattcttgcctgcagaatcccgtggacagaggactctggcgggctacaatccatgggatcacaaagagtcggacatgactcagtgattaacaggagcacagacggaaagtaaaaggtgtggaagttcccctccctgctccatgtccctctttgagtctgaaataccttctttcggagaaggcaatggcaccccactccagtactcttgcctggaaaatcccatggacagaggagcctggtaggctgcagtccatggggtcgctaagagtcagacacaactgagcgacttcactttcacttttcattttcatgcattggaggaggaaatggcaacccactccagtgttcttgcctggagaatcccagggatgggggagcctggtgggctgccgtctctggggtcgaacagagtcggacacgactgaagtgacttagcagcagcataccttctttatagtttgatacagcatattctcccaggcttttccctctcatttctattcatacactcacacaaatacagcttttttgacataaatggattcacaagaacatatggttcaacaacttgattctcaaggggtgatttactccactcttttttcagtcttaattttatacccatatcagaactgattttgttattttatagctagtagaagctgtaattgggtgaagtcattagggagcagcaagtcttactcaatagccatataacagaataattttgtcttgtggtatcaagaacaacagtcataatgaaaacactgcccttaagtgttaatgtacttaagagaaataattgacttgttcattctgaatattttctctagaaacacatacatttaacaaattaagcacacccatattttattgactgtcttaattataatcttgaattaaataaagcccatttaaaactcactgagaggacaattgtaaatactggattttgtgtccaagtcaatcaattgctcttatttgttcatagactaggaaaaaaaatgagaagttttcctgcattttcagctcccaaataattcttccatttaaagtgaactggactggagtcacctttaaggttgctggctaccaaacattcaagaccttaacccaaaggaagataatttttttcctttagtcctgctggagcagctattgctgtaaaaagattatcatttcaaagtgttgggttacttctcaagttcactagtatgaactttctttaaaacctcgggagcaaaaacagatttggatggttcacctttagacctgatttttaaagtagttgctattttggagggatggtggttggattcacatatcacagccaacccttcttaaacatcagggtttgacctgctgccacccatccagagagctctgttgtgttagagcctccttacggtcctttcctgaaaagactttgatctgttccttcaagaaatacctgagtgccttctacaagcactcattgttctgttatctcagatgccaagaactaaaagctaacatcataatgaccattttaagtagtcacctggtatgcattt

SEQ ID NO: 60696 - DNA, 1857 bp, Bovine  19866880355316
  misc_feature (1)..(1): n is a, c, g, or t
ntcgctcagtcatgtctgactcttagcaacccccatggactgcagcctaccaggctcctctgtccatgggattttccaggcaagagtactggagtagggtgccattgccttctccatggtcaccttagcccctaagaaaataacacactttataagatttaatggccacacctggaccttgtcgtcattcaaaattctttcacctttttgattgtccattctgatatttccctctgtgaccacaattgcgtctctttactccttacaagttccctcatatgtgttgaacctactcttcatcctcattgttatcccctgatcttgaaaattcctttttctccaagccattttcagttcatgagctcttatcctggtggtcagcatgtcagcagtgagtttgttaacatcctaaggaccctctgcctcatttctttgccagtcctcatattgtggttgagtaacccacatcaaccatagtctctaagtctaagctttatcatcttgcaaaatcttaaatcctgcgcacctcattttcttaccatttaggttgtctttactgcatctcagtgaaccttgtaataattttgtgatggtttgccattatattccttctaattcgtattctaagccttgtccacaatctccaggatctaatcccttttctactacttcactgtgacactggagactagcctaaggctcctcgagctttttttgccttaaaaccttgctgtatttttacccatccttttctcctaaattctgaaaaaaaataaggaccctgtctttggctcttttctcttctgtatgtatgcagtgtgtctttctgtgactcccgggtcacttgtggctttgaataccatctgtgtgctgaagactcttcagtgattgtctctggttggaccttccccctgagcttcagacatatgtacccactgcctactccactgcacccctactcatgtccaataagcatctcgagcttaaaagggctggaaaagagctctagtcttgcctgatatgaattccttcctgccagttactttcccatctcagtaaatggcttcaccatgaacccatatgctccagccagagcctgtaccacccctattcctgtcttcctcattctccacattcaaaatagcagtgcatcttttcactttatttataaaacatgttttggatctgactcctcctgagagtcaccactactacaagctgaggcccagcgtccctcatcttttgcttgatttaccgtaacttctcccattccggtgtccttacatccaaattagcccactgttgtccatctttcacagagcagccagggtggactttctgtgataaagtaagcttcatcatcccctagtttatgtgcttcccatttcaaccagagtccaaggcctctgcccccttgttcattataatccaaccacactggtctttttttccatcccttgaataccccaggcttgctccggtcttagtgtttttatatttgctggtctctctgcctggagcaatcttaccctggagttctgcccctgcctcctccttattcaggtctgaaatcattggtgacctcagaggagactttcctgaccacactggctaaaagcagcccttcaccatccccatccccagtcaccagctcatcagcctattttatcttgatagcatttatcagccctcccggcttgtttccccacatgctccttaactggagctcaagcttcttgtgagcagggacccttggctgaatgtccgccatgccgagaaggtgcttagaggaccaactggctgactttccaggataaactgcccacttgtgcccttcattgccgcttgcctactttg

SEQ ID NO: 60697 - DNA, 722 bp, Bovine  19866880480957
  misc_feature (1)..(1): n is a, c, g, or t
ncacctgggagcgagccgagctcccacgtttggggcgggtgccgagggtggaaccgggagtggctgccccacctcggagccccttccagatttgcccccgcggagggtggggctacccgcggcgccggggtttggtgggaggcggagggaattccctggagtgaagcgtttggtaaaagtattgcaggaacaatcgggcttcccatgattgctctactctgggcggggaaactgaggcggaggcgaaggtagcgacttagccaaggtcagaccgcaaaggtggaccgtcctgatcccggatcgggacccaagtgtcgctcagtccctcttggttgtgctgcagccgtgcttgcctcgaataaatctctgttgtgtttgttttagaaatctgctggcattgtgggactgcttcagggctgccggacgaacgccaagttgcttcgtgtgtttcgggcaggtctagggcaggtggcagccccgccatggatggggacggactttttgatgaagaaacccaaagcaggcgatgtcagccagggcgatttggccgtcaaaggttttgacaaaacctgccgtgttccctttcgtggaatccgaatgagggagattacagacaccttcaccgggaagccaaggacatttctgtataatcagtggatgaaaggattttctcagactctctttttccttttccttgaggattaatccacagcagtctacaa

SEQ ID NO: 60698 - DNA, 2139 bp, Bovine  19866880491753
  misc_feature (1)..(1): n is a, c, g, or t
naaccctgtattttcggtggacttccctggtggtccgttaagactctgtacttctaatgcagggggcatgggttcaatccctggtcaggaaactaagatcccccttgcagtgtaacccttccccccacaaaaaagccatgtgttcctttctgttttcatgccttctgtcctttctttttttaagatttaaatttttatgtatttattcttggctatgctgggtcttgattgttgtccatagactatctctagctgcagtgagcaggagctgctctctaaataaggtgtgtgggcttctcatttcattccagagcactggctctaggcgcatgggcttcagtagctgtagcacatgggcttaattgccccgtggcatgtggaatcttcctggatgggattgaacctgtgtcccctgcattggcaggtggattcttaacctctgggcaatcaggaaagccccagcttttttgtttccacttgtgcccaagagccttcctctttagttccatccacaaagtcccctagcaagggtcatataccctctatcacctctaccctcttccactgcctgtttccctggaattcccaagttttgcctagtccagacctcatggcccttgggactcaatgaaggacagcatctccaataaggctttggctgaagctgacagtgtttaggagcccacatatgtgttttaagttcacagcacaaataaccaaacatggatgttagcaaacttccttcataatcacttgtgatttctacaccacttctgtgaccccctgtcctctttccctacttttcttcacttataattttctatttttggacaaggggaatggggagcagcagaaagggaagaaaagaacttgaaaaagagagaatgaaccaaaaaagaaacacagggaagcaggaggaatgaaggaagaaacagaagggaaagaaaagagagaaagaaagggagagagacaaagaaagaaagagagagagagacaaagaaaaaaaggaaaaaagaaagaaagacacccttaaattaagtaaccacacatgtgtctgaggcatatatctgcagtatctctacttaaacagcagggacctcatggcagatattacacatttaattgactaaagaaaccaatcatagaacaaagcccctttctttgtgagatgtcatatgataacccaaacacagtagttgctgtttttctccagacactatcaaccacagccgtctgtcttggtcctagactgtttaaaaaaaatttttttttcttttaatgtgtacatgtgtgtatcagtcacaagaccaaagtagtctccgttgcaacaatggccgccctgtggaattcagctgggctctcccagcccacagcccactcctggctgccagatgtcagccagccccagaggttctctttcatcctcacccaccgcagagccattttggtctgtgctgtggtgggggctgacaaccctttgcaagctccaccccagatctgagggaggcctaatcttgcctgaggcccgctgtggggaggggggagggtaaagagcaaagcctcctgggaacggagatggggtgggttagatttgttctcaaagttcagccactgctgcttattaaaaggcttattttcaacctaggaatccagtccttaccatgaaggaaaaccaggacagatcttgttgacagctttaaaagaagcaccgtgagctgcggacgtggaagggagcacacatgtgtcctcctcctgtgggtcttcccaggcggtcctgggtcctagtctccaggcaagaggcagttggacggctccagaccccaccacgtccaccgcctccttcatccctttctctctggatgctttcttgttctcctcttcctccttttccttctcttcttccgtctttttcccttgcacactgcagatttagaatagccatgggactccagcaaggcagtcggaagactcaccccacagagatgctgcccagagggccccagaactgccagccccacttctgatctgtaagaaaatgcaagaaaaaatttcctcgtctgcaaaatggagataatagcatccggttcatgtgaggagctcttgtcgtgcttcgttcacagggtcagcacagagagttca

SEQ ID NO: 60699 - DNA, 1873 bp, Bovine  19866880525848
  misc_feature (1)..(1): n is a, c, g, or t
ntgataatggtgatggatatatttttaaaagaggcctcatctattagagatatatatttaatgatttttgaatgaagcgacataaaatctgaggttgtttaaaaaataatcagcaaatgggatttctctggtggtccagtggctaagactctgtgttcccaatgcagggagccggggcaggatcagttcttggtccgggtattagatcccacatgcagcaacttagagtttgcatgccacaattaaagatccctcatgctacaatgaagactgaagatcccaagtgctgcaactgagactgggcacagccaaataaataaatattctaaataagaaaaatctagcagagagtaagataataaagttcagttggccttacgttgataaatggtaaagttaggtaatgggtacatggaagtttattacaaatatattcattattttcaaacactgtagtgtatattttaaaatgtcatcataaaaagtttagtgaaataacatacatgttaccagttgatatgttgtctggatattaataataaccaaattcatgtcatattttgtagttcacaatgtactttttatgcataacaacataatcctaacctcaaccctaggaaataggttttattatcctcttttcacaggaaacagtttcagagtcattaagtcagtggctcaaaggctttgagctagtaggaagcagaaatgtgatttagatcaaagttcttgatttctgaatctcatgttctatctggggaggtagaggaaatgctgaatcttcctggttaagtcatttaacttctctgtcttagaagaacagaagcaacactactcaacctgcctttttttcagttgttgggaaattcaagtctgaaaatttccaggaaggagctttgttaattgtcaggtgccttataaatttattttatttatttatttctaaatagttatttattcatttgactgtattgagccttaattgtggcatgcaagctctctagttgtgggctcagttgccttgcagcatgggggatcttagtttctgaacagtgatcaaacctgagtccctttcactgcaaggcaaattcttaaccactggaccaccagggaagtcccaagggctttaaaattttagattgtcatacatctatgttttctagcagtgtgtgtgttttgtatgttagtatctcagttgtgtccgacctctttgcgaccccatggaccgaccaggctcctctgtccatgaacttctccaggaaagaatactggagtgggttgccgttctcttctccagggtatcttcccaacccagggatcaaacctgagtctcctgcattgcaggcatattctttaccatctgagccaccagataaaccctctcaagcagagccctctatacaaatgcaagaaagtggagagctctgggggctggtctcaggcaaggcaaatcttccttttggcatgcctgtcttccttttctgtagacctccttgcattccaaactccatcccttacatcactattaacagacagtggttaagatgcttttccttgtggtgcatttgaatacttgccagtgtcctgatgtgtcgttttgtagcttgtgggaacagaggctctacaacagctgtttataactgaaagttttatggcttgattttaggctagtaaaatgagtatgaaactgcgtagcattttctggtgttgtccagaattctctattagattatttgcactaagtcatccagacccatgaattttcatcaagcaacactggaaaacaaatgagacacttttgattctcaacaaatgagacacttttgattctctggggcgggggggagggtagaaagaagaactacagcgaaaa

SEQ ID NO: 60700 - DNA, 1411 bp, Bovine  19866880539769
  misc_feature (1)..(1): n is a, c, g, or t
nttgtgtccgactctttacaacactgtggagcgtagcctgccaggctcttctgtccatgggattgtccaggcaagaatactggagtgggttgacgtgtccttctccaggggatcttcccaacccagggatcaaacccgagtctcttatgtctcctgcattaggcaggcgggttctttaccactaacgtcacctgaggtgtgttatccatacatggaacttcttctgcctgtgccactgatcccagggttttggcttggtcatccgtagacgacatggcctttgacgtgtcctggtttgccgtgcactcttttggcctggacaaggctcccgtcctcctgtcgtcactggatcggaaggggattgtgaacacggcccagagggactggaagagcagcctcagcctggagcgcatgagcatgctggaattcttgctacaagtgcatggctccgaggaccaggactttggcaactactactgctccgtgactccgtgggtgaagtcacccacaggttcctggcagaaggaggcagagatccagtccaagcccatctttataactgtgaagatggatggtaagaatgacacacaaataaccttctcagtgtttggggaatggcttctccgcgtgctttgccaccgctgatgggatccaggttctcacccttgaggaatgtgcctgctttctctctagcctggctcaggcgtgtacccagaaagagcacactcagcccttgctgttttcccagcttaggtaccgggtgtgctggaggcaccactgggaaatgattttttaaacttactggacagattttcaatgcattctgtaaattctagacatagtcgctttgttgtatgctagggttggcacggattctgccaggcaggggcagagaacaacattgagagagtgggtcaaggtctcttggaggggccgtgagtgagttcctgccccttttacccttctactggtcctgtgctgtgctagtcgctcagtcgtgtctgactctttgagaacccatgtactgcagcacaccaggcttctctgtccttgggctttttcaggcaagaatactggagtggggtgccatttcctcctctgggggatcttcctgacccagggatcgaacccccagtctccttgtctcctgcattgcaagtggattctttacccactgagccatctgggaaagccccttactggtcctacctttggtgaaagggggctcctcccattcactcgcacagggagggttcttcacagaaccctgagatgggagggggagctccccatcttgttggctcacactgaagaccagtcagcctaactaagtggtcagggggccccctccccacccttctgctctctagcctcctggagtgggggacacattttcctggttaacggaaaa

SEQ ID NO: 60701 - DNA, 1470 bp, Bovine  19866880546048
  misc_feature (1)..(1): n is a, c, g, or t
nctcatgaatcgtcttggaaaaaagtcggagaagacctatgagaatgggtcatggtcaagccagagaaattcctctgacttaagctttctgcccaggctgatgtttcttgcatccacagtataatcatgagagctaatatttgctgagtgctcactctgggccaggaatttttctaagcactctacatacactaactcgcagcaacttgtaatagcctatgtaacagacaccatttttatctctatttgacaggtgagataagaatatgctcaaggtcacgtttcgacaaagtggcaaaatcggatctcaacccagacaggtagaagccagagtccaggaacttccctggtggtccagtggctaagactccatgctcccaacgcaggggacctgggttcaatcctggtcagggaactaagaccccttatgcctcaactaagacctggtgcagccaaataaattcattaaataaacaaaaagaaataaaagaagaagaaaccagagcccacactccagcctgtcacactggggtctggacagtcactgaatgacactaatccctagtcttcatcagatcgtcttccttttttttcaaagtacttagaaattttttggacaccaatatcattatatagataacatcgttaaaagcatgtttaaatgagaaaaaaaatcaccacacccatgcaaacaattttatgcatgcatgtttcttctgttcatgcactcatgtatttcattcagtgaacatatagttctgtattctggatttaagtgttaacattataaagatattttcataggtcattttctcacttattttaattgctgtatagcattccctcaagttgctgcaccgtaattgacttagccagttccttgttttgggtatttagattgtttccagcttgtccccatttcaaaagaaagaaacaaagcaaaaaagacgatctttgcttccatttttgtccttttcttggatactccaactattcagtgaagagctgcttaatctgtgcatttggagccattttgatagcctttgaccaaccatcaaggttgactcaaaggttagaagtgtgtgagctggaaggatttcatgagatgttgttctttactaaaggacctggaaggaatcaaagagcaaacggaattacactcaaactgttggtgccaatgtgctagaaaccgagcagagagagcagccaatttgcagaagtcacatttttaactcagtaacagatggcccactggtcagagcttaaaaggccagggctccttaagccagcaggatgcaggtgaatgactcaaatgctccccacaagcaaaggaactgccaccagccacttaccacaggccgcagtgacgtgtgtgtatgcaagagacatgaattatttctcctcccccaatctctgcgatttcatttttcctagcctcaaagactttcaaaactctgaatcaccatgggc

SEQ ID NO: 60702 - DNA, 4516 bp, Bovine  19866880581919
  misc_feature (1)..(1): n is a, c, g, or t
nagtagaagagatttctcaatacatataaccaattgcactcagcatataattcctacatatcaaaaagaaaaagataacccaatagaaaaatagatgaaagacaaaatacacatttttactgataaagaaaatggagaaagatgctaatatcttctctaggcaaacagatctacaaatgaatgagttttattcatttaggccttgtgattactatttagtggcagcacgcatattggaggagagtcacagagagaaaagacagctggaactataagaactaaagttatcaattgacagctttggccacagtctaagttaaaataaatgtgttggcctgagtcaggcacttcaagggaaatgaagcaagtgacttgcttcagagaggacagctgctggtctaagtcactcaacgtcttaatctggcatccgtaatagaagctcctgagacgtggcctgcacagaagagaggactgttcctgcaactgagaccagttgactgcctttggaaactcaccatccgtgccacagtggcgtctgtttcccatgtggaacagcagttatgaccagtaagtattctgtttaagaaccctgtgttaaagacttgatattcttcaacacttcagcggaagccccactgcaaaggaatcatctactcaggtcaactgttgatagaatggctcagccaaggcacttagctgtgatcccagaatgatatcttcagcactgtctggtgaagagaacagtctgagagacattccatttattttctcagctacctggtgatgaagatgttatttcctccacatcctatatgagggaactgaggtctggggagttaaatgactaaagggcagagaacacagtcaataagtagaagaaccagggctctcctctgaggttttctgggttcagaccctgtattcttgccattctacacattaagtgattagggacttactgatgagcagcggatggattgtggtaatgcaggaaatcacatacctgaaataccaaaaccgatgataaatacaattgctccagccagaataatgatgatgctaataatgctatggagagagaaagaaacaggaaattacttctttattccacttaacatgctgctttgcaacctaggctcatacctgccctttgtaggaggtattatataaagactctcaactttttcttcaaaatatgtcctttcctagaagtaggtgccttagaaagggatctcaacaattccatcctcggccccctgggtgctgggatagattaaaggagtggctcttttgtctgattgtgtgcatcatcttattttcctatttccagatcagtgaagatcagacacaaagactgctggggaaaacccaatggcatttctgtaatgccaggtggcacttgagggagactagttcaatccttagcccaccctgagcattactgcatccctcttattacatcattaatctatctctttgtctccttccatagactttaaactccactaaggacagcggtcatatctttgctttgtacccactagtccacttcactctgtagatcctcactgagagtttgttttattaaaacagtaagaagtttattacagagagcttaggaaacacagataaacaaaaataagacaataaagtcacctgaaactccaccatccagacataacaactggtaacttcttgaaatgtatcttgccagttttcaatgagcagattaataaatgatgtttaggaaataaacaaataaggaaatactgcttatatttactgagtgctagaattatgtcacagatatgttgttttaggcaccatttatggactatgtcatttatccatgtgataaccttatgaggtaaacaaacgtatctccattttacagatgaagacatgacatagggatagtaagcttcttccctaaattcacgtggttggtaagtggcagagctgggattagactgtgtctccagaatctgtacttgactacttcctacactgcctgccagggatgggggttcaagatggggtgtgtccctcctctctgcccagaggaacccattaggggataccggcttgagctgctgagagtgactcagacagaacagaaggtgcaggtcagagctggcctggtggcaaagcagtccctgggaagctttcccagtgctgcctgctctggtgcataagtcatcaggcaggtgtcctccgccacagtctcattgctgccaactcacacattccctgcacccacaccgatgttatgcaattggcaggacaaaagagaggtacagggaggcaaagaatgatgctatagagagaagggaagcacagggcatttttcttgctgccccgaataggctcattgaacccagctcccctcagctcagggatgggcccaccagagagaaacgttagactcacgaggaacaatttgagtaaacagttcccctagaggttaagccctcatgaggtatagccatagggacaacaattgaataagcaaaatcatcactaggactgataaggtatctgcagttgattccaagaagagaccacatttgacaactgccccctttctttacacacctaggtgtggcctcaaatattattggtccaagtgtgtgagaacagcttaacaaactcatagcaagaggtactgtctggctttctgactactgagctggacagagcagacttgcatttgtgacccaggaatcacttaccttgggtgaattactttgtctctctgagactcagtttctttatctttaaaatgggagtatgagtaattcctgctccatctgttataaaaatattgtaagttgaagtatgcccctccctactcatattttgaagtcctaacccccaggacctcagaatgtgactttatttggcaatagtcattgcagatgtgattagttaagatgaaatcatactggagtagtgctgtgcttagtcgctaagtcatgtccaaccctttgcaaccccatggactgtagtctgccaggctcctctgtccatggcgattctccaggcaagaatgctgaagtggattgccatgcccttcttcaggggatcttctcaacccagggatcgaagccaggtctgccgcattgcaggcagattctttactgtctgagccaccagggaagcccacagtggagtggggtgggccctattccgtatgactggtgtaatcccttctccagcgatcttcctgacccaggaattgaactggggtctcctgcattgcaggcggattctttaccagctgagctaccagggaagcccctggagtagggtgggccctaattcaacatgactggtatccttatataaaggggatatttggacacagacactcacagggaaaacagcatgtgaagatgaaagcagagatctggaagccaaggaacaccaaagattgccaactaataccagaagctgggggtgaagcctgaacagattcttctcatggtcctcgggaggaaccaccccaaaccgctagtctccaaaacagtgagacaatattttttttttctgttgttacccagtttgtggtattttattatagcagacctagctttgatcttgttttaagatcaaatgggcagtgattgttgcatattccatacagggctcttcatgtttcttttttactgtaaaaaaaatttatctgtggctatttgctgcatacttattattaaaagctatgacttaaatctagagaataacccaacttgtaataacaaaaatatcgtaagtattttggtatatcaaaaagagcatgtagtagggtaggcttcgtgctaagcattcagtgtacattttctcatttgtttgaatgatcaagtcctggtctccttaatttctctcatattcctccatttctgtccccactgctcctggtcaccaccatgtctcagcggcatcattgcaacactctcctgacagccctgcttctagactaaaccttactaacccatgcttcaccctggccagaatcagtggtgacttcagaattttttattatgtatttatttatgtatttatttctggctgcacggggtcttcacggctgcacacagactttttctagttgcggcaaggtgggggctactctctagttgcagcacacaggtttctcattgcggtgccatggcttctcctgttgcagagcatgagctctaggcacgcaggcttagtagctgtggtgctcaggcttagctgctccacagcacgttggatcttagttctcagacaagggacagaagctgcattggcaggtggattcttaaccactggaccaccagggaagtcccagaatttctatatgagtgtggcttaggggggatgacctagtcgaaatggggctgagggtgatactgaggcagtataatgctgtaatcacggcacggcttctgggtccagcctgaacaggttcacatcccagcaccactaggtactaactgcggacctgtttccattccttcttgtaagaccgagt

SEQ ID NO: 60703 - DNA, 1206 bp, Bovine  19866880601082
  misc_feature (1)..(1): n is a, c, g, or t
natatacatgtatccattttcccccaagctcccctaaaaggctattttctatgtcatgggattgtctgaagattacatgagctaaggaatatgaaagtgtcctggcaaatgtaaaatgatacacgaatcatgaatattgttttatcatgcactttttgaattctacagatttacctattaaacaataattatttatacataaagtgccccaatatgatacaatcgtggtcctagaactccaaagacttcataattaaaatttgtttcactttaaagaaacctttgtattagcaaaaatatttttatcaaattaaaaatctttgtctgaatccctaattttttatcagtttgttttttttaaacttcaagtttataccatttatgtgttgttaaatcaatcagtcaaaatatggctgttttgatgactttaaatctgaagttacaaataacagttgaatctcatgttagtcaattgatctctgtttttttgttttgaagatataatattgagaaatcctaattacccagaatagaaatcaaaaaacttatttttttaaaaaaatcttgctttaaatctaacaatgctccttacataattgttctagaagtttgaaaaaggaatagtcttgtgattgtttcgaagttcagtcattaacaatatttaataagggttgtcattctttaactggttattattattctatgtggagagcaggaataaatggacccctcagataatatgtctccactatttggaagaaaatacattttaattgtatggtaacttttgataccaggatattttaatctatgaccttttacaaagtttcatataaaacttagtttttgcctttggtaaaggtgcatttcacttcaaaacagtgaatctgacatttttcatattgattccacactttcagtttcatctgacactctctgtagttgtaagcccagaaacattgttcctgtacacagccacaatgattttactgaatttactaaaagttagtaagagatacaggcttgtacagctacgttacattacagagatatttaaagagtgggatctctttatcagtctcccccagagggatttcttgtctcatttgaattatttataccaacatcttgtcttgaacttcactatgaaaaatgaaaacttggtactcacagtccgcaacattacaaacaatgctgaaaaaccca

SEQ ID NO: 60704 - DNA, 1553 bp, Bovine  19866880624238
  misc_feature (1)..(1): n is a, c, g, or t
naaacatggaaggctctctattgaactaatacctcatcccttaatttttcctttggtgaattttcttcttaagatatcccaacatgagagggtagcctgagaaagtgaatataggtagagttaaaaggatattaaatttgacatcagaaggttgagttcaagttccagctccattggttactacctgtgtgacccagcctccctgaaccttatcaggaaaagaagaatattaatttctgacatatctactttatagggcatatgatagtcaagagctaatataagtcaattttttaattgcattcttctgggttccaggtttcctgagtggtccctcagaagctatggctttaatagggggatggggcagttggaagggaggaattatcctcagggagagagctctagtgtctcacggtctggctgcaccagagcagctccacttttatctgctttatattatgagatgctacaggagattttgtttgatactatatatctgctgctaaaaacatccttgaaactcactcatacctatgatacatgacaggtcacacataaacatgaactattatcactagagagtaaattcactgccctggataaatgttggatgataaagaacatgtatctgaaattagcttttcggattatctgtgctttgcaattctggtatcctctcttgaacttcattatcagataattaagaattcactgtgtgtgaatttttattacaataattataacttggctcctactactaccctgaattacatctcctataagacccctgacttacttatcttgattacatctgtggacttctgagcagccaggcaaggactgcaaccatcttctatgttcctagtttaatcacaatcctccatcctgcagcccaggaattgttggggagaggcactgtgtcagcctttctcagctgcagatactgctcaggagagaaaacttccccccacagctcagagctcctgtaggagaactcaatttccccccaagatctggcacatcattgcacaccattagacaaggctctatcacaaagaagggtatcaggatgagaagcagagcttaggttttctgcaggcagatcattaatgacttccctctggtgtgtcttaatagaattcccaggagctcaggatctgaatggtgtgtagtgctgatctgccaaagaaagggaaatgggttaacaaaggaaaattttcagagctgctctggttttcaaaagagtggtataaatcctgattgcgtatagtgaccctggaagccagaggtagttaattattattcatggataagaatattgttacccacaagtcccctccttttcagcaataacatccaagaaatgccagtcagaaataaagggaacatttaatttaagaaagctcttaaattcttaattatcttagcctctgaagactgcaggcctttcaatcaacacctctctaggcggtagtttttgtagtcaactttttccaaaatctgcttccgccttctcggggatgtgtcacatagcatcttgtctctctcca

SEQ ID NO: 60705 - DNA, 988 bp, Bovine  19866880637584
  misc_feature (1)..(1): n is a, c, g, or t
ngtactttcctgtaaacactagctatcatagtttccttggaatcacagctcccatctcctcaaggagtctgctgcactctgcctcagaagtcccccttcctgtgcagtaaaccggaaatgctatcattagacagcaagctgggacatacacggggctcacctgggttttgtcccatctctcagagatctcaagtccttcattgccgtttgtccagtgttttgaaaactactgattcatacatagtttatctgcttgtttcaaggggaagggtaaataggacccttgttatctcaccttggaggaagcagaagtcctactcttccattttcaaatactttgttaaatgatttgctgaacaccatgcaattatgctcacagaatcccttacgctctgttattaacccaatttaaaaagatcattagagtttatccagcaagaacttgttgttaggaacactttctggctcttcatgatcactgatttttctctaaagacttcataccatgaccttctagaattttgtgaaaatggacattaagttcatctatcttcatttttctcaatccaacttttcccttctttaaaattatgtatctattctgttgtgcttctctccatcattcccgaaagaacattaatactgactacaaaatcatatttgtagtagtaccttggtgtgtaatttctttggataattgcaatcatttaaaataacaagttacctttctccctttggggctctctctgtcatatctgttttcctttcattacattccagggcaagccataggaaatgcagttaaaagtacagatgctttggcattttttttttttttttaagttcccttggtagcgtgccattgattctctaatttttcattggggtaaaaacacataacataaaatttaccatcttaaccatttttaagttcagtaatattatgtatattcacattattgtaaacagagctccaaaactttttcat

SEQ ID NO: 60706 - DNA, 1309 bp, Bovine  19866880725270
  misc_feature (1)..(1): n is a, c, g, or t
ntggacagagggggctgtgcatttttcttatactcttcttaaggctaaggtggcaagataaggtgcttggtggagagccaaattctcaattccagggccatttcagcactcgcacataaagcaaatacgaaagaagtggaaaggggcagagaagcagaaaaccaaaaccaaaatgcatttgggcttgataggaagtcacggactgcaggtttagattttaaatgtagcctaaaccccctggaaaatagggggtggggagggtagtaaaagccacacattagccttcagcactggtctgtgttgtccctcggccggggtagagggtcgcctttagcagctctctcagcacatcttcctctgactcggaagacgtacggatctcacccgagacaaagaactctgaacgccttcacccctttctcactgcaacccctcaaaacaaaaggtagaaacacacacaagtcagagatctataagccagtaggagaaaaaaattagaggttaaccattaaaaagccgccgtcaggaaaacacacactcgattgttccatcagaaagtgccgtgggaagaagagccgtgtgctggtaaacatgtctgcgctcaggacttgacatgcagaaaagagagagcgccgagtcccacctgagattagagaggactggtttttagtgtaacacacttcgcgttaaaagattgctgtcctcatctcgcccaaaccgctcctcgaccgtccctcggtctcggcctttctggcaccaattagtccatctccatggacatgagccggcggcgctctcgccgggtctcctggacttccttcttacagcaccagtgggagctgcagtacccgatgaggcaggacaggagcccgatgacagtggacaggccgatgccaatcagcagcgggtacttgaaggcgttcagcactgggagggagagatcagagggatagaaatcatgatgcaagttgcagggtgtaggggggtgttgcggggatggggacagctcagggaagaccatcgcctcccctctccactgccccgggtctcccccaggagtctgacctcacaggtcttgcacctagcacagggcttgaaacaagagcagctcagccataggtgtccaaaaatgagcaaatatatccccacccaattccatagcaggcagggtggtggtgggggggaacccagaaaaaaaaaaagatttccttcaatatctttgaatgtcaacttgctttttagggttttggcaggagattgatttttaaaagtcagtataagggcaccacacattcagcagcagatgcat

SEQ ID NO: 60707 - DNA, 2641 bp, Bovine  19866880748226
  misc_feature (1)..(1): n is a, c, g, or t
ntctcaaggtgcccagatacctggaaccctggagagtaccaaactctaccatgtttttttcctatacatacatatgtacaatacagtttaatttataaattaggcacagtatgagattgacaataactaataataaaatagaataattataataatttactgcaataaacattatgtagatgtggtctctctcttccttaaaagatcttactgtacaaacgtaaagacttttccatcttaactaagcacttaattgcactacgcgccataacctgtgcagtctgaagctcaacagtaaaactagcacaaatttacttcctcacaatttcatgattagaatatttattcttagcctgagatcttaatttcagcatatggtccttattaagcgaagaactttcatcttttcacttaaagaaagcacttcacagtttctctttggtaaatccaaattgctggcatcactaatcttgtgttgtgggcctattattaagtaaaataaggactacctgaacacaagcactgcgctatctccacagttgatctgatgcccagacagatggctaactaacaagtaggatacactggacaaagagatggttcataccctaggctggaaaaggcacaaaattttaatttattaattatttccgaaaatttccatttaatattttcagactgagattgaccataagtaaatgaaatagaaagaaaacaaaagcttagataagcagggactactgtactcaggttttagaaagtaactaaatagttagatcctatttttaaaataaaaacagtaaaaaagcagccttaccaaatatattagtggagtgtcctttccttgcaataggtctgagttcattatgcccccatccatatatcctgtaattatcccaggcatgtttcatcatctgagaaaagaaaaattataacccatcaatttacatttttcacagactgttatccttacatttcatgcaatttaaagattctattactatatccttacacattctcctgtacctcctacattagtatattattctgttaacatcggtgtcaatgtgaaaacatatataatcatgtttaacttaagtctacacaacagaacaaaaaaataggtgtaataaagaagctctttttattggggagcaaagtgtctatttggcattctttccttttaggaactgccaatcctttcagatggagaaggcaatggcaccccactccagtactcttgcctggaaaatcccatggacagaggagcctggtgggctgcagtccatggggtcgctaggagtcggacacaactgagtgacttccctttcactttttgctttcgtgcactggagaaggaaatggcaacccactccagtgttcttgcctggagaatcccagggacgggggagcctggtgggctgccgtctacagggtcgcacagagtcggacacgactgaagtgacttagcatagcatagcataatcctttcagaaacagctccccttccctcactgtaaccatgacagagctgtcaaaaatgggctctgattccacaatcaatgaacacagcctggctagagtatccctaatctttagaccaaagatcagcaaactgttcctataaagtattttagaccttgacatctatacggtatatatgctaaccactaaactcagctactgcagcaagaagcagccctggacaatatgtaaacaaatgagcatgactgggctccaattaaactgtgtttttaaaaaccaggaagcaggcagagtttggccagcaggttgcagcctgccaatcaattcctgacctacactaagtgactgggtacatgtgatccagtaaaggcaatcaagtcctttcacacatattgttacagataccatgagacaaaggacactcttgttttgcaatctcaagacctatgcaatatataatcctggagctgaggggggctaactctcccaacatggagaaatgaagtaacaaaagaaaatagagatatacatatctgttgacaataacatctacagggttggactgagccaaatttgaagccctggtttagagcgctaggctaataaatatttttatatcaattagtttgaactgggtttctttcaacccagtgagtactaacctatacaacagcagagtatttaattaaatatcagtttaattatgtaatagtagcttatggtgtatcaaacataatattcattaaaacatttctcaactttttttgcagcctactcagacatttgaaaactaggcaaaaatattacaaggaaattaaaaatcaatatatcttaaaaacaaagatgcaaaattccttaacaaaaattaacaatacataaaaaggatactacacaatgaccatgtacaatttaagtcaggaatataagtgaatttaacattcaaaaacccatcaacatatttcaccatgttaacaaataaaagggaaaaaaacatacaatcatctttttagatgtagacaaagcatctgtaaaattcaacaccctgtcatgcttaaaaaaaaaaaaaaaaaactctcagaaaactataattacaggcaacatcctcaacttactaaagggcatcttcaaaaaaaaccctacagcagccatcatacgt

SEQ ID NO: 60708 - DNA, 1766 bp, Bovine  19866880848750
  misc_feature (1)..(1): n is a, c, g, or t
ngtgtactttggaaggaatgatgctaaagctgaaactccaatactttggccacctcatgtgaagagttgactcattggaaaaggctctgatgctgggagggattgggggcaggaggaaaaggggaagacagaggatgagatggctggatggcatcactgacttgatggatgtgagtctgagtgaattccgggagttggtgatggacagggaggcctggcatgctgcaattcatggggtggcaaagagttggacacgactgagtgactcaactgaactgatgcagtgcttgggggataaaagaggtaaaaaatgggccctgccatccaggaagttggaatctagtttgctaaagaactgtagataagaaatggtagccatggaaggcagcctgtgttgggtatccattttatgactcaggcaggaccactgcaggcagggggcagccagaggtcattcagaaaaggttggtttatgtagtttatgttaggtctttggagatctggaatgattcaaatagggaagagagaagaaaggacgttccctagggagaaatgaaatgtacaaagatactgaagcaggaatatacaggttgcattcagggaacaattaaagggcagcttacctggaatggtgatttcaaactacctctccaggtggttaactatagcatcagtagggcttgaagtacaagaattttttcaccattatagttgtagaagtcatgggttatcccctaggctccaaaatttactgtatcagttagctattgctgcataacaaatagcaagctttggtggcatacaataatagtacagatttttgttcacaagcctatggatcagctgatgagagctggatgatctaggatggccttagcttggacccctctcacagtcgttgaataggctagcctgggcacgttttcacagtaatgtcaggggtccaaaaggactaggagaaacacatgagtactttggaaagcttctgcttgcatcatgactgctaacatcctcagatcaaagcaagtcacacggccaagtccaaaagcaagagatgggttaatagactccatctcttgagtgaaggaaacagcaaagtggcaaagcaaaagaagtggaagggaactggggccacctatgcaatcaatctgctacatgcactgaagagagaattatgttagaaataagcactgaccacagagacaatcattgccaataatgtagaggaccctgtattcctgaaatacacacaaccaagtagtgaagtgaaagtcggtcagtcgtgtctgattctttgaaatcccatggacgaattctccaggctagaatactgaagtgggtagcctttcccttccccaggggatcttcccaacccagggattgaacccaggtcttccgcattgcaggcagattctttaccagctgagccacaaaggaagcccaagaatactggagtgggtggcctttcccttctccagtggatcttccctacccaggaatcgaaccggggtctcccgcattgcagacagattctttaccaactgagctatgagggaagcccaactaagtaatgctatagcaatttttcactcctggctgttgccaattttttttttctttccatgttagcgggtctggtttctgccagaatttaacattgacagggtgatgctgcctcttttctggaaggaaaaaagaagctttatgttattaaggggaaaagaaaaaatgagaagaaagaaaaaatagaaccagcgagagagaca

SEQ ID NO: 60709 - DNA, 2276 bp, Bovine  19866880855794
  misc_feature (1)..(1): n is a, c, g, or t
ngaaatggcatccgctccgtattcttgcctgggaaatcccatgcacagaggagcctggcgggctatagtccatggggttgcaaagagtcagagacgacttagagactgagcacacatacacgtaccaatgatgataatggcagctctttgacagtcaactcattcagctgcctctaaagtacctgcccagttcaggatgataaaatcagcattggcagaaaccaaggcccagttcctgctgtttcttctgacatgtgcgtgcagcctgttcatctaattagctcttcccagttaactaagcctcaaagtgggtattagaacatggcactgtacacagttcaggattagtgccttagctgttatcatcactcttgtcttctgggatggagccggccttgagaagcattaatcattgggtgtgtaatgatgtgcagtttggtgctagtggaagccaggccatggagccagagcctctcctatgattctgctcccctacaccatgcaagaccttagtctttgaatttaacctcctttgagctttggttttagctttgtttttgtttaggaaatgtacgtaaataagtagtacctattacataaggatattctgaagattaaacgagattgcaaggaaagtacatggcgtggtccctggctcacaggaggccctgcacacattccagttcttagtattcttgtaccttccgcacagaactgtgagagtaaaaggaggaggtaacccatggaaacccccagttcagggtcctgcatgcagtaggcacaaaatacctgcttttacacacttgccaataatcctgaatattttcattgtcttgaaagtagtaacaaaggagtttaataatccataatcaaaaaataaagtctttcttgatggtgatagggtttgcactatgggaggcgaaagcttcgggaggtgatgtgtaagtgagcaggttgacctgagagacaggttaggggggatctttgtttctggaaggttagtgatgtcgtgccttacgctggcctcagtactctgtgaaagggttgactatgtgggtgggctgtttgttttaagcttttggaacagaagtttacacagtagtagaacaaaccaccagcttcaacaattaccaatattttgagatcttacttcatctctcttccctcccctggatacacacacacacacatacacacacaccctgttcctctctctctttctttttttcccctgccgccctcttttttttccttctgaaagaatttaaaacacatcccagacatcatgtcattttgccattaaatactttagtatgcatctttcactgataagcattttttaaacataaccaccattacgttcttagatgatttcttgatgagatcaagcagaatatagcagtaatcagtagtggaatgcttatgctgaaaatgagcatttttatgcaaagtattaaatttagtccaattcagcaagtgtgttaatgtcttttatgtacaaggcactgtatgcacagtgcacacagatgaatcaagtcgggggtcccagacccagtgaagggccctaatgaaggtccgtgaggcagacagacatgtaactgaaattcaaggcaatgttcaaggaaagtccttagagagcagggagcctggcaggtggtagggtctctctgaacgtttgctgaataagaagtagagatgggatgggctggtgagttcaaaggaagccttcctgttcagtaggagaggctgtttctgtctgttcagagtgaggtctgtgtaccttggaccatgaggaacaggcccaatctctgccaacagtttttaaaaattgtgaaacagcaataaaggaggatttccacacatgcaccaaaacaaaaaggaaataagaacccatgcacacccctaccagtcggatgcagtgacgtcctatcttctccagcagtgtaagtctgaaagacgatctccaaggctgggggatagttcagatgacctttgagcatcctctaaaccaggggtccccaacttccaggcctcagaccggtatcctgttagatcaccagtggcattgggttagaaataaagtgcataataagtgtaatgtacttgagtcattccaaaaccacctccccccctttcacagtccatggaagcattgtcttccccgaaatcagtccctggtgccaaaaaagattaggggccactgctttaaaccaccgtaacttacgcccttgtaagttcacaaaaatcccacgtgtctgttgttttttaattaggtt

SEQ ID NO: 60710 - DNA, 1183 bp, Bovine  19866880856938
  misc_feature (1)..(1): n is a, c, g, or t
nggtcgcaaagagttggacatgatcgagcaactgaacaacaataaattgtggagaagtgactagacaaaggaaaaggggtgtttgggcttctaggaagctatgggaaggtgactaggaaaagtatggtagtaaaggttattgagtcaggcttgttatgcagacagtcagtgctgtctccagcaataagagtcatctctggcaattaaaatttttctcctctttctggtgctggagagagagaaatctttataaatgtaaatttgttacccttccaaggggaaatttatgccctgttttcaggcagaaatgggagggcagagtttctcctgtatatgctatttcttaattgccttcagctcaaaataacctgtaagccaaagtggtatgtttgggggtggcttattatgatcctcttcatcagctaaggaagttctgatttccaacagagcagtgctggaaaatatgaagcagaaataaaaaaattaaacataaaaactcacactctttaatgtctctctaaaactatagaaaagtcaactttatttacgaatccacctcctactcccacactgctttatatccccattgccactgctctagtttaagctctcagttctctgctggactatttcaatagcctactaacttatttctcttttccattattttctttctttacaccagcctataaaacctcgttagattacttttccataaatataactgtcagtgtgtctgtcactctccctctcagaagcctagaaggagccatttatggcttctcattccctactgggataaagtctaaacttatttttattttccatgctcttttcaatctgagttccaaaatatccttgccactcgagtatcccgtattcccttacctgaatatactgctccatttagactattaatattttattaaaaggcccttaaccattgcatgctcctgacatgtgtcatgcttgtcacttgaaatatacaacctcgtaatgtatttctccacactcttaagtagcatctctccctgccccctagcactgaccccctgccctatctatactgccaattgtttacattacccctttagctcttgctgctgctaagttgcttcagtcatgcccaactctgtgcaaccccatggactgcagccaaccaggcttctctgtccatgggatt

SEQ ID NO: 60711 - DNA, 1585 bp, Bovine  19866880948092
  misc_feature (1)..(1): n is a, c, g, or t
ntggttgggaggattaaatagcttgtcccatgtgacaccaccgggctagaccagctgaggctcagaccagccttgcttcctgaacagctgttctggacaggagcccagatcaaggagccagggcttcactcacagacccaccacttggcttcagccttgctcaacaactcagactaacacggcttttatgggcagagggtggttgttgtacatcctgtaatgactataaatccctctataattcaggctgtcgtcattcagcttagcaataatgcccttgtattccaagtccttctaaaatgccaggtaccttgctaggacattgcagatctcatctcatggtggtgatggtttagtctttcagtagtgtctgactcttgcgatcccatggaccgtagccccccagcctcctctgtccatgggattttccagacaagaatattggagtgagttgccatttccttctccaaatattatctcatataatcttccaaacaacatggagtgtagggactatgatcacttccacttacagattaggaaacggagcctcagacacactaagtagcctccccatggtcatttgaaatgagcgagtacgctcctaaccatcagctgcagcgcctctgatgagatggagtccgcctacgggcccagtgctggccgccttagcttacagcatgaagccaatcttccctgagggccccctggaaaaggtacggggatccttcggtctccgtcagagccaggtgggccgcttcttccacatcgtggtcctggcgtgttgcttggcctggatgagtctagctggagtgctggcttcccaccgggatctgcacctaacagatctcagaagcctgaccagcctccagcctcgggggctctgaggggtgttccgagtagccctgaggttcctgcttgatcagattgtggctgatgggagctgtgctgtccagggtgcaatccctgaagagctccggaatgaagagaggactagagactgcaggaagcttcccaggcatgtagaagacactctattgaaaagagcagtgataccgtgtgtgccattgcctctgggcattccaggcccagtacgcttcagaccaaatactgggaagtgggccctgtttgtggaggacagagggaagcagttcacacctggctccagcagagttggtgcatttcatttgacctctttcatgaaatgtttctaagaaatgcaaaatgagacattctgagagttgggtatttttccatttggcaaagatctatgatttatatggcccctgtgacacctcgctcactctagtcttttccttcttcctccacccacactccctgtcagcccagctcaggatgagggcttagattggctgttcacgcttagctcacaaggccttgcccccttggtgcaaggggaaaccatgggagactaccagagagaggagaatccctgcattcacccagagcttgcatcataagctcctaggccagcaaaggttcttaaaaagtaagaggagggaggcagagtcctgccttgtcctctccaggagccaggagatgccagaagggacctcaatcgaca

SEQ ID NO: 60712 - DNA, 2311 bp, Bovine  19866880952849
  misc_feature (1)..(1): n is a, c, g, or t
ntttcccataaaaggcactgtggaatttctccactccgggtgtgcacgccccacacctcccatcctccagcaagggtgctctccaagcagaccacgatcgcctccccagcccgtgagccacaaccaaagtgagttgcagtctgtgacttctaacgcagccaggctgcctgatgtctgcagtctctggcccccttccccgatcaccgcttctccaggaagggaataaaagtgtgcacacgaggactgggtgatatagcacagattccctctcagagcacgtgcccatgtcagatgtcaagcagtcactgtggccgtgtcttgtacaagcagcttcctgcttgagacactcttggtttcttatgtgcctggtggacacttgcccactgtattgggagtagcagtgaaataaaagccttgacttgaccccaggtgtcatctagtgctgaatgggaaagaggctatttggtgcggtatgacagcgcgaccaaatgtggccatcccaattcaaccagttccccttcatcccccaccagaacaactgacatccactccccaggctccaggtgcaaagctggacccacggcctactggtagatttgtataaggaattgaaatctctatgcacagacttcaataagaagcaccagaaaacataacctcatttgcagttttacttccttggttcttcagacaggttcatggtgaagcatccttgaaaagaggggggatccataaagacgggaggttccacgagtctgtcaggcaacatgcaaaaggagcaggctgagacacaactcggtcgaagcaaaccccaggtcttaaatgaccatgattaaaaggtcaggccccaccctcagctggcagtcatgctagttgtactttgagggaagtgggggagaaagaaaaagaaaaaaacagtttacagttaaggttctaaagcgatagatggtgagaaggcacctggctgcaatgttggcaccgtgctgtttgcggtcccgcccgcccgcccgcccgccttctcccagcctcttagacttgttaaaccctgtcaagctctggcaggaagctctgaggtctaaaccgcaaagtctctgtacattcaggacttcctgtgagagctcacagagggttgagctgctcttttctctgaaccagggcttctattgttttaacacccagagttaattattaagaataatgatgaatgaaagcccatcgcctcctgaaattctaacatggagtctagtcaagtgacagtcatcatgagatccactaggaagagaaaggaagagaaagagaaaggcccccctttctccttcctcgttgcaatcctgtgccattccatcagccatcctgccagaataactcctaacccattcccttcctgaagccctccccggcctttccagccctgcgctctgccttttttccaccatcttgtggcatacatatggtacagtgcctgtaactattcaatccctacatcacttactcattcaacaaacatttattgaacttgtactaccttccaggctctgtgctaagtgctagaaacacagaggtgcacacatctttgctttcaaggtgctcaggttgggggagggatggactaattacaggataaatgtaaccgtgtgattaagtctaggttaggggccaatacaggagcccagatgaaggacttagaatctggattggttggcaggactgggtaacccagaaggcttcccggaggaggtggcctttgaattgagttgtaatagtgttcttgcctggagaatcccagggacaggggagcctggtgggctgccgtctatggggtcgcacagagtcggacacgactgaagtgacttagcagcagcagcagcagatgagtcgaaagaactgctgaagcagaggtgtagaattagccctgtagagggagcagcagggggcaaagcccacgctgactgtctgttgaggtaaatgttattcctttatcaactactgtgtttcatcagtttgaagacactattgattttaactggcgccattatttacacaccatttgaaagaaaaagtactctcaattgcactttaacaaatgctaagatacaatcaatttatagtttcaaccctattcctgaggtgttaaaatgtgaaaaaaaaaatgtgtttagaattaatgaaatgcatagttaaaaagcctcctgaggactttggccatttctcagcattgcccctaccactttactgaaaatttcactggccagttgattcagtgggtgagtacagtcttgatgaaagaaaaagaaacaaacatccgtggcat

SEQ ID NO: 60713 - DNA, 2131 bp, Bovine  19866880998044
  misc_feature (1)..(1): n is a, c, g, or t
nttgaccctcttgtaagagtgttctcagcagagacaacaaacaggcagtgtttccccagtccactgcttagacagctgctactgagggggtggggcgcgccccagccctgctggccagcctccttcccttaccctactgctgggtgcgctatccctgttctacacttgcaagggagattccgcaatcccaggctgcagctgtcagaagcctgaaggtatgagggtccgcttcgcttggcatatctctttcctaagtctactccaaatgatacgattttgttcttagccttgaataacaacaataagttgcaccctaaagaccatctttataaaaatgagtaaactttagagaccagttggcagacatggtaaccagagactctgctctgtattctggggtatacgtactgtaactagaggattcaggatgacatgcaatcaaattccacggcatcccactacagaaggaagatactgatgatatgcaagttcagcaaaggctttccctgacacttaccaaggggctttacagtgatcgacaacttctgagtccagctctggtttctggcctggctcccggtcctgtcagacactctgcactcgtacatgccactgtctgtgagggtggtggaggcaatctcaagttggaaggtggcccagtccattttctccagtcttgcatttctgaggttatcgagttccgcataggaagcacccagcttcacggtgccatcctgctccatgccagccacaaacaccggctgtgtctggttttgtgggacatgccaccaggccacagtcaggagattctcagctccatctgccttgcagagaagggttaatgcctctccttcccacactgcttgctgccggttcttggtagacacgaccacatttcttgctgtggattacaggttttagaagaaaaagatattttgagtaaatgaaaagttttctaaaaaacagtgaactctcattaattaagacttgactactttgtgacaaatccaatcaaattgttcactcttgcaccatcccccagaataaaagatttaatcaacacttaaatagtagaaatggcagaaagaacaccagaagaactaatttacatgtaaacaatttacagtttgccctaagttttagtgatttgttccttaggcacatctagttgggaaaacacatggtattattttgttaaattaattagagttggtgtatgagactgaaagtaatgaagctgtgtttatttcaatgtttagttttctagaattcagactttcacagttcaaaatgaccttcctctccttacttatctttccctaattagtatgtatctgaacagtgaagaagtactgttaattatatttctgttcaaaatactgccattaaaaagcaattacttgaagagggcgtggagaaaagagaatcctcttacactggtggtaggaatataaattgatacagaccctatggagaacagtatggaggttccttaaaaactgaaaatagaactactgtatgactcagaaatcccactcctgggcacataccagagaaaaccataattacaaaagatacatgcaccccaatgctcattgcagcaccatttacaacaggcaagacatggaagccacctaaatgtccattaacagagaaaagggtgaagcacatgtggcacatatatacaacgtaatatcactcagccataaaaaggaatgaaattgtgccacttgccgagacttggatggacctagagctgtcatacagaatgaagaaagtcagaagttgaaaaacaaatactgtgtattaatgcgtatatgtggagtctagaaaaatagtacagatgaatctatttgcaaagcagaaacaaacacacatatgtagagaacaagcatatggacaccaagaggggaaacaaggggtgggatgaattgggagactgggattgacatatatactctgctatgtataaaacagataactaacaaggacctctgttggggcacagagaactctactcaatgctccgtggtgacaaaaggggatatgtgtatatgtatagctggttagcttttctgattattagcttttctgctaatatgctaatatgtatatatatggatatggatag

SEQ ID NO: 60714 - DNA, 782 bp, Bovine  19866881007134
  misc_feature (1)..(1): n is a, c, g, or t
natttttgccagctgaaaatacagatgttaacaccaaaaaccagtccttccctttcaattaattgtagtttcaagccatttcactttcagctttttcttcactatccatccactttacaacaatttctctgattgctatatactccacggtaccaagagatgccatttttccctctgtactttcaatatatccagtatgttgtggtatgcatcgtagaagagatcaggaaattttattgacagcagtaatttcataatttatgaatgtttgtgtgtttgtcccagatattcaagattaaagcagtccagttggctgagaaactccttcctgcctttaacacacctacgggaattccttgggcaatggtgaatctgaaaaggtaaattctatttttatatggttattcttgttctgaatatattagattaactgattttttgagccttcaccatactttttaagacttaaaactgtttttctctgcatgtatacagaagcatatttctttaaagcattgcctgatttttaaaatacattctttgctttgaaacagtaaaactatatttcatttctactgcttgtttctataagtctagatttctctcccacacctttattgttaacagtatagttgtttctttaagattgcttatttatgtctacttagtgctggaatggattcaaagtgctttccctctcttccttttttgtacactacttgttttttttctaagtcagaatagaacacaacataccttaaaatcagggcttcctgttgctg

SEQ ID NO: 60715 - DNA, 1541 bp, Bovine  19866881083871
  misc_feature (1)..(1): n is a, c, g, or t
ncacagagatctttccttttacatggagactctggaattgtggcattaaatgataagaaaggataagggctgacagcatatcccacaaacaaacaaaatgcctccttcaagatagttgtaccatactgaaacctgaacagcctccagaggatagctattttcaagacaacaaatatatagctttaggttacacaaatacatatgatcatacatacatgacttttttttgctttaaaaatgaattatgtattcaaaacagataaaagatgaatatcaaagattatagggttttacacaaattaaaattgagatcaaggggtaacaattatgatccatgggccaaatctagtcctccatgttccagaaaataaagttttactggaaaacagccaccgacacccctttctttacatgttttctatacttgctttgatggctcaacagcagaactgagtatagagacagagactatatggttcacaacgcctgaaatattcaccatctggctctctggaggaaagcatgctgatccacagatcacagacaacatgacctgaatgagctgaaggaacagaaaatcatcttcatcaatgttctggaaccaagtacattaaaatatctccagatcatatttggttactcaaatattctgcttaaaatctgtgcagccaaaagtagttaacaacagtgttcattaattaacagagacaatactaaaaatctttctgtgtatcattgtatttatgtatatatctatataaacagtgcattaagatatgagctagccaatccgagtgtaaggaaacctaaagaaaaataagaactcaaaataccattactaggaactgttattaggaacttagaaatatttcagtatattcttcttttatatttaacagcatgagaccattactaggaaccacagcagagtgtaaacaatttacaactaactgcaaattttacccatttaattatgtgacaaaattttttgaatataaaataaccagcatttctataaaacattaacttttaattatgtaattaaagtgataatagcaaaataagaatgtttttatttctaaagtagatattttaatcaaagttgcatcagaaatcaagtatttcttttgacatttttcaagagactttagttattaactacaattatagctgttagtagtatatagtaacacattgtttaaaatatattataaaccatttcttctttaatttaaaggaaatataaaattaaggactttgtaacatgaatcatactgaaaaaacacttaaaatggtatgaacaactcttatacagaaaatgccactggaatcacaaagtgttctaacacttgaaagtgccgagcacagtgcttggcacacattaggtatgctgtgcttgttcactcactcactcactcactcactcattcataaggaatccacgcctaaggagaaactccaagggcaagcacaacaaattttaccaacaaatttgaagttctgacaaagactttggcaatggagaatgggagaggagatgt

SEQ ID NO: 60716 - DNA, 2917 bp, Bovine  19866881100492
  misc_feature (1)..(1): n is a, c, g, or t
nagataatatacaactgctttatttcccaagaattaaaacgtgtgtttgtaccactctggattttattccacaggtcagagaaccagtctgcttaaggattaataccatctaaaactaaagagcccttaggatgctgaaacatttaggtgattgagccgagattttcttttccttgcagatgttttggtattgcctatacactgtttttaacagctttactgaagaatagacaccatagaattcacctatttaaagtgtatagttccccgagtcttaggaaatgtatacagttgtgcagccattaccacaaccaagttttagaacaattccatcatatacgttatgtctgaccacctccatggacaaataatttattggctcattaacctgtggatttaaaccactgagctttaggacctagcctacgcattcatttttgaatacatcaagttttgaagcaaaacaaactcaaagtctcaactttactcaaaataaggctccataaagcacattgtgtccaaagggctctccaacagtctataggctaattaaggatataaacaatatacacacactaatgtatatattttgaaaagtgtatattgtataatcctctatgtgtgttagtcagtgtggactgtgaccaaatttatgggagaaataatcccccattctgtgatttggctgtgcaccctttcatggggtttgacctgagacactagcttgaatacttgacagaggaagagttccctccttaatgggacatttaagaggccctgattttgtcttgtttcaaaaaggcatttttaaagaaataattaaattatcatgccccttgtcctgtaaatccaatattcatgttatacttctcctaatatagcatttattaaacatatgaatagaaatctctcaatgcaagaattacaatctgggtataatgaaactgtctctatttgcttttttactcctttcctatttctacatttatctataggtgtttcagaagggataattatgtataaacttactctactttgattccagacacatctttaatcctaagagtttactgggatctccagtcatcatgccattcaaatgctattacactgttatgtaagtgttcagtatgtgctagaccagtctcctccaaatactgatcaagttctttgtggttagaacagccgtcttaaactttatatgtgaataaatagattgtatatttcctaagcacctagtccacattgagtatacaaaaggctatttattaagaaattgtttaattcttaataaacaagaagaattgtttgttctcaggtttgtctcccgtcctctggctccctacgacatttacattcaccatttagctcagatttcctagaaccttgcagattttcctgtcctactgtctctgtaaatacagttacacacgccacaccatatgtctgtacatatggtcctcaatagttgtaagattaagccgtctctcttgccatgtctgattcctattcctccctttttgttgactaagagatctgattacgatttcaaatcgtcccctttcttttaattacatcctctatttttaatattacaaacgcataccaatagaaaaagtctgacaatacaaaatgtacagtataaaactccctttcaccaaaggcgatccattcctcctgttgtttccactttgacatttctaactcaggtctcctacattgggtgcctagagaacatacaggacacacaggaggcagttttctgaacaatgtcggccaactgccaactcactaattctctgacctggggggactcactcaaacttttgaatctcggggtccttaaaatgctgcgcatcccaccaggttgtcaagacagacgtgtatggataaggactatgttgtgggttctagagaggtctttagatccgctctaccacagactttgtcagttcaccgcttagctataaaggacgccccaacggccatcactcgcaccccgcttcgcctccacatgcaaatccagtgcctcttcctgaggcggcggcttctctgggactcccctccctagtgatcgagcgcggaggcggagcgcccaccagcgctaggacccggctggcatcccgaagaccgcgaagctctaggcgctctcggcctcggggagaagagtcttctttgtagagctcctctctgcagtctgtaatgcctgcttcctctagggatgcctctaggtcttaaatgcgtgcaaggtagagtcgaccagttccttcctcgcaaagcttccctcctccggaaagccccgccaacctccaaaactcactctagcttcagccacgccccaccggccaaagaccaggtttcccccgccccatttttgatttcggcgcgccgcgaatctcagggcggccgtgtttggttggaggtgagcacatttcccgtctgattggctgatagtagttagggtgggtgtggctaaagccgcggcggtgaattatgggggattaagagtggaggaggtgggtgacgattggttcctgaatgaggagggcggagaaaaaggcggaagcaggcgttgggagaggcggtggcttcggagaagacaaaagctggagcgagatggaagtagttaggtgtccggagcatggtaggaggtcagggtccaagggtccaaggggtctgccagcctatcgtggtgtaatcgttgtcgaccttctctccttagggactttatgtctcctgaagaccggcgtccgagaaggcccgaataaagggaagagcttctacgtgtgccgggcggacacatgcagctttgtgcgggccaccgagtaggtctccgagctaggcacaattccctgggtcttcgcgtggccactcaggaggagtcgccggccccccgctgcccaaaaggactaggaga

SEQ ID NO: 60717 - DNA, 1476 bp, Bovine  19866881125688
  misc_feature (1)..(1): n is a, c, g, or t
nttgggagaattgcagtaaaacatgtataatatcatttaagaaacaaatcgccagtccaggttcaatgcaggatacagaacgcttgggggctggtgcactgggatgacccagagggatggtatggggagggaggtgggaagggggcttcaggatggggaacacgtggacacccatggtggatgcatgttgatgtatggtaaaaccaatacaatgttgtaaagtaaaaaaaagagtaattggtttcaagtgacctttcaaagctgttatcaaataattataaaagggtttcttgaattaaaaacaagttcatctttcattttaatggattttcacaagcttgattatttgtgttttatactttatcaggttgttcttccgatgtgttaaaagtaaagctgaggggaagcagtggtgtggaaatatcccatggcaggtaggaattattcacctgttttcagatctgactgtgtaaagatgtttaacctgtgggatcaccttaaaagaccctaaagtccattgtaaactgattggtcttcatcgtactttctctgaaagacagttctcttctttcagcaaggtagaccctgttgggactcttaattcaaaggactatggatcttttttttttttacttttaattttatattggaatatgactagttaacaaacaatgttgtggtagttgtaggtgaacagcgaagggactcagtcatacataaacatctgtccattctatagttaataatagtagtgttaatcacacagttgtgtccgattcttctcgaccccatgtactatatagcctgctaggctcctctgtccatggaattttccatgcaagaatattggagtgggtatccattcccttctccaggggatcttccccacccagggattgaacccaggtctcctgcattgcaggcagattctttaccatctgaaccaccagggaagcccattctatagttagcattctcctatttagggaaaaaatttaaatttagttgactaacatcaggattttttttttaatatttatttatttggctattcttatcttagttgtagcatataggatctttagttatgacatgtgggatctattcactgaccagagattgaacccagaccccctgcattgggagcatgaaggcttagccaccagaccaccagggaagtcccaacatgtttttatagactgatatctagttgatgtttgtataaactgggtgtaattcataagcttctggaatgtaagaactaggagagaccctgcagatgtctactacatgaggaactagactgagggaggtcttgagacttgtagagggatagcttggacataaggccctagatttgcactgtgaaaccatcctaaagccaaaatcagagctgtttaggtttggggaaaagttcatcttgagagagtcgttttcagaaaaatacacattgggctattgctattattaaaagtt

SEQ ID NO: 60718 - DNA, 1097 bp, Bovine  19866881158042
  misc_feature (1)..(1): n is a, c, g, or t
ntgctgctgaagcatcttctggaaatgtttctcctccggggtgagaataaggaggaacgggaaatacaggtatgattaggaaaaggactagtaatcaaccttgtgttgacttttgtctcactctgcttgtgcacccggctgatgaaatgctaatgtgggctttgtgggcaatcgggggacggttataaatagagctggcttaagaataaaataaaatggctttgccgcacacccaacattgtctggggaaaggtggtgtctagttatgaacattctatatttttccacctgacactcctccttcctgttttcctttcaggatttcagacaaaagatagagggagactctttcagtccatgtaaaactggccatgtagtccttccaccagttacaactgtacaaaacatgagcctcagtacaggtctgaacactggggtttacaaaacttggatttatataaaatagagtatagtaatgaaggccatggatgatggagtctaatttcccagggatgagcccttggatgagatccttgatagtgagcctttgtttccctatctatgaaacacagaaattattacctccctcagagggctgctgtgggcattaaatgaggtcatacactcagtatcaattatcattggtacatgattaacaaaggttttaggaggcaggtacagaatacagaactctggcaatggcaaggccagagcaaatgccaaggagtatcagattacagaatcatttaactactacatttgaaagggactttggggattgtgccaaccctcatttagtgccagaagctcttcccttccctcttctctccttaagtggttgctcaaccccaggtgcacacccacacacagttgacgcggggctgcaggctcaggccagcgcgacaattctgtcggaaagtttctctctatggcgaatctaaacctaacctctagcactttcacctaccggctttgttgcttcccgggtgatggagaacaggcccatacagcctacttcgttttggaatgatcatcactacagttagtcctctctactaactattcttcaaaaggcttctcttctaatcacaccacca

SEQ ID NO: 60719 - DNA, 1104 bp, Bovine  19866881186806
  misc_feature (1)..(1): n is a, c, g, or t
natttctaaaaagcagcaaactgcatctccaccttcagcactgaggaggacgcctacagtaaaagagaagggacagaggaaagaactgtttccacaggagaagcagcacgaatgcccacgaccccaggaaggggacctttccatctctgatgcttgaaaagactcctgttatctgcggttctgaccctacttccccagcagggtccacgcctcacctccacactggggtttgcacccgggatctgttcgtcttgtttcgctgtgggaatctccttggccaggaggctgtaggtggtgatcacgatgtcatacgtggacaggctgcagatataacacaaagcaaaagataaaccatccagcatgactctgacaaaataagacagagttgatttccttcacaaaaatccctccagcagaactcattaatttgtgtcaattcacacacacacactcacacacactctgaagaggtaaattttacactcttgacttccttatcacttaccactggtcatttttagagactactcactgtaactagaacagcccccctcttcccagccaagtcacaaaggatcatctctggctggggtcaaattaagcttgatgaaatctgacaagaacagaaagttgggcaggattggaatttaatatttagttaatttgacacagatgattctaaagtcccaaggaagtaagaaaactctgaagtcatgttcatcttatatcaatggtgctttctccccattgttctgtaatggattcgtgaaaacccattcatctagctttgatatttgggcacaaaaatacatgctgtacactttcagctcacctcgcctatactctttacatgtaaagattcttaatgaaaagcacaaatctttctccaaggaaccttaatattgtggacctgagagaacttcagtaaatactttcaataaagacgacatgcgaatttggacaggcagtgatgcctacttgttgcctgagcatcatataaaggtatatgattgagaatgattcctatcagtcagctagtgcactcaggacaccaaacccagtacaatcaaaatgcaaatcatataagatggaactgacttctaa

SEQ ID NO: 60720 - DNA, 938 bp, Bovine  19866881248445
  misc_feature (1)..(1): n is a, c, g, or t
ngggaagctcttacactgtctccaaagtcctactacttttaagacccagcttctattctacttccttcatggagactaacctagtttcccctaactgatattatcactatttttttttttttttttttttaccttctatatctctttcaaggcacttacattctgctttctagaatagtaatttctgtatttaattatccctttcccctaatacagacacatatagatttgttatgagtaatttatggtaagggagttttattcgtctgtgtctaatactgtgcctggtacattgttctcattttatctctattgcattgagttgaattgatatcctcaatacagccatgctgaattctgtatctattttgctgatatactgggtattggaattcttccagttgcaaaacacagatgaaccaagacaaaagggcagcatcaataaggaaaatagataataatacctcacatattaaggcatcaggaggtagggaggcgcccaggttgaattcagtggctcagtgatgtctggaaagccctcccctcgtccatgtgggctgcccttaggcctggcctcagtgtggctgctgcagtcccaggttctacacacagataaccctgggaagccaagaagagaaatcattcttcctatgattctctctctctttttaaatgttttatcttgtactggagtatagccaactaacaatgtggtgatattttcaggtgaacagcaaagggactcagtcatacatatacatgtatctattctcccctaaacttccctctcatccaagctgccatgtaacattaaacagagttccatgtgctatacaagtaggtccttgttgattctccattttattttttttttaaactttttattttgtactggggtatagctcattgaaaatagctatacccaagaacaaaataaa

SEQ ID NO: 60721 - DNA, 1196 bp, Bovine  19866881249953
  misc_feature (1)..(1): n is a, c, g, or t
ncagtttttagcaatgatgaataaagctagaaatatacttgtgtacatctttttagtgcatgtaggcattcatttctcttgggtaaatgcaaggaatggaattactaggtcatagggtcattgtatgtttacttttattagaaactacaaaaattattttacaaaatagttgtgcagacttatactctcctcagcaatgtattgaattccaattcctccaaattcttacatgagcatttccttttttttcaattttatttttttaaccacactgtgtggcacgtgggatcctagttccccgaccagggatagaacctgtaccccctgcactggaagcatggagtcttaagcactgggccagcagggaagcccctgtcttacgagcatctgatattgtcagtcttttcaattttagccatcttgatgtaatgaatttgagttttcatttgagggttatttataacttatgaacttattaataattccttatccaatgtgatcctccatcttagtaagtggtttaatgtgataaatatgcttctagtcaaaacatctctatctggcagtcagagctgcagaatgaggtgcagaaggagacttggattcaaacatgacatggtaggaactccaaatttctaatgtaaaatcaagtatcgaaagataaatagaaaaccagttaagataatgaacaatgtaactctatcttgtccctacacttatcagtaggaaattggttaacaaatatttactaaacgcttcccaggtggctcagtggtaagaaaaaaaaatctgcctgccaatgttggagccatgggttcaatccctgggtcaggaagatcccctggaggaggaagtggcaacccactccagtattcttgcctagagaaatcccatggacagaggagcttgctgggctaaagtccatgaagttgcaaagagctggacaagactgagtgactaagcacacatactagctacctctgtgagcttgatcgaatacttgaaactttctgataattttgttaagtgttcaaaatcttcacaaaaattggtattatcttcattatataacttgggaaagcagagatagtttgctgaggatggctaccttgctttatcatggtacaaccacagccctcaccccaaaccctctccatcacccaagctgctgctttttttaaagtttatttattttt

SEQ ID NO: 60722 - DNA, 2873 bp, Bovine  19866881250728
  misc_feature (1)..(1): n is a, c, g, or t
ntggcccttggtctgggacttcccgcctccgaactgggagggaataaatttccgttgcttaagcccccagtttatggtgtttgttacggcagccagagcagactgatacaaattcccaggctaattatttgctatctgccatagcatttgttttccaaatgtgccatttgcactcaaatctacatgtaaattgaattagctaattaatacaggtataaaatacctcaggataggagtccctggtgacttcattttccattaattcctgtatatttatatgtcttcccttggaactcctggattaaactatattggcttctcatttaactgtaaagcactcagacagttctatctaaatgttctcctgtccctgttaccttgatatcctgaccatttcctgaaactttacacctatctatccctaaattagcctcttggactgtgggcccaaaaaaatgaccccattttgtagcaaagcccatgctttcatttcatttccataccctgcctttctgctgttatgttaaaaaattaggacttaaatgtaagtaactggtttcctttacaggagcaaaaaggattaaaatggccaatttctcgatgatgataaggatgatatctaacatttacaaatattcatttaatccttatgacaaatgctatgacataagggacagtctctccatgtttatggatgagggaagtgagggaaagagattaaccaccaaaaattacacatccagtgagtgatgtcatcaggatttgaatttaggcatctaaatccagatctcacattcctgactattaagttaccagaagaattcatggggcatgccatctaaaaagacccaaaaatcaaagtggaagaccctaagaaggagtagttagcagcctggattttgtctcagtacagtttacttctcaggaggatttatatgttgactatttcttttgtatagaagggttactaaatatgacctcgccatttagccttctgttgccaggtgggaagtctcctggtttacttcatttgaatgattcatgcttcataccatactgaataccttccatcaatcaagaaaaaggtttaacaaactcacagacgtagagaacacacttgagggtgttaaggggaggtcgagtagaagagggatggattgggagtttgggattagcagatgcaaactagtatatagagaatgaataaacacaaggtcctgctgtatagcacaagagactatgttcactatcctgtgataaaccataatggaaaagaaaatgaaaaagaatatatatatatgtttaacagaatcattttcctgtatagcagaaattaatacaacattgtaaatcaactataattcaatataaattttaaaataaaaataaaatttaaacaaattcacttgtttcaagtgaagagtttagacgtgtgtgttaggcgctgacattagacggagccaggaaccctcattcagtatggatgctaaaggccagcccacaggcacttcagactcttgtaacactgctcaatttttttcttccatggtgatgctttttacacaagcatcctcatttgccaattttaaggctaaaagatatttggcccacacgtgggaaaaaaagggcaccctaacacttggatccttttattgggctgattctatcttggatatggagaacagaagaatcttcaaataatttcctgctgctagcagtgtggtacaaatagctgttgttggacagaccattaaacaatacaaagattcccttaagacagtcttaagaactcatagcatctgcctttagtcatgggagactataacaaaacatgctctcgtgtgtctatttgaacagcatcatcaggcaatgcagagtagccatttaatcaacttgcactgagctgaatggagatctgtgggaaccagggcaaagagggcaatgggatcccctggtcctccagtccaaattcatctcccctttgtagagctaactggcctcagagagcaagcggcaaagaagcacatggcattgttttctgtcccagccatcctctcactaccttgtaaatatagatcttcactggtgatcagactgtggaatctccacagctagaggaggcatgctgtgacagagcattgtttttggaggccaagctcgtgctctgccccttaacgcctggtgaccttaggcataatgtttaactgctttttcctggtttgtggtttaatttccatttctttgcaggttatcataaagatctagtcatcatcactcatgaacccctttcttctttcctctttgaagaaatggatgatgtcagttatttctgcatgtctagctccaatggcaccccactccagtactcttgcctggaaaatcccatggatggaggagcctggtgggctgcagtccatggggttattaagagtcggacacaactgagcgacttcactttcacttttcactttcatgcactggagaaggaaatggcaacccactccagtcttcttgcctggagaatcccagggatgggggagcctggtgggctgccatctatggggtcgcacagagccggacacgactgaaacgacttagcagcagcagctcctagtgtatgtcttggcttatgttagacatcaaaaagtgcttgtaaaatgtgtgtctcatttctctcatatgttaaaatacctctctatatgttggtcatctagttgattcttaaatgctttttaaagagaaagatgtttttttaaaaaactcaggtttaggttatttacatataagctatctattaagttatgtattagtattattagtattaagttcagttatttacatacaataaagactcaatcttaagaggactcatt

SEQ ID NO: 60723 - DNA, 1713 bp, Bovine  19866881328195
  misc_feature (1)..(1): n is a, c, g, or t
ntaaaaactgcaatttggcacggagcagaaataaaaccccaaactcgggattcacatattctcgcataccctgtcaagctggaataaagattaaagatttaagttggacagctaccagtcaggacttatttcctccccaatgggctgtatagattggcactcaaggaatattttttataattatcagtgataatctgataacagaataacagaccagtttgtcgtttttaatttctatgcctccccttaccatcatcactgcttagacattttgtgttagtctttaaaatgtaaatttacctacagctcttcattctgcctattctaatgcctgtcaagcagagatgaaaggaaactgtacccaggcaagtctgagatctccgtctcaatcgtaaaatcttctgtggaaccttgcactacttgagcaaggcagatctgagctcttgatatggttagaaaatgtgacctactttaaaacccagcagtgtgtgtgtgatgaaatgaaagtgaattgttttgctgaaatctgacactaaaaatagggcaccggatccttcccctgctggaaaaaaaaaaaaaggcatttaaatgagtgtgtgtctgtatgtctgggaatatgtctccatggcaaccattgtcccacctcccctatcaacagcattacccctctctacagaaagaggtcatatgaatgcctttcccagcacccctcccaatcccttactccatgaaatctaattaaagagtgaaatgaattttagtgatggtcctagaggctggggagaagtccaagattgggggtggtaagggaggataactgaaggggagacacacggagacctgcccttccgcactggagcagcagctcgcaactccgttctcatttttaaaaagagccacagctcccacgctgaggagctgtaagggggtgataaacctgccatgcaacgatgttattactttaatggatacaggactggtggagcactttatttccaccagggctttttactgttgtctcttcttcccttttcacaacatccagttttcctcaaacacaccccctcccctttagtaaggaaacttgtccccatttccaatcccactctggtgaagaggaaagaaagcattacttgaatcgtaggtctgtctctagaacaagatatgtaagacagtcacactagtgaacagcccctgccctcccccaacctcaaatactcttctttcgtgaagattagaagccagaaaagaatcggggtaggggatggagaggtaaggattgaggaagatactctggcgagattgaagctgatgtgtgcaaatgagcttgaggttttgttttttttttcctagcctctgctggggacctcccttgttccttttcagcagctgcctctcgtccttcctcctctcctcacccttcgtgtccagtcagcagcagcctcagtcactcgcctcccacactgaccatcctgcccttggtctgtctgggcatctgttcctcattcctgcatccagatgttttctccaggttggatgtcagtcccctgtcatgctgcatggggtctcagctggagcagaactgtcctcccgtgaggatacgggcaggtctgggcttgtcctgctgggaagagcgaggtggctggcaagaaaacaggtggggcctcctgggaataagggcagagtcagccacacacagtctggggctcatca

SEQ ID NO: 60724 - DNA, 1019 bp, Bovine  19866881343274
  misc_feature (1)..(1): n is a, c, g, or t
nacaactgaacagcaggaatggatggtgggtgcttttttaaaatcttgagtggatggattactggacagctgtgcatatggggctttcacaattatagggataagattgaggctgagagctgctttatcataatgctccatggagcaggtgggtctggaaagctgtttgagccaagagcaggaaaaagcacttcaggtgagaaaatgaccagcgcagcatctcagatatggggagtaaatcagcatgtgcgggtggtgtgctgtttggggattagctgacttaaggtggaaaaggaaaacagacctcagggtttgtggaaattaaactctggggccaggaggttggtggaggggaagaacgggagcagagtcaccctgaaaggtgtcagcagcatttttggtgcccacagagcagctaagaacccacatacatgaggctggcaaggtccactggggcccacaggaagctactctgctaaattaaggtgataagtcaggccataatcttatttttggttgtttcttaggaggaaaatggctcacaaaacaattgccgatgttccccttaggtagtgtatcagagcatttcttcaaaggactatcgcctgataagagacacagataagtttcagaggaaggatgggaagttttagatggttttctctgggaccaaagctaatgcaatcatgtggtctattcatcagagtcccactttaataacagtttatcccacaaactagttctttctgaacatcaatatgagtcccagaaagcttagtgttgaacctggcttctaagtacctggggatggtgcttctgttgctgcgtctgtggagtgtcccagaggcacgaggtggtatgcactgcccaactgcaccttcaggatccacagacctaatgggaattaccccacagcactgtggtcctaagaaaatggcacaggtaagacaagctctgtgttctctctggtgtgttcactgacagtgtgttaagtctcggaacaaagaagtacaaaatca

SEQ ID NO: 60725 - DNA, 1389 bp, Bovine  19866881392376
  misc_feature (1)..(1): n is a, c, g, or t
ntactgttaaaaaatgaatacttaagtactgttaagaaataaaaaaaataaaaaaatagaaacgagtttggcagtcctttctagagcaagaaatgatcccaggaacatttagaaaaactggactgcttttactgtgtttccatttcctctaaagaaaggccttctaggtgtgaaggttgcattcatattttatattaagattagattatttcctttgtcttttaggatcctaattctaaagaacattctggagccagtaagtctcagcttgcctctgagtcatcgcattatccttccagccaccagagaaacccgttcaaggtacttgataagaatcaagaaccatccgtctggaaacagttcatcaaaggtgaagatgaggaaaagacagctgataagaagcaaagagaaaagggagatccactcctggatcaaaagaaggaacagaagccagaatctaagtgttggatggagaaggagctctcatctggcctgggagtaaagaaaaaacaatctgcagttcaagacaagcagcaaagggagaagacagagtttcagtgtgaagcaaaggagatagaggggatgcacaaaagaaaccttttagagatgaaatccaaacaggtccgtggaaatgtgctcagagaaccatctgcatttcaggtgaagtcagatagtgagagtcattctgtccagaaagaatcagaacctccgacagaagaggaaactaagcctttgcctccaattgttcacagtcaacactcaataagccagcccctgaaagaggagcacctcaacaaggagcaccctaagagctgggaggctagagaaacaaagacagggaatgacccaagcacacagaccctccaaaagagtctgctccagggccattttcaggctcagtcggagacccgggacatgcctgctccaaaggaaccagctgctcagcctgcaccactggccacggggcatcccgcaggagaggggcgagacgctggcacaagcagtggtgacagtgaggacgatgacgttgtttttgtttcgtctaagccaaggagccccttactctttgacttgcctccagacacacaggagaagaagaaccttgaactccctggtcagagtgtgcaaagaaaagtgtcttcagccccgggtgtttccaagaagggagagccttcagacccagcagcccaacgtgtgttcctcacaacacaactgcaacaaaggaaggtaactactacctgtgtgtgtctataaggtcggagcatcgcttctgtgggcaggtagggtccgccacgggcaagtgagatgtatcagtgtaaggaaggtctcacaggtggatgtttagtttctgccttttgctgtgcttatatgttcaggattgtaaatcag

SEQ ID NO: 60726 - DNA, 801 bp, Bovine  19866881524513
  misc_feature (1)..(1): n is a, c, g, or t
nttttacatacattccccctctcttcctaaggatgtccttcgaggcaaatattgtttaccatatgaaaactgagactccaaatatttgggacttattcaatgtcatgcagccagaaagttgcagagtcaggcttcgaacaaggtgcctctggctctagatcccatgttctttccatcatcccagcactcttcctgcagaagcacactctacacaatcgtatttcgacccagtaacccacatgtgaaagagacacagctccatgagcagaagcaagaagcaattggtagaaggtgtgctctggatggggcagtgatgaggtgggtggttgacggagacagaaggaagaaaagagaatgtaggtgacctggaaatacctctctctcttatactgggtttattttaagactagtcagggttgccatcgcctaacaatttccttataaatcaccctcgcagctaaatattatcctaaaaatttaccggcccacaaatttttgttaaccagtctgctacaaatattatacagatggcagactaaataaaacccatcagtagttacgactagcctccctgaaatggtaagtggccttgggcttacagggactcagctttgagaagacagccttaaataatgaacaggaagatgaaacagacactctgtctccagacaccgcgtggccctgcaagttagcatcccagatgctgccgatactcttggtttgcaaactctctttttcatgaaacaaggggtagggcagacacccatcatcgtaataaaataatggcaccagctaatttcc

SEQ ID NO: 60727 - DNA, 2140 bp, Bovine  19866881753071
  misc_feature (1)..(1): n is a, c, g, or t
ntcaagcacacaatcaagttttaacgcaaccacaaggagttgtgggggcccaaagaacctgagctctgtgtcacacaattccagggggcaccattcagtcagctcctctgtcaagcagctgatgttagctatctcatagtatttcttttttttttttctcatagtatttctttgttcctttagcacaaaggtaaaatctctaaccctgggttcctaggtgcctctctcatcttagtctacagccttctctctcgggccctaaccttgggggctgactttcttctggttaataccttacttttgtttataggtagcaaaactctttcagggtttttgttttgttttgttgatggctgtgctgggtcttggttgccaggacgcaccttctgtattgcagtgagtgggggccgccctccagttggggggcgcgagtttctccttgtggtggtttccttgttgtgcagcttcagtagtcgcagctcgtgggctctaggaagcaggcttagtcattgtggtgcgcagggtcagtggggtcagttgccctgcagcatgcggaatgatcccagaccagggatcgaacccacgtctcctgcactggcaggcagattcttaaccactggaccaccagggaagtccttcaagtactttatatcacacgaaactcaatattcttggaaagggatcaggcaattattagagtcctgttttacaaaagaggaaagtgaggatcagagagatcaccaaatgccaatggtcacgtgagtaggaaaaagcagaggtcctgactcctgctttattgtttcttccatcagaacaagagagcgtaggaaataaatagactaaccctaatagttgctatagatggctctctggtcctattctgggtactctgggaaggctcacctgtgctcatcaataagtccttccaagtcccacgtgacatcctccatgctcctcctctccttctctggtctccacgggtcctctgatgttctgctgctggtacctgtggtgaagagcactgagctcactactcctcagtgccagagccgcattctggatcaggagaggaagcaggagaagtcggggaatattccgaaggtccctagggcaaatggagctgccactagaaaatgggaggtgctgagacaagtttgtgggtctgactcattaggatgcttctttttccagtaatcctttcttccatggcctttcttggcccttcatgcaaatagtctcctggaagcctgtccctttaatcttccagatatgcccagatgactagatttcagtcagagctggattaataagatccagccaagcaactgcccagggtaacagaacactgctgttataaattggaacgattgccacttaatttagatttcccctgaagtcatgtgactattggtctgtctccacaaaacacacagcacccttgagtagtaaatttaaaaacagtctgtcaaaacagataaacagcaaagtactactgtgtagcacagggaactttactcagtatcctatgataaaccataatggaaaataatataaaaaggaatatacataaataaatatatatataattggatcacttagtgtatatcagaaactaacacaacactgttaatcaactatacttaaattaaaaaaaaaaaaaaaaacaagacaaaaaactcactctgccaaattgacctacctctgtggattgtacacagaagtgccacatacacttgcctgatgcagccatatctgaagttagcagtcacgattacatgaataccaaacctgaacaggggcaaatagtgctacttactaagatcaagtcagctaattgtttttatttaaattgcaaaccctttcatactcccatgatgaagttgtcatgtttagaaaattataaaagaaaatggaagtgagaataagaacatcagaaaagtggaaaatattttaccaggtttttttggtacaaagactctgttttggccagtaggtataaattaacaataggatccattttctgtacgcaatttttattaacagaagaatcagtttatccatggaataccagaataagtgttgaacaaatatttcaaaactaacaagttgaagggacatcaactcattaatctggccgggt

SEQ ID NO: 60728 - DNA, 1227 bp, Bovine  19866881766600
  misc_feature (1)..(1): n is a, c, g, or t
ntactgaagagtaagtaccgaatcctctaggataagcaaacatgagttcagaaccagatggtgatggcgtgtttgtgcccgtgcccctgtgcatctgcagtgcacacaggctgctgctccacacagggacagaggacccagctgcaacagtggtcagtggaggccctgagagcagacggccagatcctttgactacctaaccaactgagaaatgtacttgtgtacatgcagtttacatgtggtgtcatctctatgtaatatacaggacctttaaagtacttatacagttattacattttaaaagcagagatagaaataagaaaaactctctagaatatggaaatttctggaatttcagaaacatggaaaactgtctactatggtggctgaagtctgaatttgttacagatcttccttcagaaaataatattttaattatttgggtctaccctgtagttatgttctcaacattaacaaaaacaatcattaggtttaaactaacatttttagactttgagctgccaccataaaactgtttctaatcacaggccaagctaatcttatatttaaaggaaaaaaatgatcacttctagttagcatattcagtgtcagaaatgatactataggaaagtaacagttttccaaaaaattaaatatgaccaaaggcatcctttcatggctgaaaaacttccactccccactgctttccacccacacgtgacttaggaagcagcaggcaagcaagacacttgggaataccatttttggaaagccaagtcaaagccgtggtttcgtccttttctttgcttttcttttgggtcagaatgagtgcaatcattgtcagggtttttcctaaccccatatcatccgctggaaaatgaaaacaaaaataagagaggtaattactttgggcaaggaatcagttcaacttcaagagatgcggtccggggtagacaccagcctggtccccctgctgtcagcaccactccagtcgctgtgctttgcctcctctaaggaagtctttgtcttgttaaaatgaacactaaccgttgccattttttttgcgatctaggtcacagacatttattatgacctctgtaaaatttaaaacttattatttagatcttatttgagtccctgtgttttattgtcacttatccagtacattcattggtatctctctcagtttgatgatgttgcctgtgtgtatgctagtctctcagtcgt

SEQ ID NO: 60729 - DNA, 1030 bp, Bovine  19866881782830
  misc_feature (1)..(1): n is a, c, g, or t
nttcctgctgttagttgtaactggttagtttccctttggactccacttcctaatccctatgtcattttcagtgtcagaaacatgatagtgttagccattcagttgtgtccagttctttgcaaccccgtgcccaccaggctcttctgtccatggaattgcccaggcaagaatactagaatgggttgccatttccttctccaggggatcttcccaacccagggattgaacccaggtctcctgcattgcaggcagattctttatcatatgagccaccagggaagaccagaaacatagtaaagagtcccgaaatgctgctgaagtgtgaaaaaaataaggccataagaaaaagcaggagtgttgtatattaacagttgggcacaacatattcattcacatctgtgttcacttgaccaatgtgaccaagcacctgtcatgtgccaggctctgggctgggcactatggtcttcagctggaacttcctgcatggatttcccaatcaaagatgatggactataatgccttctaataaataaaacatttgggtgtgccagccttgagaaaatggaaagatgaaaagctgtgccaaaagtggttaggttttgcctttttttaactcctcaccacagcataagccaagtagcagcatgcaggacagacattaaatcagctaacattctgttctgaggacatcctagagggacaatgcatttataaagcactatcctctgctttgcctccaggatagctcatgacagcaagccacttcaaacacagtggagaattcactcccagagggtccttgctgcaactgtgtccgactctgtacaactctatggactgcagcccaccaggctcctttgtccatgggattctccaggcaacaatactggagtgggttgccatgccctgctctagggaatcttccagactcagggatcgaacatgcatctcttatgtctcctgcattggcaggcaggttctttaccacaagcaccacctgggaagcttgatgagggtccttgatgagcct

SEQ ID NO: 60730 - DNA, 1083 bp, Bovine  19866881847076
  misc_feature (1)..(1): n is a, c, g, or t
ncccctcctctttctcccggggaatggggcagtgtcgggtgccaaaactgtgccaagtatgtattaataaactctgaaccatattggcagctttgtggttttctgcagccttttgcagcctggaaaacgttttcctattagaagcccctgctgttttatctattacacgtgaaaccgaataagtctccacacatccactgggagttggggagtagcatcagagtgtgcagccaggggaaaggaattaaaaagggagctaatgtcatccgtggggaatcgcgggtggggggtgggggtggggggatttgggggaccggtttcccaaggagaagggtctgcggcaggatttttcgccatgtgttgcggccactcaagcaggagcacgcgcctgctgtccgcgcgccccccaacatataaaaggcagctgcacggaatgttacacatgggctgacttacagggagaaaaatttttatctcacaaggcagatttgatttcccgagaccatatgcttgcttgtctttttccccgaagagcccacgatctcatgcgggaaaaattcagttttattggctcttggagaagagggaattggaaatgttagctaaatagagaccgcatggaccagaatctctgagcactcccccggggctgtggaggagtgtcaggctatgaaactgcagatccgaggacagaaatgcaaaaccgagaagagctgtggctgggagcaaggcagtgtgggctctggtccctgctctgttgctcacgacctccgaaccacgctctgcctgtgatgtggggggtggacgcgattcgccccgtttgtgttgcaaaaccgacgtataagtgttgcacaaggggcaccatatgcgacactgacttgggacttaacaggggtagttgcaggccagatattgttattattaatatttgaagacaacttacactctgaccaaagctaaggtatttgtccagtttttaagcaactattacttgaacactgtattaggactctctgtctacaagtggcatcaagtcaaatgaaaatgccttattcataatagggaaggattacttcattcatt

SEQ ID NO: 60731 - DNA, 1226 bp, Bovine  19866881933983
  misc_feature (1)..(1): n is a, c, g, or t
nttgccttgattcatggacctgacattccggttcctatgcaatattgctctttacagcatcggaccttgcttctatcaccagtcacctccacagctgggtattgtgtttgctttggctccaacccttcattctttctggagttatttatccactgatctccagtagcatattgggcacctaataggtactaaataagaacttactgaacacaagaaattgattaagtaataagtgaaattttaaaaaactcaatgagtaaaataagtgaataggtggaattaaaacaggtgtctctgactcaaaagctgcactaataaaggaattctgaatcattactagaatgtttgatttcttttataaacataaaaggaacaagaaaaataattatataataaacctgatgtgtaaattttgaatttataatagacaaggtaatattattacttatttcagttcacacagagtatacacagaactgtgataaattatatcatgtaagatttcatagtcttcaaaggatactttaatattctactttatttgagcttaatggcaacccatggggtgaaatagagaaggtatttttcaggtgaggaaaccaaggatcaaagaagaactaaggacacacccagagttgtatagagccagggagagaacagaagccaagaattctgagttcaggttcagaattcctccctctctacgggtgacctctgatggcaggcttcagtcatttgactgatggtgaaaatgtactatgagttttatttcctgtctgatagacttcctaaatccctttctgacaacaggtagtagggtcccaggcctctcaagacccaaagcaaggaacccccttcagagtcaagattccattcccttaaccttcctagcaaacaattggccctaagattgattcagaggcctcactgtctcaaattttagagtcacctttctgaagactgtagccagagagggtttaggcagggcaaggacaaagcaagatgggaagagaggtagtgtgaaggggtatagatggaggcagacagacctagggtcaaattctagctctgcctactcacttttccatacagatgtccagttattccagcatcatcccttgaaaacaattctctttcctcattgggctgttatagtgcctttgttgaaaatcattgactgtataaaggtcttattctgggcactcgttggttccacctccagcaca

SEQ ID NO: 60732 - DNA, 1334 bp, Bovine  19866881934278
  misc_feature (1)..(1): n is a, c, g, or t
nctctaatgcctttttaacttttaactttctatgattcaaataaggagacttaatttgtttccttctttctagattctccttttcaattccaaactagtttctcatcttacctctttaaaaacttgaataacatttctccaattcagaaaccagcatgattccaattctgctttcctcatgtatgggggtggcaggggtcccaagtaagacctaaacacattctccaggaagataacaacaggtgggcctgtctgtgcccatctgggctgcctggagaacaaatgacaatccctggcaacggtgcctggtgcagcaatccctaactggcatgattgaaaaagcaaaactgggacagattatgatactttctcctagcaacacatgatcatttgcttcatatctaggaaggatgctgctatgctcctggtgttgacactatgagcggtgagtccaagactacgtgttaagcatgtatctaacataattagaaaatttctttgccttttcctttaggagtaatggttctccttctttgccaatgctgagatatccttggacgtgaacaagtatgtctgaaatacagtattttgaagagataaaactcttcgttgagtaaagtagctcttagccatgagaaaaagccctactcccagtttccatggaaacagacattaggttaacaataaagtgaacaaactatttcaaatagtcatttgaatcctgccttgctcaggaatacagggccatcaactcagcctataccattttgatctgtatctatatacacatatgcacagaggcagctccacaatacgaaaggaacacactcattatgaggtcaggttttactgcccctctggtctccctgcgatgcagggacaactcaagaaaaatccataactgttaccagtgcatgtccagaagaaaaagatggtttcctccagtcaggtttagaccgacaacctccagccaagagagaaattagcataaccttcaaaaggaagcacaccattcactttacacagattcggtctcataaagcatctctcctcctgttacaggttcaataccaagaccaacacaaataagcaacatgttcttatcaaatttccttctgcagttataaaggcactgtttcaaaactttgagatgctattttccctgcctcacctttgagaagattttcatttaaccttgttttggtgagtcaatctcaagacattaattgcgtgcccgccaaatatatgaatactaccatttagaggactgcagctggtcagttcaatacactttccatcaaccagatactgtctaatccaccagtcccccccca

SEQ ID NO: 60733 - DNA, 1097 bp, Bovine  19866882029823
  misc_feature (1)..(1): n is a, c, g, or t
nctcagtctaaggtggatggcagtgttgcaggaaagaaccaattctgactccttgttggatctgtttctttgactttaacctttgcttttcattccttttcttattataatcatacataatgccttgcctcagcgaaccctgtccttccggctgactgttaactaaaagtgcttttgttcagctcacagggagataatctagccctgcccacctgtgaatggctgcaagaaagaagaggtgaacacatcccctccctgaggctggccattccaggagatatttgcaacataatagcctttttgctttacttcctcaactcttccccagcatacagaccccaacaagatggctattttgagacattagtctgccatcatctcagtcagcctgctttccaaataaagttgtattccttgccttagtatctcatctctgattttattggcctgtggtagcagaccaagcttggactcagtaacagcagggatgctacaaaagacttttgttccagggaagtgttttagggttcattacatgaccatgtcctgccctcaagcaattctcatttagtggttcagggaaggagggccttgcagactgaaatcacctttatcagtaattatgacctacagctagaattgagaacccatggaattggttaatgagatgggagtcattaatctctctggttaaaagaaaaaggtgaagaatgcttgacatcagtaatggtgaggataatgataatagtaataaaattagttgaatgaatgaatgcttcagtgaaatcttgggacttaaatgctcccagactatttggttatttcattagaaataaacatagttccctacctttgctgtgccagagtcttgccaagaaacccatctcatttttggagagtaacaacttgggacttctgtgtctcttacccataattgacttgcagctctatgccctttggtccatcttccctccaggttttatttagattgctctctggtgttcttttttctatatttgtgcagtactcagtttgattgcttggggttaatggtttctccccagctctgcatttatctctatgaggaatttccactt

SEQ ID NO: 60734 - DNA, 965 bp, Bovine  19866880484182
  misc_feature (1)..(1): n is a, c, g, or t
nccgtactttagatacattacctatactgtgaaatgccacaaaagagaacacaggggctcatagcaacagaggcagaataaatgcctcagtgagattccaagagcattagtcatttgacagcttgtgcttgctcacgacaaagcaagggcaagctcaatacctcctgatacactgaaggacaggagcagacaaaaggctgataccagggcctgatatttaagaacaaatgacaactcttaaaatgtgctgtagctctgaaatgctcaagaaaatatgaaagtaattttccaagcctatttcttgatgtttcttttttaaaagaaacatgatctctggagcttttgattaaagaatggtggaatcattctttttaattcactctgatttcacctccaaagggacacccaacttccctttatccctggttgactcacatcaagccagaagaaggcaaaaaaaagtcaagtgaatttgaagagctcttttcaaaattgacatatacttcggtactcaactatactgtaaaaaaaaaaaagcaaaaacggaaagcgatggtccttatcagccatgggataagtcagaagaatttttagaaaaaaaaattaagtttgaatagtgtaacatggaacatacaccactcttcctgtcatatggaataactcttaagtcaagcatcagatatgcatacttcaaagacccctccccttgtgtatctgcatttgctcatgtctctagggtgtggtggctcagagtgtaaagaatctgcctgcaatgtgggagacctgagttcgatccctgggtctggaagatcccctgaagaaggaatgacaacccactccagtactcttgcctggagaattccatggacggaggagcctgatgggctgtatagtgcatggcgtcgcaaagagtcgcacacaactgagtaactcacacacacacacacacacacacacacactagg

SEQ ID NO: 60735 - DNA, 1828 bp, Bovine  19866880546640
  misc_feature (1)..(1): n is a, c, g, or t
nttttctaactcagaaagaggattgccagggatcaaggctgcacatttggtaaatattagacttcagaaactcaatgttgaattggggctccttgatcactgttgagctgatggatgacagtcgaagaacaaaggtgttgcccatgtggatttcaaatgatgattgagtagaagaccctgtttcaaattgatgcataacttctaataacactggttggctttttaggagttaagcagcatcagatctaggatttctcaaatgtatcagaattctccagcaaagctcatcttttcattttctcttccatgcaaaagaaactttctagtagtcagaactcttgcctggaaaatcccatgaacggaggagcctggtgggctgcagtccatggggtcgatgggagtcggacacgactgagggacttcacttttgcttttcactttcatacattggagaaggaaatggcaacccactccagtgttcttgcctggagaatcccagggacgggggagcctggtgggctgccgtctacggggtcacacagagttggacacgactgaagcgacttagcagcagcagcagcagcagtagtcagaaattgattgcagttcactctggcaggcacccacgtgcttcttaatcatcaaaagagaatgaattgttagaaacacaagtggccatggatttgagagatttcattagtattttttactgcaacatgattcctttaattgtctgacatgacaaagacatgttcttccatctttccagcatagagtccacggtatgttatgttcctttggcacaaaagcaaataattgagtgcagtatccactacttctgaaatatatctctgacttttttcctctgtagtgcttaaggttgatacagcttttatttttacagagtgcaaatttgagttgttcccaggttgagaaatattttccatgaaggactatggaaagtaaaataaaaatgatgttgacttaggtattttggtacttacacatgaaagaaagcttttaggagattatttcttaaaaaaaaaaaaaaaaaacagctttccaggatttcttagtaatcataatctagcctaaaattttcgagaaattttcaggaaaaaaaaaaatgcctccagctttttggactgaaagccaagttgagtgttgtttggaacatcagtcttgaaggagctttgccactaggattgctgtaaatgaggtgatgcttgccaggctgctcaagtaacacctcagctaaacaagtgtccctgtgtctttccaacatttttatgagaaaacaacccatttatttctttggttggaaaaaaaaaaggtcttactgccaatccactcaataaagaaagctttggaggaaaattcctggtaagtaagaagccaatttctttcttccctttcttcctgagttccctgcaatttggtctctaccaccaccatccctggtggctcagtgggtaaagaactgcctgcgatgctgcagacatgggtttgacctctgggtcaggtagattccctggaggaggaaatgacaacccactccagtattcttgcctggagaatccttggacacaggagtctggcgggctatagttcaaggagtcatgatcagacacaacagtgtgacttgcacacgcacacacacacgacatactcacatttacttttcatctcattgcctgtctccatccaatcacgtagttctatcaaggcagagatctttgttttgttcactactctatcctagaccaaggacagtgcctgatgcagagtagttgctgaataaatatttattaacagttaaacagcataa

SEQ ID NO: 60736 - DNA, 755 bp, Bovine  19866880604623
  misc_feature (1)..(1): n is a, c, g, or t
nattttcagcttctatttattatgtggcaaaaccaagatgtctatttatgatgtagaatattaagctcatagaagataactgacttggtgagtgtatggttaagaatctgtctccaaaattttaaccttttctattgcattaatttcctattctaacaaataataatgcatattctatgctttggcattttttgacaatttaaatatgtttccatcgtatgactcaaccttttgtaggaacattttacagaattatttttaaataactgtacaggaagtaaatattcctaggcttcaggctgcagtcagtaagaacagtggttggttcagattgactttcagagaattaaaattatacaccatgaaactccacagttagctctgcaattaaaaacgcacttcttcactcaggaaatgattatttcatttcaaaaggaaaagaagaagcagcagctaactaaatcccaaaggatctagcaaaactctcactgattccagtgttacaaatctatctcaaaattttatatgattacctcttctacttcaaaaaaaaaaaaaaaaaaagaaagcacaaattaaaggaaacttactgtaagaaaaatagtggcgatgggacaccaaggtcttaataatgaacttagtagctttaaaaatgctcacattgagacaataaaaaataggaaaacaagacagctattttcgaagagaataaattatcgatttaaaaatccgcatgcaacagcatggggttgtat

SEQ ID NO: 60737 - DNA, 2136 bp, Bovine  19866880672020
  misc_feature (1)..(1): n is a, c, g, or t
natcagttaatagctctattttgtacattatctcttcatactttgtcttcgcaaaagatcttatggctaaatcttccgttagccaatttggtttcagctgcttttctttgacagtctctaaggtgatatttattaatattaagacctattctttttccaatttcaggctcctcagcagatcactctacttttagggattaatggtccgtatcattccacctttttcatcagtttagattcatcttagtatttttagctgcttggcctttgctgctaaactacagggtgcattagagcatgaccttggatatggggctgttttcagaaacaaaactcaggattcatccgtggcttgtaagaggaaccccagggactgtgaagtggagaaataagtaaattaacaaagagtgatgaagaaataccctaaaactccaaatcttcttattgatgcttatgtgccctgcagtccctgtcgggcctgctacatagaagatatattaaaaatagttttaagtatgtacaaacactgctacatttaaaatggagaaaaacaaggacctgctggagagcacaggggactctgctcagtgctatgtggcagcctgggtgggagtggggtttgggggagaaaggatacatgtgtacgtgtggctgagtcccttcgctgtccacctgaaactatcacagcattgttcgtgaattggctatatcctaacacaaagtaaaaaaaaaaaaaaaatcccctggacagaggagcctggtaggctacagtccatggggtcacaaagagtcggacacgattgaacgacttcactttcactttctttcaacacaaagtaaaaaaaaaaagcatgtacaagaaaagacggggaaaatgtcaaagtgccgacggcacagccatacccccagcctgtcgtcatgtttctctgaccccgttcactcgacagcactgcttgagcatctgctgtgtgtctggcgtgagtcactgagaatatagccagtgagcaaggtagggtggcgtctttccttcccctggtttacacctcacctcgctactcaaaaccgtaccatgcgggcagcaaataaagacgatgcttttacaacaaaggaagaaatctgggattttttcctaaagtagaattattcggtgtttgataaaatgctaaaggaaatcaaccctgaatattcattggaaggactgatgctgaagctgaggctccagtactctgccacctgatgcaaagagccgactcattggaaaagaccctgatgctgggaaagattgagggcaggaagagaaggggacagaggatgagatggctggatggcatcaccaactcaatggacatgagtttgaggcaactctgggagatagtgcaggacagggaagcctggcgtgctgcagtccgtggggtcacagagagtctgacttgacttggcaactgaacaatagcgacacaaatactcagtgtacacttcagcgaccagaccacggtttctcttttcaggtaaggaacaggagcccctttgctggcgtaagatgcacgcgagcactcctgaacacagagctggcactgactgcaggaaggaatcttcgagggtgtcattatcagggaagaccccctaggactgccctcggggccatgaatgactgaagaagaccggcttccttctcgggccgttgtcagtatcagctgggtggtgaccttgtgtgctgggcagctccgtgctgtcctacaagtttataaccttggcagcaggatgttacatccttaggactcagcatatggacacgttcactcacaaagtactgattttctccctttttttccactgtcatggatatcggcaccaaaaagcattttgggaatgaaataattgattcaaaaccattgtcaatacagtttcaaaaagacacaaaattcaaactagtccattgaaatgggtattgaaatgtgcatgaataaaagatttcataggaaatgtggttggaattattggctagaatcaggcttggggttttctgtaatttaaaattatttacgctgcttagtaatcatcgatggaacctttgctatttgccgatgtcgcctcacaccctggggacccagagatgggtggaggcatggccgctgc

SEQ ID NO: 60738 - DNA, 720 bp, Bovine  19866880695014
  misc_feature (1)..(1): n is a, c, g, or t
ncttgacgtgtgttacttaggggtactatgtcttactgactgcactacatcagcagttaactgagaatgcaaactctgacacattgaggcagacacttggcaccacggctttctccccatgattcatttttaaagccaacaaacatgaaagtcaaacgatgggtgggagaggcaagagaaattttgcaaaatttatggtacaatccgaatctgccagagatgtaagagaggagtgatcagtaataaagatcatataggaccataatcacttgtgttactacaacacaggaagatgtaacttgtgaccccttgctcccatcatcttaagattaatatgtacattcctttaaggtcatgggaggtgcttatacaatatgtctagtatgtcacaagttttacaaataatatgtatcgattattctgttacactgatatttttcttggttattgaataaatatgggttgaactctataatgacacaggagaggtgggttcgatccccgagtcaggaagatcccttggagaagggcatggcaacccattgcagtactcttgtctagagaatttcagggacagaggagcctggagggctacagtccatggggtctcaaagagttggacacgactgaagcgatttaacatgcacacaggcatgaactctataatgggtccagctttgtgctgggcacttctggaccacattttctatacttcataca

SEQ ID NO: 60739 - DNA, 1040 bp, Bovine  19866880721460
  misc_feature (1)..(1): n is a, c, g, or t
nagactgggcgctgggctgcgggagggggagggggaaatggacgctaaacttagagtgagaaacgtgaccttccgtagatgaaaactgacccagtgtgagctggctggtggaccgtgcccctctgccccacggcctttgtctctccctgggtgtttgaaaggtgtgttcaagttgtgtttatgagacaggaaatacatgttttagcaggaaataaatctgtccctgcatgcacagatggctgcgtatttcattatgttgggagccaacagtgcccctttcacctgcgtttctacttctgattctatcacatcaacacaacctcccagaccaaggtctcatagctggttttctggacgactccaggtcacgtttacagagcaaaatttcctgagtgattatcggcgggtaagttcctcgctcagatgcacggttaacaacttctctcgtttcaagggcgagagtcacagtggttgacaagccgagaggaggtttggggccaagacattttcagttcattttagaaatacgagtctgaggagaggccgagcagctttaagctcctcagacacgttgttgtgggtgtcttcatctctgcgtcatcgagtcactcaaacaagcagcaagtcagactgccataaaaaaagaatgaaataatgccatctgcagcaacgtggatgggcctagtgacgctcacgttaagtgaaggaagtcggatcgagaaagaagtacgatatcatttacatgtggaatccaaaatgcgacacaaatgagcctatctatgaaacagactcacagccatagacaacagtctggtggttgccaagggggcggggatgtgaggaagggaaaggctgagagactgggataagcagatgcaaactattgtatgcaggatggataagcaacaggtcctcctaccgtatcatgcagggaactataccatacttgctatcttgtaagaaaccataatggaaaagaatatgtgtgtgtgtgtgtgtaactgaatcactttgctgtacagcagaaactaataagactt

SEQ ID NO: 60740 - DNA, 1203 bp, Bovine  19866880749950
  misc_feature (1)..(1): n is a, c, g, or t
naaggagtgcttcacactgtggctatgtagtcacaactctgaaacagagagttcctccccatagacgcatctgtctgacagctctgaccgagttaccttgataaagtctccataaagcgggcatctttctctgagacttctgaaaccttccacactagagaaaagaacccccgaattccaaattatcccttgcacatagatgcctccatgggattgtagctgtggttgtggaaccagcttcccctgtcagcctcctcctgcccgaggttctctaattgataacgagctccttgggggagcgggatttcagagtgtaagttaataatcgttttccaaggatggcacctgactcttaataacttatcaactaccttgtgtgtgatctttaggaataaacttgtcctgtaaaaggcaaatttacaaaaagaaaaaaaaacgttttgagtctgatggtaaatgacacacatttatgatttgcacataagtaaacataaaaaacatttatgatgttttgagtctgacgataattgacacacatacttatgatttgcacataagcaaatcaacaattgtggtgaccctacttaaaaaaaaatatgtgtgtgtgtgtgtgtgtgtgtgtgtggctgagtccctttgctgtccacctgaaactgtcacagctatgaaagtgaaaatgaaagtctctcagccatgtccgactctttgtgacctcatggactatacagtccatgggattctccaggccagaatactggagtgggttccctttcccttctccaggggatcctcccaacccagggatggaacccaggtctcccacattgcaggcagatactttaccaactgagccacaagggaagtcctcacagctacacttcaatataaaagttgaaataaacaataccaaagtataaaaaataaaaataaaaaacaccatctatgttgtctaagacaacttgttgagtttaaaagtatttcagactaacagctgagtgtatgtagggcaggtgtttcttaaatccgaactcatagatgctgactttgccaagagaagcttaggaaagtatgctgtgttttagtcagtacgtcatgcctgactctgtgaccccatggactgtagtcggccagcctcctgtgtccctgggatttcccaggcaagaatactgcagcggggtgccatttccttctccaggggatctt

SEQ ID NO: 60741 - DNA, 2275 bp, Bovine  19866880749951
  misc_feature (1)..(1): n is a, c, g, or t
ncagccatgtccgactctttgtgacctcatggactatacagtccatgggattctccaggccagaatactggagtgggttccctttcccttctccaggggatcctcccaacccagggatggaacccaggtctcccacattgcaggcagatattttaccaactgagccacaagggaagtcctcacagctacacttcaatataaaagttgaaataaacaataccaaagtataaaaaataaaaataaaaaacaccatctatgttgtctaagacaacttgttgagtttaaaagtatttcagactaacagctgagtgtatgtagggcaggtgtttcttaaatccgaactcatagatgctgactttgccaagagaagcttaggaaagtatgctgtgttttagtcagtacgtcatgcctgactctgtgaccccatggactgtagccggccagcctcctgtgtccctgggatttcccaggcaagaatactgcagcggggtgccatttccttctccaggggatcttcctgacccagggatggaacctgcgtctcctgcattggcaggcaagttccttaccattgagccaccagagaagcccaagaaagtgtttagtgaaactcaaaatagttacaaaaactctgacttatctttaaaaaaaaaaaaaagcgttttaggtttcctggttcgtcctaaatgattctcagtgtttgttgttgctcagtccctaagtcatatctgactctgcaaccccgtggactgcaggacgccaggcttctctgtccctcaccatctcctggagtttgctcaaattctcgtccaccgagtcggccatgccatcccgccatctcatcctctgtcgccctcttctccttctgctttcaatatttctcagcacctgggtctttcccaaggagtcagctctttgcatcaagcggccaaagtaccggagcttcagcttcagcctcagtccttccaatgaatattcagggtggatttcattgttttttataacctgtatttagggaggtggataaggcactggtaataaagcttttttttaaataaataattcagtagccagagagtgtaaagacacccttgaactgctgctgagggttttgttttctgattatgaagggctggaaggcctgatgccccaggctgagtgacttcaccaggtttgtcctgtggttccccattgtcgcccttgaaaagaacattcccacagagcgggctctaaagacaataaacatcgtatgtaaaaagaaatgacataatagtcggagctgataagggagcttttcccaggggctgcgtgggaccgagcccaggaggccgtctgtgcgctgggtgcctggaaggaagtgtccccagggtggtggtcggggccaaggcaggctctgcacaaaggacccagaagtgggcagggccctccccgcctctgtgaaaatcaatccaaggaagtctgaggccgtggagcagtttcctgtcctctgtgtgggaaattcaaccgagtgcaagcggccacaacaatgggacaatatattatcataaacaggaaaaatagcatcagccacggaaatcaatggctggagttcatgaggcattcagaagattgacaagtgaataaattaaaacccaaaggttaggacattgaaagagaagttaattttatgtctgccctggagctccccttttcagactcaaattaagactgtgtagaataaaatgaacatgaagtctttcgatacacagaaaaggcttccttcagacctacatggtcagaaaaccagagaagcttttatgaacgtccccctgcatggatagccgttgtccacgaggcgttaacaacctcctcgacagcgtgaccaaagacttatttaatcgagtttcttgctttaaataaacctgctctcagcaaccaactgttcgtccaggaagtgatgggaccccctccccaataccctgaagaagtttattcaaccagaacggaatggagctgtgagagacacagtgctatttaatttaaagaacccaggaaaaagccacacgagagacctccaaacccccaaataattataaacaacagaacacagctaactctaaaacaggcttcagttccataaacaatgatcaatcctttgccatgccacagtgactttcttttttaaagatgtttttaaaagtatgtttggctttcttttaataataaaatgactttaattagaattcaccactgaaccttggttttgcaagaaagtgtttgacacaccaaattcttt

SEQ ID NO: 60742 - DNA, 1107 bp, Bovine  19866880789425
  misc_feature (1)..(1): n is a, c, g, or t
ntttctgtacagcagaaactaacacaacattttaaatcaactatacttgtgtttcctataccttttcttttctagtcatttcttagcacttcagttcttttgtattttacaaacacagggtttttcagtgagttggaaattttaaaatctggcttctcaccacaggtagtttgagaaaaaaaatgatacagagcacatagaaaaaggggaaattaaattctttcattatcttaataccagattggtttatttaagaccatttccagaaaacagactgcaatatttggaaaaatatcaaagagatttagagttatgaatatggttcacatattcacataagtaataagaccaatcagtgaattataaatcaatggtcgtaaaaatgatctctttaactatctttctcctttgtgatataatctttctaattcttcgtggtcattttaaagtgacttctcctccagaacacttagagcaagcgtatttattttagtgtcaatgatcatgctaataatgcctttccaaatctccttctgaagagattattaagctatggagcaattctggtcctgacattgtttacttctaaggtcagtgcagaatcagttgctaggtgctatccatgatcaaaagccttaagtccacacagactgtctcttcacgtccccttatctgcgtccccctcactccgttgcagggcacagttagaagaggctgacaaaggacttggagcgatccctcacacttatttctctaggtttggccctgatgagtatcttcttttatctatcaaaggggacttttcatcaaaatccacatcctgtacacatcctttacaataatacacagtggatggttttccacatgctaaaaacaatgaaaagaactatgaaggagaaaaaaaataaagaactccagaggtcaatagcctgatgggtagaagttcatctcatcttacactctgccctttaacatcctcagggaatgacaaggggacgaactaacagttagtgacttaatatgatggggcttccctgctggctcagacggcagagagtctgcctgcagttcaggagccctgggtgggatccctgggtcaggaagatc

SEQ ID NO: 60743 - DNA, 724 bp, Bovine  19866880800994
  misc_feature (1)..(1): n is a, c, g, or t
natattgttttatataaaatgccctgagttcgactgatcaacttcagttgccgaagtatcaaagtagacgtgtttataaaccaattttaatggaaacactatgatttgggaaagtggaaaagtatacctaggcacctagatgtctatttttcccttcattagttaatttattttgtatttaacaatgttaatttatatttcaaaatagaacaacaagggaaaaaaacattttgtactgcagaaagccatagttttaaaatgtaaaaatctcttgaaaatcctcctgtaacctatttcatattttttgtaagagagcattttatgacaagaacatggatgtggaagggttttaggtatttttgttgaatggctgagctaacgagtgaaaggcattccaggcactctgcacattggtttattgacgtgtacagtggcacagagtttggggagtggtttgacaacatcttaaagtggttagagagtggttagcaaacatcttaaaattattcatcacttttgactcagaaaccccatttctagatatttatgctaaggaaataattacagacatatgcaacaattaagaggaagaatgcttggctgagtgaggtttttttaaataacattaaaaaatgtaaagaatgttaaggtcccaaaataatgctctggccaaataagaatggtccatcatataatgaaatgcatgcaatagttatactttata

SEQ ID NO: 60744 - DNA, 697 bp, Bovine  19866880921357
  misc_feature (1)..(1): n is a, c, g, or t
ncatttgttgaggacctatgtgagcttccctggtggctcagatggtaaagaatccgcctgcaatgcaggagacctggcttcaatccctgagtcgagaagatcctctggagaaggaaatggcaacccactccaagtattcctgcctggaaaatcctgatggacagatgaagttggctggctacagtcgatgagtttgcaaaaaactggagaaccaactgagggaccaacattttccctttactatgggctagtccctgggaccaggctctttcacatcatttcactcacctggtcctcaatgcaagcacatgatagggagattaaattttcatttcgtggaagaagacagtgaagctgaaatgaactgacttgttcagattcaaacccagaatcacctggttcccagagcctgacctctctccctcaatcacacaacctgtaattctagaatccatggcagaatgttaaaatgggaaggtcatcaagtacaaagctactgggtgtccagggaaatcagaaggttcagaggggaaaatccctgtggacaggatgaaatagatctctttccttgcacctttgaacagacgggagttccggctctgtcattaacctcctgtgagcctccatggagtcctgctctatgttccttttactcatttgtaaacaagattcattcttacccccaactgcttcacgg

SEQ ID NO: 60745 - DNA, 2272 bp, Bovine  19866880990153
  misc_feature (1)..(1): n is a, c, g, or t
naatgaaatgacacctaattttaaaaagtgaaagtctctcagtggtgtctaattcttttcgaggagaaggcgatggcatcccactccagtactcttgcctaaaaaatcccatggacagaggagcctggtgcactgcagtccgctaagagttggacacgactgagtgagttcactttcacttttcactttcatgcattggagaaggaaatggcaacccactccagtgttcttgcctggagaatcccagagaatcccaccagaaaccctggtgggctgccgtctatggggtcacacagagtcggacactactgaagcgacttagcagcagcagccatggagtacacagtccatggaattctccaggccagaatactggagtgggtagccactgttcccttctccaggggatcttccctatccagggatcgaaccaaggtctcccgcattgcagacaaattctttactagctgagccaccctaattaaaaagccctaattaaaaataaccactgaaatatcaacttctccatagaactttactactaacctcaccatctctggtcagttcagtaaatatgcaggaaatctatgtaacatccctccctccatccatctatccatccttcctttcatccatctacctacagggtgagcatatatgtgcagataaatagcacccacaggtacaatatccatctccagctctattttgaaatcccacatcttatattgaaccacctgtcttctgtctcgttgaccatcctctccatcagaccatgggttctttggtgggggaacctgttctttctttagtatttcagaaatggttgtattagttttatttttggctgtcctaggtctttgttgctgtggggtcttctctaggagcggtgcatgggcttctctcgtgtggggtgaggggtctaggacacacaggcttcagtagctgcgactcccaggctctcaagcacaggttcaatggttgtggtgcacaggcctcagttgttccacggcacgtggactccttctggaccagggatcgaacctgtgcctcctgcattgcaggtggattctttaccactgaacccctagagaagcccacctattcttttttcttttcttttttttacaaaattttactacttcacaagttttcaagtcaaactcctcttttactgtaaaatgcaaagtcccccttctccctttctcacaacaggaggggtctgcttaggcccttcaagaaaatagatggaagctctgacgctccacggggttcctggttcatggtttgggaaccgctgctctactgtgtgctgggaatgtgaaagtctctgccctcagactggggtccacgcgggaaccgttggcatccttctgcttgatgtgacgttaggaaagccttccctttaatcggatgaaaacctctcattccataatcagaggaaaaacaaaacaaaacaccctcagcttgcactcacgctctgtggtaggtgtctgctctgccctttgggtcagatggagttgtggtgggtggggatgaccccatcctgaacgagatagtgaactcccctggagaggggagaagcgggctgagaagggagcttggcggtgccagaggtggggttctccaagttcacggttttgaccagggtgtggtctgctccccccgccccgaatgctttgtaactgtttttggctaatggacatgaaagtttgcataaaataggcttatttaatgaagactgcccttgatctttttccaggcccacgatggaaattttcaataagaaaaagtctgcttaataaatgcatttggtaaacattaaattgacttcacccctagtattttttttttttacttttatgtagctttccacaataagttccatctgggaaaagccacattttccggggggtgggagtgaatttcttttcttttattccccggggtagtctgtgaaatcccgtctctctggttcctttgaccttccatgagatgatggggtgatgagggtgctcgtgatgaatcagtagcagtttctgcacgaatattcaatttttaataccgacagttgatttcttgaccagagtgtgcccactggaaagggcaggacctgcagtggattaatgacctaaaatcagtgttcagttttcctctctctctctttcttttttatgttaggttatctcttgaagaaacttagtgtgttagttgctcagtcgtgtccctctttttacgaccccaaggacaatggcccaccaggctcctctgt

SEQ ID NO: 60746 - DNA, 2985 bp, Bovine  19866881038590
  misc_feature (1)..(1): n is a, c, g, or t
ncgctgtaggaaaacccaaaccactggtcctcacagtaggctgtcggtcttcctgcttcgataaatgagcgaaaaagagagcaagcccctgtctgctggggggtaaggtcggggtgggaggaatgtttctatccaggggggctgcatgcccggcctcaggacactgaacgacaggggaggaggaggaacctggcagcttgtggtctggatgggggctggcttgttgattagagacctgatacccgtggctgatacgtgcattttagggttggaacaaatcagcaggaatatgcctgacgggatgagaccccgtacgtcgcatagtaatctacgatgcacggaggttagcacttggtaagcacttggtaatgaggccagcacttggtaagatgccatgaaaggtaaaaatcacatcccgtcctcaaggaatttccatcaaaaccagaaggacaaggataatcctaataataccaacaaccctgccaagcatccccgggttgacttcagtctcaaagaagtgtttcctagtctcctgtcctccaatctgacccccaccccaactccacacgccatccacctgcgctgcctccttcctccagggccaacctccccctctctgatccattgcagcccccgagaataaaagcaggtgcccaagatgcttccttcgaagtgaaaagcctttcttcagtcctcccctcccctcctctgccctcctcttctctcctttccaaaagaacactcagcttctgcttgcctcagcctctcactttgtctgcagcctgaagcaaggggtcttctgcccgccaccaacccactacacctgcttttgcaaagcagaggtttccagttgtcacctgagtgggccctttagagtctgcacccagcatggtacttagtacatttgacgtctgatccccttactttagactcatcagctctagcctcaaggtgaaaatcgctacctcactgtgtcacttggcttccaattttgaaatcataatccatccttcaggcttccaccagatgaccttcccacacctcagtcgaaccacggagcacttccagggttaccatcagaagataatgtcaagggctgcgggtgcccatccattcaacagccaggtgcccagtgctggactataccaggcatgggcagtgtgggataacagcccagtccctgcccccatggagcttgcagtccagaggggaaggtagtcaaggagcaaggagaaggaccaagtgtacgcgctgtgatgagggttaccagggaaacgagggctctcacagaaactccaagggtgagaaggtgacgttcaagcgagaactaagatctgggtgatgactcagggaacccagcattcaggatcagtgaagtccctccttcgggagggtgcttggcccgtccaaggaagggcaaggttgaaattgctggacaagaagaggaaagaaggcaagcaagaatgactgaagtaggcaggggcagatcacgcctggtctcggaggccagatcaggaatttagactttattgcaagtgcatctcaaggagatggtgagggacagggaacctggcgtgctgccgtccatgaagtcacaaagagttggacatgacaacacgtgcaaaggtaagcataataagcaggggagacacaaaagctaattttgttttcaacagccttctgcttgcatagtgacacatggaatgtggaacagagcagaaactagctaaaaattaccatcattttccaggcaaatgacaacagcctgaactacagcaatgtccatgaaaatggaaggaaagacacacattcagaggcttggtgaacaagaggaagggagaggaagggatgaaagaggaggccagcgtctctcactggatcaagccggtgggtgggaatgccatcagtgagacgggaaagatggagaggaagagactggggtgggggtgggggcgcagattaagaattcagccttggctatgttaatctggagatgtggagtcagagatgttttgtggataattagaaatatgagtcagaggagagatctgactggatatgtaagtcatctacacaggaatcgtatttatagccatgaggacggatggaatcatccagcaagagggtggcaagtgagaagaatgtgcagaacaaagaaaccccaaacattcaaagtgcaggagaggaaaggacacccaaaaaagatggaggaggaggtgccaatgagaggaggaaacgggagggtggtgtgagaggagccagaggaagagactgtttcaagaaagaggaatcatcctacacgccggtgagaccagggtggggaattaatcacttgagatgggaagagaggtgttgagcaaaagacatctggaaatgtacagctaaatgagaaagcctatgaatagatgatttgggaaggtaaacccacaactagtcagttacatatgaaatatacagacccttgcaaagaatgagacatccagattaaagaaaagcattttttaaggtggatctaaagacactgaacacaatgattgatgtaaaaaagcagactgaattgaaagtattaaagataaggctgtttcagactttgttaagcatttaaggatagcagctcctacaacagcaggggctgctggctcagatggaatctgcccgcaatgcaagagaccctggttccatccctggctccagtattcttgcctggagaattccatggacagaggagcctggcgggctgcagtccacggggtcccaaagagttgaacacgaccaagcatctaacacgcacacatatatatacacgcaatgagcaaaaggatgaactagaaagatacatgcccagattcataagtgctgtcatttctggagagatgcaggtgatgggactaaaaatgggatttaaaaaaaatcacaacagggattccaaacttacctgtaatgtcatgtttttatttaaaaaaattatattaacaacagcaacaa

SEQ ID NO: 60747 - DNA, 1045 bp, Bovine  19866881337799
  misc_feature (1)..(1): n is a, c, g, or t
nccctcctggcgattctggttcctcgataaagtttgagaacctctgggtgagaatatactgtaaacatatgattaaacacacatgacaatttcccaattttgaggtcaaatgaatagctcgcacacacttggttctcgggcttttggcttcctttaaaggcatcacttgggagcctcagtaccacacctcagaccaacttacatcaggagtgctgggagaagaaccatgcatcaatctttaaaaaaaaaaaataaatatatatatatatatacctacccagaagtttcattagaatagaacaactctgatgattcaaagttttttttaaaaaattatgatacaaataggggcttcccaggtgactcagtggtaaagaatccacctgccaatgcaggagacccgggttcgatccctgggtcgggaagcttccctggagaaaggaaatggcaacccactccagtattcttgcctggagaatcccatggacagaggagcctggcgggctgcagtccatggggtcgcagagagtcagacacgactgagcgcacatgcacacatgatagaaatatgctggtttgccctctgttccttgccccaaacacgtaaaacccaaacatccccttaaagatggttcctgttttattctgaaaattataaggcaaagaaatgacagtaaaacttgtgtaaagacattgtacatgtacagggactacacgatatacttgcgagcatgtttacaaatgtagagcttcaagcttgcatttttgaaatttgttttaaaccatctagtcgtgaggccactgaagcgtatttttgccatgacggaatgtatttctacacaaacacacatttttgtcaatagaatataagacttttatcttttcaaagaggtcaagtgttaagtcagaaacatctttcaaaggaaatgtgataaaagtaatgtcaaattcaagcaagtgatctattccagaacaaagtatcccgttttctctcttcaaaggtttctaacaagtaggtattaaacttcatcttaagtttaacaca

SEQ ID NO: 60748 - DNA, 1538 bp, Bovine  19866881371541
  misc_feature (1)..(1): n is a, c, g, or t
ntgtgacctgttcagagtctcctagaccttgctagaaaacagtcaccatgataaggcttttgagaagctgtgctgctctctgcattagggttatgcattattaaaaggcatctcattacaatggaaattatgaccttgtcaccaatgctataaatgtcaagaaataccactttcaaagaatatattgtcttgattataaaaagaaacctctttgcttaaaaaaaaaaaaacttactgttttcattgaaatctttttataaaaaagagttgtaacgaatcatggccatttcctaatcatggctagctccttataacatacatacacacacacacacacacacaaaatacaagacaacattgagaagtctgaattttcctctgtaaataatgggcgatttgccaatctaagtactattaaagactatatcatctaaaaaaatagtactcttcaagaaagaagtactctccaaaccttaacatttacacaatttttgttgtatgtggagaaggaaatggcaacccactccagtgttcttgcctggagagtcccagggacgggggagcctggtgggctgccctctacggggtcgcacagagtcggacacaactgaagagacttagcagcagcagcagtatcattattatttcatttttttcttaattactattagtttcttaattgctattacactactatttcttagttttttagaacagatcactttttaagaacctaaatgtctactttggcctcagagacaatattggtacaattgataacattgattcaataccgccaaaataatatcagtggggacttccttggtggtccagtggctaagactcctcgcgccacacgcaggggtcccaggtttgatccctggtcagggaactagatcctgacatgccatacctaagagttcctacgccacaactaaagatcccacatgctgtaatgaagatcaaagaccctgcgtgccgccactaagacccagggcggcccaataaagaaatactgcttttaaaaaagagggctagaggtgccagttgaaaacacaaatgtgccccacttccaccggatcaagatctctcggggtagaggaggaggagtcacttggatagtttttttttttaagaggtcccgggcaattcagtaattatctctgcttgagagagtgggtctccaaagctacggagacacgccacacccctcgtttggcggctggagggccggtagctccaggccggcacggtgggactggagctgcccacacagcagtgagcatccatttagcttcaggaggtcttgctttcctattagcgactcagcatcccgctgccactcttagtggtggaaaagaggggatcagcaggcatgagaagtgtttcggatcctttagttggagggcagttgttgcaaactgtttgatttattatttttttttttaattggaggaaaactgccttacaatgtcatgttggtttctgctatacaactcgaatcagcctgaagtaactcagaaagagaaaaacaaata

SEQ ID NO: 60749 - DNA, 919 bp, Bovine  19866881442874
  misc_feature (1)..(1): n is a, c, g, or t
ntcttggctggagatgctgtttgaaaagttaggttgccttgtatcagatccttttctggaatctgttcttcaagttaacctaaaggagactcttccaaacagtgcagggggatgaaaagcccagtgacggtaatccgtcctctcctgtgtccttgaggtgatggtgactcacgagaaggtgtgttcctgcaggtcatcctcggtgaggcagtgatgctgccaccccagtggctgggggcctctctccgcatcccacatgatgctacacacagattcttgtccgttgcgttccatgcaggctgcagtgtttcccacattcagcaatcacacgcagccaaacctcgtccccacggtgcagagccaaggggcccggaggaaaggaaccatcacaggctatcttccatcgtccgacaaaacgaatggtgacttcctctttgaatgtgacacgcgtgctcctggaaagaacatgcgtggtgtcatcttgtcttttcctgaccacagtatggaggaatccaagtcttacgtgtgtcactgatgacagtgagatttctgcaagataattaaaggagttggtggttaccttttcttctctccactgcaaggagagaagttaaaaggcagagccctggtctcgacaggagaagccctgcgtctgctcggctaaaaaccttctgctgcaagaaactctggaggtcagtctggcaagcatcccagacactcagacttcattttttttcctgctgtttttgagctcagcgctaactactgttagcagacagagagctctctgcaattctttcctcagaactagctacaagaaaactaccaattatagccaagaaacagtctttcaaatacacatacacattgtaatgtgggcggaaaccaatggaaacgtttgattgccctttaaggccag

SEQ ID NO: 60750 - DNA, 747 bp, Bovine  19866881446785
  misc_feature (1)..(1): n is a, c, g, or t
ncgctacataaggtatctgcattctgtagatatgaaaacagacaagaggtggtcccacgacttcactcacagacgagcaaggcaaaaaccgaaacctcctggcttctgatctcatgtctttccctcgaatcaagctaaggaatgaaactttctgttgacaagaaaaattcagtcctggtcccagaacaaatgttaacattagaaccaagttgtaaattagccgcatggtcagggctggttacacagcagtctctgttttacggccaggtcacgtgacacgctgactagtctgcctttcccatgatgatcctccgtaacgatgaaccagaaaagggattttgttcaagtataatccatctgacaagtgcaaataaatttattcaattgcctatattctaaaactcccccagcaataccaccatcacataaataaaagaagccaagttggaaacaaacctgtaagttcaggaacgctcaatgcttcagaaaatggtgattttaatatctgaccaaattctgagagtgagtgggagtaggggacacatacacacacaaaagaccatctgttacttatttaagcccttcttagacaagaatatattacttttcagggggaaaatattgttctttccagaggaataggaatgtgatataaacaatgagatgagataaagctgtttatatcaaaggatgaatcagattataacactgaaaaatagtacacatttcctgttattgctgctataa

SEQ ID NO: 60751 - DNA, 1041 bp, Bovine  19866881772087
  misc_feature (1)..(1): n is a, c, g, or t
ncttttaaaagcaggctataaaatgcccatgtatctttatgaaccctcctttctaactagatagagatactcttctgataatttttgattcgataaaatctagtttttctctgagtcaaggggggaaaaaactctgggcactaaaagcttagatataacaatgttactttttctctgtaaatgattaaatgcaatttcatccatttagttcagtcatactatgattgtggtggcattagatgatgctggttgagagatgcaaagaaaaattaagtagaatgaggttagcaatttatttttaccttctcccagttaaaaattcccaatacattcaaatcaacaataattgcaaaactgtctcctgaagtagaagtagattttactcccaagtcttagcacttgttgtatttcaaagtcagccactaagccttttaaagcttgttggtgactagctgttgcagcagaaatcagaatattaatcttgaggctttatttcagagttcgtggccaataatgaggtgtcatcaggtcagaagactttcagctgtgccatttctcaaggttggggacggagggagggcaggggacacctctagaattaggaccacatgccctacattccttgataagaaggtcctgaggaacacagacattagttttcactgtgagattaaatataacataagttgaaattactcttgagttattttataactgaacttgctgtgaagtttaccgtctgaagtttccattggtactcacatcttaaaacagggttttcccagacagcttacatcattcctaactcaaggcaaaaatcctttcgtggtggaacatataactgtattctttttttttttttttttgaccgagctgcatggtttgtgggatcttagttccctgaccagggattgaacttcggggtctcatcaagggagaatgtcaagtcctaaccactggactgccagggaattccctcttaactgtattttaaagtttagccccattttatttttttaagtttttgctggagtacagttg

SEQ ID NO: 60752 - DNA, 2076 bp, Bovine  19866880633856
  misc_feature (1)..(1): n is a, c, g, or t
nggttcccctgtctggagggggtcttatccttctgttgctgttttcataggcactaaacatagagttcagagtccattggaaaggtggccgagcatgatcagcataaacaggcctaagaaggagtccaggccctatgaattcctccttcaacttcacaggatagcacttcatcttcttaaatgccttaaattccttcttaaaagcctaaagagctttaaaggactctcattctttcataatcaaaaagcttaaaacttatactctaaaattatttctgcaaaatatgtcaaaagcacatttgtcaaatatatcccattgtagagtcaagcattttggaatgcaagaaggtaaccctaatttgaaaagggggcagggcttactgacatgacacagaatgtcacagagtacagtatatttttaataaagttttttagcatctagaatatgctctcacttattggtaggattaaaaatatagctttacacaaggggaaaaaaagcttaagtgctatttagggaaactatatggtgtgctgtgcatttatacagaatcagtacaatttttctttcatgcctgtgacattggtcattaatctttgcaagcagccaagcggaaatctgaggtgtcatccacgcatagcgttatattcatagactactagcagcacattttaaagttcagtttactgaatcattgagcaacttactttctctcaaagaagttcactttgatccatacctgtcaaactggcaatgatcagagatctctactgaattacttttagcagcagaatcatttttcaaagcaagaaagcatacaaatgcattttgaaaaacccttaaaaggcattaaatttgcacagaaatggcatcttaagtgtaataagagttttagcaaatcaagatccaacttctttttgaggatcaatgggtgcgtgaaagttgctcagtcatgtccatctctttgtgaccccatggactgtagcccagcaggctcctccctccctggaattctccaggcaagcacactggagtgggtagccatgcctccttcaggggaatcttctcaacctagggatcaaacccgggtctcctgcattcaagcagattctttaccatctgagccacaatgcaatttcttaatttaggaatctagctggcactgctcagtaacatccagaaaggtctcaaagaattacatcaatttcatgatagttgaatacagccaaacacatcccaaagtgattgcagaagagttgtcttagacacacatggtttatatatgtcttaattattatttttaaaaaatgaaagatattcagaagacctaggtgtaaatctggtctcatcttttgctagctgtgtgatcttggactcagaatatacctctcataatcatctagaaaataatatagcttgctccaccaaacataagaaatgccaataaagttaaaatgaaattacatatatgaacatgaaattccagtcttaaatgcttgttcaagagaagacttgattatcaccctgctacatttttgcctcttcaagtgtcactttccatagtatttcaaggtaaaatggtctgttccacaatcattcctaaactagtttacatacctacttctgattcctaagtatgactctctgtcttgggctccactgcatgtattatggtctcatcctaggatccttctataaggtgatgctcctgccaaagtggacccagaggaaggggttgcacttctctgcttccctgtccttagttttacaaataactaatgcaaggtgtttgcatcagcagattaagaaatattaggcatcttggaggagaaagtacaacatactgtggcagagggaatgagtgagttttaaaccgattcagtgtaccttggctcttgcaagtttatcatagcaacacccattaagaattttccttcaggctagacatctgctggatcattgaaaaagcaagagagttccagaaaaaactctatttctgctttattgactatgccaaagcctttgactatgtggaccacaacaaactctggaaaattctgaaagagatgggaata

SEQ ID NO: 60753 - DNA, 1797 bp, Bovine  19866881144666
  misc_feature (1)..(1): n is a, c, g, or t
ntttgaaaaattagttttctagatatattctatgacttgggaaaactgaaaaatcctgactgtcatgtcaggatacatgtcatgtcaaccgaccatgaaagaaggtcaggaaaatactcctcttgcaattacattctcagtattaagatgacctcactgcctctagaatggagctgtgaacttggccttgactgtatagtgccactctcattacgactagtcagtggccagtctctctcaatctctgcccataacagatatgaattgagggttcataggctacattaactctattccaaggaaaacaagttaacctttgtggtcagaggtggccttgctcagttagcagagggtattttcatcagtaatgaagataaaatgtcaagatatcaatagtttttgtaactattatggatgggtaactctctcttattagacgtggctggaaatgatttgtcttccataatagagaaggattacagcatgccagtaaatgatgctgttgggaattacttaaaatagttattccccttggaagttcaatgcctgaggctagataaaaatatgttatctacccatattttaactctattttaaaagtaacccttgtaaatctaggatgttcttatacttcatcattgagataaagtcttatgtttcaatggtaaacctaatgaaatgaaataagagtttagatctttggggtatatgttaatgttaataagcaagagcaaagcagtatttatttgtgcatccgtatatgctcctgtgcgtgagagaatattcaaatatttcactataacaggcctttagaaattagtgagataaagatatttatgaataaaaacaagctatttccttttttccttactttgttttccttgctaagctgtcttcacttttaatgataagtaccaaaagcctgatccctggtagaagtttcctttatgggtttcttttcttatgactaaggaaaatacatttctcataactaagagcacttcttgtggagaagatgcttgagagtcccttggactgcaaggagatcaaaccaattaatcctaaaggaaattaacccagaatattcattggaaggaatgatgctgaagctgaagctccattactttggccacccgatatgaaaagctgactcattggaaaagaccctcattctgggaaagattgaggacaaaaggtgaagaagtggcagagaatgaggtgattaaatgctcagactcagaggtgtctgactctttgcaatccatggactgtagcccgcgaggctcctctctccatgggattttccaggcaagaatactggagtgggtcatcactaactcaatggatgtgaatttgaacaaaatcagggagataatagaggagagaggagtctgctagagtccatgaggctgcaaagagtcggacatgacttagtgactgaacaacaagtaatagtaacaaagtgtctctttgtcactattcaataatttactgagaaaatgctagatatgaacaaaaggtaagtttctgataatctatattcagttatttatgagtagcaaaaaattcaagctaaaataagagaactcatttatttttttcaaacatccaaattcaattacctataaagtatccttttagaatatggaaaatatgattcttggtcatatataaatagtttacaatgaaatgtcctggagatatcagcaccaagcataggatttgatctggtcaataagtaattttaatgtcgtgacacatctggtcaaaatagttccttcttcaaaaggaaagcaa

SEQ ID NO: 60754 - DNA, 1182 bp, Bovine  19866881609990
  misc_feature (1)..(1): n is a, c, g, or t
ntgtttgcgtttgccagaattagaagaaaagtagacaagaagaaaatttttcttttcttacccctgctgaaaagagtgcgtgcattttcaagttttgctgtgatggataattcagtgtgccatgaagtcaaggaaacaacaaagagcaataaaaagcagtggcaaggaaaaatacccagcccaggtttctgccttagaaagaatgacaaaaataatagaagcaaaggttgcatttgtcactttcctaacatacagcacccatttcctgaggggtgtatttttgcacacattaaggacaactctgtgttaaacctagttgtatggaagtgttgactaagattgcttgagcatcatacctcctcataaaacaagaggctgtcccgagagctccagacatctaaataaggctgcagagaagatattatatcaagcaggagacaaatttggtttagtttgctctgatggagggtttctcaggagtatgctaataaggaaatttttatcagaaagcattcattctcataaaagctattgtcaggacagctgttaacagcattagcaacaccaataaaattaagatgctctcctccttaggtttaagagctgaaaaatctgcctacctgagctggactcataagtatggaccaaaaaactgcagtaagctactcttgtgcaataagcaaaaatgataccacacaaatcattttcagaggctttgctgctaagtacctattacagctagacatagggcattaaggagcaatagaccatgttgctctggcccatttatgctgtacacacggtgtattcattgttggtatagtagtaacccaccagcatgcatcaagctagaactaccacataaaggcatggactgttagaagtggttatggaacatgaatggaggtgcgggcacacgggagttgtaagagccataaatgcaggcttgagaccagaaatcaaagtgaaacagagtgttctccccatccttccctcctttattcctgagaatcattaaagcacttaagtagtacagaaaaccagctcacaggagagactatcacaggagaattccccaaaacagagccgcttccctaactcacaaggaacagcgctgtctgatctgggaagaagagtccaggagggtcagagaaaccagcagcaatgcaatcaatcctttca

SEQ ID NO: 60755 - DNA, 842 bp, Bovine  19866880548171
  misc_feature (1)..(1): n is a, c, g, or t
nctgtgggtggtctcaacttgacccagagctgtaaataacatttatttgtgggtgattcttggatttatagccctgagctcagaccagttctctgaactccagactcttgtattccgctgcctgctccacatttccacgtaactgtttcacaagcatctcaaatttactatgtcccagaatgaactcttcattccacctcttcagtctatggtgctcccgtcttacccatctcaataaatcacaccttcacccaccagttactccatccagaaacctaaatgacatacttatctcttctttgcactcaacctcggagttggtttatcagaccttcctgtctaaacatctccaaaacctatcttgagccagtccacttagctctactgtttctcctctcaccatggtccagctctgggagtggtcccaagcttccgcttgcagaaggcagctctaacctgtgcttacatagcatccaggaaaagtgtgacatctgcataaaaccctcagtggtccctgttgcacagctcacacggacctacgtggtctggctttggcctttcttccagccctccttctaatgtctggtccctgcccttgttcctcacacaacctgtggctgctcccctccttactgctccattggtttcatgatggatactcagtctctggttactgaccctgacacaaagatcgtgagaacaaatgtttgccttgattgctaaatgtctattgctgtgtgccagatcctggaggaactaagatgaatcagagaaagtccctgccagacaggagctctcagtgtggtgaggacacgcccatgtacacagagaatatttaccat

SEQ ID NO: 60756 - DNA, 1461 bp, Bovine  19866880719351
  misc_feature (1)..(1): n is a, c, g, or t
naaaaaaaaagaaaactctaagcagagggtgacatcggtgtggggaaggtctaaatctttctccttactaactttcaagctagagaattaatgggctgttgagcagtcactttaaaagaattaaaattagacctagagaagaaagaaggagtctttgctgatactgacagtcacctacatcaccagtcgctgggatttaacactaatacacattggtcgctaacaggggtggttagacctctgctgacctctcacagagttcttgagtttctacactgtgaaaatctacttgcatgctcttttgtttccagattcccaccctggaatatttaggataaacacccaggaatataccatttctcctggtatgttggtactttcctctttttatcttaaccatgaaagtttgttaaatgaaagcaagctaaacatttataaaccttggagaaaaatagtgccttgaaatacatggagtaataatcttttaagactatttagtgttttctgtacataactgtacataccttcgcaacatttttttgaccttgaaatgaataagtttcaattcctttgccttcatggaaagaagtagaagttttcagaaagaaacaatttctaagagggataccagcagtcagagaacgagctagatactgaaattgagtttcaaaccctctggtgacgatgctatttccaatataggaaagcagaagacatttaagagtgtttggtatgaaaagtaggcacacagaaaattaaaatttcttggaggaaaaaagttacaaaaattgactagatttgcagcatgcagcttgacaattatgtgcataccaaaagctcctgacctgaggtttatagtatttttcatctaaatggaatttccctcacttcactgtaaaaccagatttgaacttcctagatgcatatttttaatgttttcgaaaacaccggggtcggtgcaaactgatagctttgtgctgctggtccgggacacagctgaataaccaaggtactacttcttcctgctcgttaacccctctctggggtctgggtgggggtgcctcggagaagggggcatgagagaccagcagcctgagggtttgacccaacaccctgccccctccagggcctctggacccccacctcccgcagcataataccttcatttattaaatatgcgcctggaaagtttccccacgagctacattcactcctgtccatgttttatagtggtgggtgtagggatgcagaggaattcgccagagacccacctgaatgaggactttaaaaaacatccccagacttccatctgatttttaaacgtagattttgggaatgagggtgaagcattaggaaatcaacaggattaaccaaattcactgctctcttattccttgtttttattgcacttaagggtgttttgtctcattaagaaccggctagccacctaccccaacagtc

SEQ ID NO: 60757 - DNA, 2288 bp, Bovine  19866880769517
  misc_feature (1)..(1): n is a, c, g, or t
natattgagggtctatatgtcttagcaatagtgatttgtattgttattattatgacacagggcgattagcaaagattaaccacaggcctacttgttgcagtataagtcgtaagtggaatcagagttatcaacataaacacacggtttttaatacattatgttagtattcatgtatatatatttgttataacacatatgcacttgtatacacagtgcttatgtcaatcatatctcaataaaactggaagaaaaaataaaacctatgattgtgggaaacaaacaaagttaatgacttgcaaaaaaaattgaaatcaatccaaatgtttcgtttttttttaatatacaagcctgaggtctttctctgtatcttctttcctcaacttctttatgggaaagttgaccacaggtagctcttttttatattaagtgtcatgaatacttgccctggtcatactatattggacttggggctgagccatgagagatcaaggtgaacttatataagacagtcactttggaggctagctttctatgatgtggtttgactccagatggtccagtatgcatgctccatattaaattatgtaaaaactgatcccaaacagattgcttctctgaagaactgtaagacagggtagcagggaacaatggatttctgcagcaagagggagaaaatggcccagttgtgagaggtggaggtcttttgagttggtcttagatattgaagatgagccgctattccaacttttcttgaagcctggtccccagaatctatgaacaactacaaaggcagttttattgattcctccaatcttagcttttatcacttaagtaaaacagctgtggatcttctttgccaacgaaaaatgcttagtataaataaaggattatatatagacttacaaatatatttaatgaatatgagcataaaagtaagtataaaacttgataatttttcagaaacttcatatgcacagaaggggatcagaaagggcatacatcaaagtgttaacaacatttgcatctctgagaatattgacctttacctttatcttctcccttttgcttgtctttactttctgatttttcaacaaatgaaataagttgctcttattaaagggaagatagtttttccccccttcatttaaaaaacaataagttctgtctagctcagggacaagatgtcatagattcacttttccctgctcctcccctgtagctataactaaatgtcctggaactaattcatcagacaattctaaaacaacttcgagaggtgggataaaaaggcacactgcctggagacctcaagccgtgtggaacatcagagtgtatctctcctggtgtctttccatgacccataaagactgggcagcaaagaggcctgcaacctggaatcacccccaggcatagacaaacagaagagcctgctctctctggccaaagaaccataagaggagcagtccagcagagatctactgggggagatttgcctcaacctatgcccaagacaatggcagtctacatgagctgtagcagcattcatagctcagtgcttccagaaccaaccatccacttaacttgggcagctcgacaggaattgggtaagagggaagcagagccagaaggatgaagtcaaccagaataacatgcacaggctccaaaaactaaattttcactgaaactacagctcacaaaaataggccaggacctaaatctaaatagggtaactgcttctttgaaactgaaataagatcaaatgtttccaaacataatattcaagaagcccaggacataagcatcactgatatgaagaagcatgaaaaatacaacctgagtgggaaagaaagaaagtgaagtcgctcattcgtgtccaactctttgcgacctcatagactgtagcctaacaggctcctcagtccatgggattttccaggcaagaatactggagtgggttgccatttccttctccaggagatcttcccaacccagggattgaacccgggtctcccgcattgtaggcaccagggaagtaaaaggcagtcgacggacacaatatggagatgaatagggtgatgggattacctgacagggatttcaaagcagcctttgtaaaaatgactctacagaaaactacaaattttcttgaaacttttgaaaaatagaaaagcttagcagagaaatgtgttttaaaagaaccaaatggaaattatagaactgagcaatacaaaagttgaaacaaaaaattcaccaggtggactcaacggtaagtggagataacaggatag

SEQ ID NO: 60758 - DNA, 1864 bp, Bovine  19866880921107
  misc_feature (1)..(1): n is a, c, g, or t
ntgggagagggaggacagactgtaggtcctgaccaatattccctcctctcaaatatcagtattaaaaaaaaaattctgccataacatggatgatgaattcatgtgagatttattctgaaaggtgaatggatttgagagctaccatcttctgatggattttttttttcttttaaatgtatttattagctaaaaacttttttatctgcgctgagtctttgttgctgtgtgcgggctctctctagttgtggggcacaggcttctcactgtgttggcttctcgtgttgtggggcatgggctctaggcactcagggcttcagcagttgcaatgcgcgggctcagtagctgtgacacacaggcctagttgccctgcgggatgtcggatcctcctggaccacagattgaacctgtgtcatcgcattgcaaggtaaattcttaaccactggaccaccagggaagccctgacagattcttaatacattagaaaaaagattttaatacgggtctgttaagagatgatttttgttctataaaacaagttttaaagtgatacttgaactctttcattcaaaaattggattcaatgtctctggcaccctacactgggccttggatagttcactgggttaaaatcgagatcatttactggctttactttgaattttttgctttaatattaaatatttttcatctcttggaagctccacatctgttgtggataggtaggtaggtgtttatcttttgttgtttctgggtggtaccttctgccgcctttgcacgctgtgactttttttttctgggctccaaaatcactgcaggtggtgattgcagccatgaaatgaaaagacacttgctccttggaaggaaagttatgaccaacctagacagcatattaaaaagcagagacattactttgccaacaaaggtccgtctagtcaaggctatgatttttccagtggtcatgtatggatgtgagagttggactataaagaaggctgaacacagaagaattgatgcttttgaactgtggtgttggagaagactcttgcgagtcccttggactgcaaggagatccaaccagtccatcctaaaggagatcagtcctgagtgttcattggaaggactgacgttgaagctgaagctccaatactttggccacctgatgcgaagagctgactcatttgaaaagaccctcgtgctgggaaagattgagggcaggaggagaaggggacaacagaggatgagatggttggatggcattacagactcaatggacatgggtttgggtggactctgggagttggtgatggatagggaggcctggcgtgctgcggttcatggggtcgcaaagagtcagacacaactgagtgactgaactgaactgaactgaactgagcagttaaaataagatgtcagtgttagaatcagacattaaccccgtgacctgcctgttatatactgatcataactttgttttgcttgaatttctgaggtgagtcaaagcagatatatgtacagtctggagatggctgtgtataaactgaaacatttttgctcacaattgctgataatacattccttcagatgaaagcctcaaagaaaactagacactgatattaatggaggggatttctgaaaagcttaaggggaattattaaacttttgtactacttccatctacctcttattctgtaacctgttgcgggaggggtccttcccagcttaagtgcatgatggtgtcatttgctgtgaagaggcaccagtggatgaaaaatgaccgtgctttgtgtttgttaacactgaaatattctaaaataagcacttgcttcattagcccattagatattatgtcggcatcaggaagtag

SEQ ID NO: 60759 - DNA, 1400 bp, Bovine  19866880998498
  misc_feature (1)..(1): n is a, c, g, or t
naatttcagagacgtattagcaaagaaactttcagaaatcgccaagcctcttgaaacctcagtttcctcatccgtgcaatggactgatgaggaagcagctgagccagagggttgtttagagaactgagaaaacaacttgcagtaactgcacctcctaagtccttagaaaatgttcatttctcctcacccaccccttctcctatctctgacaaatgctctttttcttatttatattaaaaaaaatttttttgaagtatagttgattaacaatgttgcacctgaattaatttcaggtgtgcaacaaagttattctgtcatacatatgacatacatatcacttttcagattctttccccatttaggttattacacaatattgattatagtcccctgtgctatggagtaggtccttgatggttatccatctatgtatagtagtgtctgtatgttcatctcaagacaaatggtctcttaattattgtctgtgcttacctggagctggttctcacttccacaatctgggggatcaactctgtaatatcaaacatctgaccaagaagtgaaaatttcatcaatcatagctccagctctcagagttgaattgtgcctaaactatctgattcttattaacacatgctcatgtgcagaaaaattttatttctctcttgatttgggtgtatctacctcacacaggttttaataggttgatatattcatttgttcagattctatgcctgaagcaatgtaccagagattccccaaagtagatactttggggtaagttaagaaaattatcacagtgaggtccctgtgggaccctggatatacatgaccagaagagttaatgatgcaggaaatggaggattctacagcctcatagggactcaagcagctgtgactaatacactcctatatagtggacaccaaacaaatactattattaggaaatcttcagtttactagaatatttaggaatggaattttctgattaatttcatctctgtttaactgcgagtcaactagaaaaaaatcttaacttttgtttgacctttcttgttaaaagtcttcctaaaatgtaagcagaaatcatttctagacagtgttacaggctgtctatcctgagaatacatttttctcagaggagaaaggcagcacagtgcagttgccagacctagaagctacatcgtgtgcctttagctacatcactttgtctcgctgatctttgtttccactaagatatattcaattgtctaaaatgtgatagtcaggcagaagaattcaacaaaaatagagccaaacacatgaatgtctttgatagctgtggctctagaggtaaaggacccacctgccaatgcaggagacataagggacatgggttagatccctgggtgggggaagat

SEQ ID NO: 60760 - DNA, 1049 bp, Bovine  19866881058219
  misc_feature (1)..(1): n is a, c, g, or t
ntgttggaatttgtagcggtttgtttttagacatgtgaagactgaaagatcttgcgttacaaacctaatggaacaaaaattgtttaagcagtgaaaaccaagcgaaatgcatgaagctccttatcctgggtctctccctctcggaactgctctgggtctgatgagaacagtggagaaacaccacacttcaagcagtttatctcttttcaagtgttagatgttcaggtggaaacatgttttactaaatgtagtggatgtgatttttttaaaaaattatttatttttaattgaaggatccttgctttgataccacagattttaactcactgttgccttggtgaactgggtatttctcacctggacttaaggcttaaactgtgaactcccagcagggaggatctaggattagtcacctatgtagatttccaaaatccaaggggagaaggagatgaaggaaagatcaaggcttcttgtcaacaggtgcctgagtttagattgttcagtaaataaacattgtctttctgtttgtttctttaccccaaactattgtttctaccggcagcctaaaggaaaacgaattacttatgaagggtttgaggtgtggccagcttgtaaagttagcgcagcctccaagctcactgaaggaaacagactcaccaagaagtacgtcctcactgcgcatgaatccaagagttgtattttcatcttattattttaaaatattcaaagtttcgtcaaacatggtttctctcaggagttaagaacaagcccctgagagctgtggtcgtcacaaagttcaaggatccggaatgtgcgggcagacacaccatttcatctttaatggttcgtctcagccccactggggcaagttcagcaactgcttttttcttctcttggaaatgagcctctgaccagaggctgtaatgaaagcagtgtatagtttgctgagtctttcattcaagagcacaccaaaagttataaataaatcccctgcccccctcgaacatttagcattttgatttgaaaatgctttcacttcaaaactcaag

SEQ ID NO: 60761 - DNA, 929 bp, Bovine  19866881508108
  misc_feature (1)..(1): n is a, c, g, or t
ncttttctctaacagtaatggagacagggcaagtggctggaagcaaaggagagactcccagaatgtgagaaaggagaaaaagctcttatgtgggtaccgacagggagaagtaagcctgggtttctcatgatgcttaccaaatggaccagaattatttaacaagagtgacttctgcagctggccacatgctgggttttgttgggcttttaaggcaataagcaccaatatttatgctatacttaacaatttacaaagtgttttcagagatattatgtcatcttccaggcaaggaaaattgctcagaaagagatcaggctttctcaagatcccaaggggaaggaaccaatcccaccaagggactggaacctaaactcacaaccaggatcttctaggttcaatcctgtggccttcatcaatacaccgctgtgcctgcccccaaggaacagataacaccactggggagacatcagcaactcaaccaacgagggagacatttccaggaaaaacatctccaaatatataatgaaagccgatcagaaaagaggaatttctgctactcttaaatgacaggtgtgtgtcagacaacgaaagcaggccctgcctatgataggactcgcccgaggagtaggtaccttaacacatctgttcacctgaattctgtgaggtcagtgggtggttttacaacaagagagaccacgaaaaaaggaaatcaggaatctggattctaatccagtgtcatcaccagctgcttgtctacaccgcaggcaagcctcttaaccttcccgggcctcagtttctttgtctgtaaaatgaaagggttgggcaagatgatctccagggcctcttccaggcctataattctatgtcatttactagagcgctcatggcaaacacactaccccgggtttatagtaactgtaattaccagg

SEQ ID NO: 60762 - DNA, 1067 bp, Bovine  19866881751911
  misc_feature (1)..(1): n is a, c, g, or t
nggtcaggtgataatacttgggggatgaatgattgtgacctcatggaaagagaagggagcctccctcccgctgattggagagatgatggctgtggcttagtcatcgcctagacaggcatggttggggctgtcactcagttatctccttctggttttcaaattatgagtagagatttatggaaaatctctgtgatttctccctctccctgggagaggatccggtccacagcccttcctccgcggcacccctgcctgtttaatcgtcttagcagtcagaacggattactgcagaatatgtctcttgaagcggtctttcttcgtaaaagaaaatgttatacagtttcagtgcattttggttttctctgtgttgtgtaaattaactttgatttctgactttttttttcccggacatttttgtagatggaggactgggatgatttggaatacaaaccacagaagtacttcactgttgagtcctcagctggaggtagctatcctgagcgctggccacagggaacctcccccagtttctagctggattccaatggttcctccctgatgccggggttggatgactttcctgccactcagccaaagatatggcctgtccttttcatcatctgttgctcttaatttttctaactgacatctgtgcccatggaatggataatgagagatgtctatacatccatgtgtttatcaaagatcatccttcacccaccttgggaccttgtttaaattgtccatgtctcattcaagttaagcttctcagagacagaatgtgcagtgtctttgtcaagttttaccaacagaccaacgagggaaagccaatccatgactctctctgtaaagatagcttgctgttgtgctatgctcagtcctgtccgactctttgcaaccccaatggactgtagcttgccaggctcccctgcccatgcacttgtccaggcaagaatactggagtgggttgctatttctttctccaggggatcttcccacagcagggactgaacccacatctcttacatctcctgcctaggcaggtgggctcttcaccactagtgcca

SEQ ID NO: 60763 - DNA, 1757 bp, Bovine  19866880518462
  misc_feature (1)..(1): n is a, c, g, or t
ntcccccctccccactgcccactcctactcacatcagttgggaatcttgctggtgatggacgcagtgggtcagcccctggagaggccaggcttaaagaggcttatggcaatacagtcacacatccatatctaggactcaagactgttttgaaaacttctcaacctgtcagtgagaaagatgtgcaggattttcaattatccatgaagttggacggtgtctgctggggaaatgctgaattaaccagaataactataatattttatatggttaataatcacttacatttgtctaacatgttacacttttcaaagtgctaatgtatacctgatctcattggacttttgaaagagttttaaagtatgcttcatattatatatataaatatggacagctctttccctaccacctaaggggtttcccaggtggtgctagtggtaaagaatctgcccgcaatgcaggagacgctggtgatgtgggctcaatcctgtgttgggaagatcctctggaggagggcatggaaacccactccagtattcttgcagggagaattccagggacaggggagcctggtgggctatagtccatagggttgcaaaaagtcagacacacctgagcacgcacacactcccaaccacctaacaaaggcaataaaacttccacagacactgaatatcaatatctcaggagcactaaaccccaaatgttccactttcttttacttgcctcatgaacctgttttatttattttttaaagtttgttttttaacatggaccattttaaaagactttattgaatttgttacaacattgtgcttgttttatgattttgttttttgtcatgaggaatgtgggatcttagttccctgaccagggattgaacctgcaccccctgcattggaaggcaaaatcttaaccactggaccattggggcagtcccatgatcctgttttataacacgcattttgtgttcctaattctttttctgatgttttcagatttctgttaccctagagtgtccttattcttgacattggatctttgatatcccacattaacccactttgtttttgctgtttgagtttaaaaaaacaatttattgaggtgaaatttacatacaataatctgtacacatttaaaagcattaatttactaaattttgacatatgtataaacccataaaaccatcaccacaaccaaagtagtgaacatatccatttatttcaagcattggcctttatttttccaatcaaaggaagcttaactaagatgccattttattgacattttctggttcttgaatgtgtttagggagcgctctcattccagttctgtactcatggggctgtcagttcaagcgggacctcagccttaataaatgatatttatacatattctgtgtctcattacctctagtttcgatttcagcaaattcggtccatctaatgtggtagttgaaagaggacatttcagagctggaagatctgagtccatgtctcttccttgcttctttctagatgcctgaccttggacaataatgactatcacgccacacaccttactggatcacacgagaacctcctcacgcaacaggatgtgaaaatggaagcttctcttcagtccacgatacatgtcatattccaacaccaaatcatcacacggacagtttacaaagaaaatgtccctcccctgattcacgatctcttgaacttctcaccagctttaagataataaaaagaatcaagaagggagaggaccg

SEQ ID NO: 60764 - DNA, 1352 bp, Bovine  19866880893710
  misc_feature (1)..(1): n is a, c, g, or t
nattgaacttgtgccccgccctgccatggaagtgcagagtcctaactactggcccacccaggaaattcctgactaatttcttcttgtgaggacttggactgagcatgtgggaatacaaagaaacataaactgtggccttgacctcaagaggctcagaatctagtcaggatactcaaaacttaaaaatctggcaagatagtcaaaagttgaaacatgcttgggcagagaagatggtaatctattaaataattaaatggatgttggagaagcatagtttaggtattttgaaaaggaatattatttttgtgataatcaagaaagactttatggaagaagtggaattaggtagcgattcaggagaggtgaactctgaagagttttaaaggagcaggtaggcagcgtgttggtgagaaacaccccacgtgaaggaagaagagaagcccgcagtcttgggagtaggggtggcaggactgtgaggtgagtagacaagtctgattaaagtgagggataaatctgtggctgtgagcaaaagcacagcctggtcacatggaaaaggtgaaggcattgagactccactgtgaggtcctcctactgtggggaggttggtttcttgtgttaggattcaggcagaatggagataaagccccagctccaccacatatgaacagtattttacttagtgatttaacttttttgaacctcagtttgccttcttgccaatggagattatctccaccacacagagctgtcagggctgcataaataacatttcaccgtcacatgggctgtcatccctcccagtaagtgggtggcgcagggaggccaaaataagtgcttgtgaggaggaaaatgacatcattaacgggatggacatggtgtttgggaaatgccagttttgtggtggtgtccagggtgaactgaagaagaggggcatgcgtgtattggaggtgagaggaagcaggaaaccaatcttatcaggctatacacaaagagacagggtcctaactagccatcctggctatggccaagccagtagaaatgatgaagcgactgtcagaagggaggaatgaagggatttgatgaaaatagggccaaaggtaaaaagtgaaatccagaataaaaattgatttaaggatgaagacagaagtatcaaactagtagcagaaagtattgttttaaaaccttccaatggatgtttatttttggtttgttttgctttgtccagtgcctgctctttcctttgagttagctgctttcttctctctctaaacacatctttatctggaaaatcggagccctttattgtcttggcacaatggttggtctggagatcaggccagccagagtccttc

SEQ ID NO: 60765 - DNA, 1464 bp, Bovine  19866881733687
  misc_feature (1)..(1): n is a, c, g, or t
ncggggagagtgactccatggcaaccttgctgagtcaaccttagcggggtcttccagcacgtgatctggttcttatttcagtccccttacttagaggctgggagtccgtaatttataacaagaactctaactcgtgggtgtgcgcccttgaggaaacatcactgtgtttctcctcccagtgggttggtttccagaagaacttgtgtccacgttgtgtctctgattcactagttataattatacctaacagcttataacacaaacctgattgtgatgaaccaaacagaaattttgtttttctcatgtgaaaagaagtctggagaaaggcagtctagaactgatgcagaatatacataacgctgtcagagactgtctttctcatgcttcctgctttattgtctgtagtgtgtggcttttggcctcaggagagcaagatgactccatcactgaaagaaatcacatttcattccaggcaggaagaaaggaggacaaagaatagtaaaaagggaaagactttatttatttttttaaaatgaggaaacacattttctgagaagctctattctgtaggcttctgcttacatcttattggccggatctgggtcatatggccggggtttcccaggtggtactagtggtaaagaagccatctgccaattcaggagatggggttcgattcctgggttgggaagatcccctggaggagggtgtggcaacccactccaatatgcttgcctggagaagcccacaaacagaggagcctggcgggctacggtccatagggttgcaaagtgttggacacaactgagcgactgagcacagcagtacaggtcacgtggctacttccttatcagtgaggggatctgaaagagataagctggcacatttactgaataaatcaatgttctcttagttaaagaagaagcaaggctggatactgggtgggtagccaacagtgtctgtcatgggaacccatctcttcaggtcaggtgtggtctgggggaaggggaagagtacctgaaccacagaaagttccctttgtccatactcccacaaggcgctcaatctccactggtaaacagcttgcaaaactcccacattccctagatggctggcacatgtttgcttacggccattttggagggtccctgccttcctctcaggagagtcattccgttctaccttctgtctcactccctccctctctgctttccttccttatttcattccacccttcctttgtcccatttcttccttcctttcctctcaccctccctcccttccttcttgaaatgcttcctgagtccctgatctgtatcagacgatgtcctgggcacttagagacacaggcctatgttgcccccttcctctgttgagcaagatgccaagtgagactcctgggtgccacacaaaaatcatggctcttcactgagcgtcgcctgctaggaactatccaggcagggg

SEQ ID NO: 60766 - DNA, 1300 bp, Bovine  19866880481852
  misc_feature (1)..(1): n is a, c, g, or t
nactgtttctggatgctatgggcaactcctttttcttataattctttggaggagggaaaagcccccatttctgataactcagtaactggcagtgagtagaaatcttttaaagtcataattggtaatgaattagtttcataaaactttccctttgaagaaataaaaatccagtttctacaaaatgttgtatctgtgtatacagagagtacctcactagatagaagtgagggggtgtttttcttatttttaaatttctgccactcctcttgttcttccctttctcagtttcttctttgacttgagacaggcacccagagggaacttggggccagctaaaagcattgcagcactctggtctgattgccccaagggtggcgaggcacccagcaggtaccctccagcatttccaaagtgcctccatccccattcctttggaccctgacacacgtgtcatttgcacatcttattctggtctccactgacctcctgattttttattcttgtctttctgcctcctttggtttctctctggctatttggtcttttagagatattgaaagtcaattaggattttccaagtctacactgtgaatgaaagaattaccgggtattgagtatgaccttgaagtctctgtgttttctcattccctccgcaaatatctgttgaactgcttttacattccagatctgagcccttacttgggggcacctgacaatctgataggtcagcctgtgctctgtggtcagtggctattgcttttaactaagaaaatgggcttttacttgtttcttgttgaatctggaacaatctgaaaatgtgggcttaattccagaaaaccagtgttttatttcagtagcatttcaaagtttaattatgtggccatgttttgcctgcatgtttgtctacttgagatggtagctggaagatagaaataaagtttgttaccctgaattcttaatttaaaagtttgatgtgaaattaatgtaattgtcatttttctccattcttaacattttgtgtaaccgttgtaccaaaaaaatgaatgattcatgtgagtgtccatttgaagcagtcaatgtaacagaaaaggtactaagttaatgcttttcatgcagtttaagcaagacactatatctgaggcttctccatctataagatgggggttttgttagttgcctgtctattgtagttagtgcaagattcaaatttgactgccagggaagtctcatgtatttcttattatatcacaggatcacacattataatttttaaaagaccaaaatactaccaaagtagtgt

SEQ ID NO: 60767 - DNA, 745 bp, Bovine  19866880683692
  misc_feature (1)..(1): n is a, c, g, or t
ntgactctttatcttcccccaaacccgcatgacttacacacgatggatgctcaaagatatttgttgaatggatttgtaattgattggatggatttcattaatttcattaatttaatccactaattcattaatggattttaattcatttgtaccagggacatggagaaaaagtcactggtgccagcctcaaataaaaagtactagaaaaaggaaattttattgatattactgaaattaggaagtttcccatgcagggaaattttagaaggaaataagtaggaagtaagcactcctgtttctcaacacttcaaacagctgttaaaatcacaatactgctgcaggttctgaaacaacattcttacttaaactacatactggacagatgagctattttacttagtgtctgcagagaatttaggaagtttaaggaataaaaactacagctgctgccatccatacctatttccaggtggggcgcacagttccaaatagtacttgattttgggctctgtcccactggtccgcatggtggccacgcctccattagcaaagctaaaggtgatcatttggctgcttttactagtcgggagaatctaggaattaattttcatgttataaatttattagtaagtagcaacgtaagttgttttttacctaactaatatttttcctcaaataagcaagaaagtaaatgcaaaaaaaagaacacatttgaggaagttagaaaatgtactcggtataaatg

SEQ ID NO: 60768 - DNA, 2349 bp, Bovine  19866880704577
  misc_feature (1)..(1): n is a, c, g, or t
naggcaagaatactggagtgggttgccatgcccttctccaggggctcttcctgaccaagtacctagagtacttctatttggttcctcttgtaaatgcatgatgaaaaccactatatgtccaggtgccaggctcctaagaggctcaaacatttggactgctgtcacagaaccgtgcaatttacctacgcaaaagtaaagccacctgaagactttcatctagtcaacagtgcaaagggaaagactggactcattcttttctctggtttcttttttcaaaatggcgatctggggctagctggtgcaatggtaagcctccagcaaccattgctgcacaaagaatataagacctagaagaaagctgtgagatcctctgtggggtccacacctctcattctggaagccagaggccagaaagattaggacaactgccacaggccactgtggccgatacaggacccgagtcctcagcatccacgacagcacggccgaggcctagttcaaccttgggtagcatcaatggtggagagaactctagcagcctgggatgcaacctactctgtggtcctgggcccataactcaacatctctaggtccaagtctccttaaccatataaaggggaaagttataactagtggtaactcatatactattactaaaacttaagctgtcaaaactcagataaaggttagataatacctaatagagagaccatagtagaaaagctgctttgctccatttactcgcagagataaataatgcatgtgcaacttggtttactgaattgctgacgcagccagaagataaaatttaccacccttattctaaccacctggttattcacgcccagactgccaagacttcaggagcactagaactaggttagactcaggaaacttcccatcttgcccacagatattaacacacattttaaaataaatagttttgtgttacttgaatactaacaatcattgaagaagaatctattgattctaagctctaaaatggaagtcaagctacctccagttttttcttttgaaatgttccaatgaaggaccagttttttctttttaaatgttccaatccttacagactgatactttgataaaatacagtgaattagcaatgggaaaaaaataagactgacaaaatatacaagaccacttttttccactaggatcactgtcaaatcatgggggaagtttctagatgccgagtctcaagttctgcacttaccttggataagcaactgtccagaccagcacccagtcagcagatcacatggaaaacacaggctccccacactccacagcctttcagcagaacacacaactgcagtggctcctcacaacagccactgtcgtcacccacatctcacacatgtgtaaagtgaggctcagagaggttaagccatttgcctaagatcactctgcaaagtaactggtagaagcgcaatcccaacccaagtctccctgcctgaagtctgggctggacactgtgacctgcggagagcacccagacagaaggtacacaactcgttgtcagtttactatttaactctgtatcatcacatcactatacagcttgtaggcaactgtgcccttaggtgtacctttttcttcttcctgtttccttaattaatttaagagaaatcgtaaagtagagaaatggtaatttaagagaaattgtgatgaagacatctggaaatagatcaggtaaagatatgataaataggagagagatggccactgaaattgaacctaaaaaattttttttattccatacttctccccagtcatcaatgaggggtgaggccaactggactgattcccagttaggcttaccttggccaacagccgagtgcattttttccatgtcaaacttaatttttgatcttcctggagtgctaagtatcttttcccacactgtagtcacttctttaagacagggagtgatttcttcataatcaagctttaggcgcttgttcagcaaatcattctcagaggctagaacagacaatttaagagcacgttagtgagttatagctacatgtctcctgtctcacagcaagggctgcctgcttatcaccaccactgagatgcctgcagccagcttaacaggtccaaggtgaagaccggtccgcttctgccccccaccccagctttcttatcaaggaaaaagctatatacccaggaggcatccttgattcctcttattccttcatccccgatggattttgttggttctactgctaaaatatactatacttatccaatcctatccatctccatagctaccctattaactataaacatgtcaaaggcaagaactgtgtgttagaattcctagtg

SEQ ID NO: 60769 - DNA, 2419 bp, Bovine  19866880807732
  misc_feature (1)..(1): n is a, c, g, or t
nataatatataaaatctaccagggaattcaacagttttgcaattaaatttcaagtctttcaaaatcatcttgtctatttaacaagtcgctgtaattgtttaataattacttgaataaaagaccctgctgctgctgctgctgctaagtcgcttcagtcgtgtccgactctgtgtgaccccatagacggcagcccaccaggctcccctgtccctggaattctccaggcaagaacactggagtgggttgccattgccttctccagaccctagagaaataaaataccctagagaaacatatatgggagtaagtgcaaataaaattaatgagtgaaaaaagtgacccaggctgatgggtggaatagtggtaaaatctacaggcgctccttcaagtaaaggatgagctgaggcaggcccaggaggcttttcgtatgtgttgagaagtttggatggttagtgtagttagcttggtatgtggggagggacagtgggcagtaaggataagttcaggtaaaagtaatttagctgaaatttagcattcatacctttcaacccagctaaaagtaatggagtgtccagtctgtagcggtttacagcctcatttctctaaatgtggtccttggaaagcagcatcatctgggagtctgttattgaagcagagtctcaggccccacctcaaatctactgaatcagaattttcattttaatgatatttccaagtgattcataggcatattaaagtccaatttaggcaataaagatattttgatatatcctttaataagaatttggaggtaagcagtttcagggtggttggatctaccactctggatcatcaataacataggcttctattttatttatttttgtttataattttatttatttatttattttttaaatatatgtatttatttttggattcaacgggtcttagttgtagcatggcattggggctctagttgcagctcataggctcagatgccttgaagcatgtgggatcttagttccctgaccagggattgaacctgcatccccggcactgaagggcagattctcaaccactggaccaccagggaagtcccaacacaggcttttatctcaggatttggaggtaagcaattccagagtcactggatctatatcatcaataacgtaagctttcatctcattacattttgccagagttagcatgtcgatttttttagccttattctcagtgacctcatggttccaagatggctgctgtagctctttgcacaagtgagttccaaacaggaaggatgggacatacttgtagtatctcattggccagaacagggttacatgttgacttgtaaaattgtaatcatttgggaagaggaatggtataaatatggttgatttataccatttgttcatttagttaaaaaaaaaaaaaagtggattgcctgctatgtgtcaacccatagcatatcccttggggctaagcctgagatcaagagtctctgttcattaattgcacaaaattagggttctgctagtaaagaggggtggaggaaaccattattagacaggaatcattgcctactgctggtaggataggccagatttagaagagtgttggaagccatgccaagactggacttgatccacagtggtcactggagaatcaagggggggttgatgttttgagaagcaaatctagtctgtggtgcaggtactgaggccagtaaggagatttattatgcagttgttcaagtgagaggtgatgacagctgacctaggacagtgacaggctgtggaatggaaagaagggatacatttggaaggccactccaagacagaagccattacttagtgatgctgtatgcgggcggtaaaaaagggaagggctcagaggtgagtcactgagacttcggcgggataaataagttgtctaacgggagttgccattataaaaaaactatgtattacatacatgtgatcacaagttacaaagctctgtaacttagattttccactttatggatcgcaaactgatttttgtgttagtacatagagaactcattcatccctctttaactatttttgtatttatttgaaaaatactgtaaagcccaaggaatttaagaatcatttgtaacctgataaatttaagaaattataaaaagtaaaaaagaaattgccctctccatcttgctgctggaaatgtgcaccctcccccaattttctccttaaggtaattcagaatacccagaggttccaatgcacatacacacttctctcctttctctttttcagaatgataaattcgtattagtctgcagcgtgtaatttccactgtcactcttttccacaaaaatccttgccctttatttgtcgtgtgtggccagaattcgaagaatccccagtgttaacacaggaggattctgcctcaaagt

SEQ ID NO: 60770 - DNA, 846 bp, Bovine  19866880833661
  misc_feature (1)..(1): n is a, c, g, or t
ntgaaaagtggctctagctagagaaaaatgtttctggctcacttctagcccctgaccacattttgaccatgggatgactttagcattcacttggcaagggcacttccatttggctccctatgaagtcaccgaaattctagttatttctggagtgtgtgattgcctggtttatttgtgagaactatccatcagggctgagctattttgtttctggaaccgcttgtgtgatcacagttatgaaatgtttattttcttagatcggcttaagctgataaggcatttttgagccattaagaatcttgtaagtcaagattgtttagataggagatgatttttctgatgggggtaaatcagatgaatcacggtctctcccttgattgggctattatgttaaaggggtgtgactgtcacatgctcctttgagaaatggtgttgcctccttaggaagatcggctgccagcccactctttctcctctggctcacaccccagctgcaacccaaggatctagagagatgaggccaccctggagaggtaaagggtcaactgtgaatgtcagatagggccacagggtctactggcaaccacactgggtgcaagaagcccagagaaaatattccaaattaatgagcactgcagaagctcatggacttaaaggctcggcacaaatctatctcaagacaggccttgtactcacaaatcttgctttcctgtggcaaacagagaaggaaataaatatgccttctgctgtcgagagcactgagtaacaaggacagagaagcagaatacagggggaggaggtatagggaggagggggcagggggtacctgtcaggcagggcagctct

SEQ ID NO: 60771 - DNA, 1248 bp, Bovine  19866881194914
  misc_feature (1)..(1): n is a, c, g, or t
nacaggaagaaacatatggaagaacatatataccaatctgggagttctttaacaaatgtctcaaaagtttcacacctttctggaactttcagtatcttcttatggttctcttttatttcacaaagcactccaattgaaactttttttgttaaattttattttgtgcgaagatgtttctgagaattatacagcatccttacagatcattaaaagcggttcatttacaaaactggagttggagtgggcctgcctttgagagctcccaaacggagagatggtggtttgcgtgtcctaggctggcagttcaccatgctgtgtgactaagaggagagttgttgagtgtgcacactcagcgcttgcttttcttctagatgcactgtctcctctcctgcccatcattcctgtcaaatgactaatcttcagggtgctttggaatgtttaggttggtttaaaaaaacaaaaaacaaaaaaagaaatgttgattgtcttaatgcacatatatgctcagcagcatttctcagatgtacttttcctgagcttattaaatagactagattgcttctagcaaatgtctttgcaaaagcctcaggagtcataacttgacggcttttgtttccatagggtaataaagccagaggcctccaggaacactcagccagtttggatctggacagctccgtgtctagcatgttcagtaacaccagcaaagtaagcacgtttcttcttatatgacaccctgaagaaaccaacaaatgggtcttgctcgtctcctctacacagggcctatcagaaggaaccagagaagcctcacagctgccatcatgaaacttttggtgcttccagacttcatgatgcaggtggaaggctggtcgtgcagatctactctgacacacaagttgtgcttagtgaagcagaaggctctgccatagcaaagagctaaacgcacaatttcaggccactgagatctagttaatcacaaggcaatcagtggatttctttctttagtagattttccaatgaaatctgaatgaaatacattaaaaataatttaaattgggaaaacctcaaacatgagcttatgaattttgagaagtatgcagcttaaattcttgtgtcctttagctgactctgtgattatcattaagcatcacgatttttgtaaataagcctcacccttccatgtctgccaccaagcacagctttgtgatgataagcaagccaaccgttcttttggtaacaaacctgtgt

SEQ ID NO: 60772 - DNA, 797 bp, Bovine  19866881297364
  misc_feature (1)..(1): n is a, c, g, or t
nactttctttttaaaaacttacagctaatgtgttttgtttttacagggcgaacctttccaacacatccgtactactctgctcagctaggagcagggcagctgtcactttacaacatcctgaaggcctactcgcttctagaccaagaagtgggctattgccaaggtctcagctttgtagcaggcatcctgctgcttcatatgggtgaagaagaggcgtttaacatgctcaagtttctgatgtttgacatgggactgcggaaacaatatcggccggacatgattattttacaggtagaaagccttccttctgcctgtgataaagttgaatgctaaaataaacatgtttatgatccctttccaagtgtatctaaggaaatttcccaccatcagttaacattgtagcatgtgtcactgctgagaacttactctgtgctagccttacaccaggtggttcataggcatttatttatctcctccaccctcaggaaggcagtgttgatcccagcttataacaggaaagctaaggctcagaaaagttacatagtaaataatctgagcaggtcacacagtagcaggtggcagagctgggatgtaaacccaggcctgtctgactccagggcccttgctgctgctgctgctaagtcgcttcagtcgtgtccgactctgtgcgaccccatagacggcagcccacgaggctccccggtccctgggattctccagggcccttacttttaccttttctctttgaatccaccttcaggtagtctgagtcccacctcccagtgtatttgctattt

SEQ ID NO: 60773 - DNA, 1358 bp, Bovine  19866880108891
  misc_feature (1)..(1): n is a, c, g, or t
ntgtatggatgtgagagttggactgtgaagaaagctgagtgccgaagaattgatgcttttgaactgtggtgttggagaaggctcttgagagtcccttggactgcaaggagatccaaccagtccattctaagggagatcagtcctgggtgttcattagaaggactgatgctgaagctgaaactccagtactttggccacctcatgcgaagagttgactcattggaaaagactctgatgttgggagggattgggggcaggaggagaaggggacaagagaggatgagatggctggatggcatcaccgactcgatggacttgagtttgagtgaattccaggagttggtgatggacagggaggcctggcgtgctgggattcatggggtcgcaaagagtcggacacaactgagcgactgaactgaactgaactccttcctgctgggaccctcttataaactaacacctacctcatgcgaaggagatgaagggaccccagttcccaagcaggcatgcaacccaaggccccagctcctgctgggtatgtattccagttggagaaggggatagaaaaaatgaaaaggagtgatgggtgtcagacagtggaagcattaggaataaatggaaatagagtgatgagacagaagtccaggaggcccctggtatctgtgggcctcgcactagtgcaaaggaaggtcctcgtccacgccccctctctcccaccctatctctgctccaaatcctgaggggcctcacgtgcgtgtgtatggacccatcaaagctctgtccctgccctccagcacccacgccatacacaccacagggccacccttgggctgcccctcaggactgcgggtgcccacacaaggagcagagctagccctcggaggacagacccagggaagcgggctcagaatgttcggacggggaatccagagttcccagaaccttgggtgttgtccagatgggcaaggtgtgttctccaagtaggcataccacctcagccagggactgcttaccccagaagtcaggcccaagtggggccgtctgaactgggtttgagggctgctcttctagaaagcacggagccagaggtgctgatttggttgaggggatgagagaggaggggacctttgagctgagacctggttaagaagcaggcctccctgacagctctggaaaaagacaccgggtccagagagcagctcacccagcccccaggcccgctgcccctgcctccaggcccaccgtgggcttgggaaggggccccgagaggcacctggaagcaatcttccccagcctgctccctgaaagtgaaagccactcgctttgatagtctccaaattgcctttctctcccccttc

SEQ ID NO: 60774 - DNA, 1257 bp, Bovine  19866880399785
  misc_feature (1)..(1): n is a, c, g, or t
ngtgggtatatacttaatgattgggcaaacttgggttcaaacccccaaccctttctctcaattgttctgtgatgtcaggaaagttacctaacctctccgagcctcctcatttgtgaaaccacaggacgaattcttagctctcagggttttgattagacagactgagaaaaggcagtggaggggcgtggcccctggtgctccccaaaggacagcaattaacaacactaatggggcagctgtccaggccctgcccccacagcagatccatggggctggggcatcactcccatgccagttttgcaggacctctctcccaaccccccccccccagagccttccagggaagcctggtttccatagaaacagatggactgcagagcagtccccttcctgaagactgtgcccccacaagggctggcttaggaacctaaccggcaggggagggggcccaaaacacccaccagctgccaagcctctggtgattcagtggggagtcactgctgctgagtatcagagccaagagctgcttcctttgcaaacatgaccctctgcaagagggccagtgcacctgtaaggagaaacgccccccgatcatccatgccaggaaaggaggcagtgaacaagtacttccagaccaggaactccgcactcacccccagagcccaatgagaacggttgtattacagataaggaaactaaggcccaagtgacttatgcacatgtgtatctcgggctaagtgacaaagccgaaattccaaccaagttaatggtgcctaatggatattcagagaggagctcatatgtgtgtgtgtgtgtgtgtgtgtgtgcgtccacatgcccatgtgtgggctgggggtgtggtgtgctgaacatgacatccaacaagaaccgagctctaagctttcttccccatcacatctccccttgaaagtccctggcgggttgccagcacgtgaaccccgccctggggtccagcctcccttggatgaaggccctgtgactcttgcaggacccggggagggctgcagggagacccattgttctgttatcacgttggtacagaatagctggaaatggggactggaacatgcagtggaggagtgggggaagtgagagccggagtctcccggctctgcgaagagggaagcggggcagggagagccccagcaagggcaccttgggggctaagatccagagccagcatcatccttcttgcagtccttccctagggcagcccatcagccccttgggcaagag

SEQ ID NO: 60775 - DNA, 1280 bp, Bovine  19866880457578
  misc_feature (1)..(1): n is a, c, g, or t
nttgggggccctttctgtggattgaaactcataaatttaatttgctgagttgcaggaaggcgaagagttgtgtcccacctcctcccacttggcaccaccctggaaggtctggaagggagagaaaactcttgggacggctcccaagtgggttttaggcttcctgtgtcagactcagtgaaggactatagggaggaacaacagaatttggaagcaagggaaatggccagaggtggctgcagctgatgccatgggaaagacagctaagccctaaaatagcagaactcagggactggggagccctttatactccaggagctaagaatacggagaggaccctccccaccatactccaccgaggacctcactgacagtggaacttgtgagaaggggaatctttctaacaaagaagaaagacatggtgtcagatctgacggtttctctttatagacagacccattacaaccaagaagctatagataggcaaagtatgcagagaactaagggccagatttaagaaagaaacattttgagatctaagggattggttcttataggtttaatattgctatagttatgagtcagccctgctggacacacacaactgtacagcaggattgggggcaatgtgtggcccagaccctaggccaaggcatcacttccctaggagatgcctcaaggagcacctttggactccattgtccaccaccactcttgagtctagaatgatatggaagaaccttcaggtacgcagcatttggagacaggatgggtttgcactctatgtggttgccagtgagttggacatattatctggagaaaggaacataaagatctgtcctgtgaggactgctcattcatggcatttataaacaagcccactgaatgtatggggcagaggtggtagaaaaagcttccaacacttcatcattctttagttctcctgattttttccttatccaaatgctatggtctgaattgtgcaccacccccaataaattcatatgttgaagccctaacccccagtttggctgtattaaaagatagggcttttaaaaaggtaattaaggctaaatgaaatcagaaagtggctccctaatttcacatgactgatgtttccgtaagatgaagaagagctctctacacacagagaaaaggccacatagggcacactggaagacggccacctacgagccaaggagagaggtctcctcgatcttggacttccagactccagaacactgagaaagcaaatttagttgttttagactcagtctgggatt

SEQ ID NO: 60776 - DNA, 938 bp, Bovine  19866880461147
  misc_feature (1)..(1): n is a, c, g, or t
ngatgtgtcatattctcaggggcagccaagggtaaagggtaagctggccgggggcagggtgggactcgggagggtgacgtcaccttccctcttagtaatgctttggcagagcccgaagctcccaccttgggagggagagggggaggaggggcagccctggagcctgtggcaaggaggctgccaagtcggagatcaggaatgggcaccctgccaggagcagccgggaccaggcctcctgggcagggggtctccgggaaaagagacgcatccccagagtcctgggaggggactctggaaagagtatgcacatcagagggagtgtggagcattggtctgtctgtctggcattgctggcagccagacgtccgctgatcaatgctctactatctgacggcctgagcattcatcctccgcagtgtgggatggcctgacttacgtgcctggcccttggagacggcggaaaggatgggctgaacctccatccacttctatgaagcctggggctagtctctcacaggggccacgtgtcaccctctctgagcacccagggtcaggttgaaggaagggaggaaattaacacccaagggtggccaggtgccagagctgaatctgacaaggacctgcccacgacggcttgcattctgggaggggagggcaattcatatgcatgaagacagaccccagccggagctttggacaagcccactggtggagtggagtggagagcctctttactcttgtcttctcatgtctctttacgagccatttgtgggagatagtttaccccccgtttctggatgaaaactcgggcagttccacttgttttctgtcttctgcgaggggacaaaaattcttaggtcactttaagtggcaaacatgaagtcaagctaataactcaaagcgtctggtccgcggtaagcgtcacacctttgaacttg

SEQ ID NO: 60777 - DNA, 3516 bp, Bovine  19866880562616
  misc_feature (1)..(1): n is a, c, g, or t
ncataatgctattaacctactgggcacttgatggctgtatgacctggggccagtcacttcacctctctgtggctccgtctcttcactgcacaattggggtactaagaatatctgtctcacaaggctgacatgaagcttacatccgctctataaaacacttcgatggagcctggtatagaagcatgatataaatagatgctgcttttttttttttctcttttaaaccttttttatggtgataaccacccactccagtatccttgcctggagaattcccatggacagaggagcctggcaggctacagtccatagagtcgcagagagtcagacacgactgaatgactaagcatagcacgcacagtacatggtgataacatttaagatttactcttttaagaacttccaagtatacaatagagtgtggttacctatagtcaccacgttgctcattacatctgttgagttcaataatctaataggaagtttgtatcctttaaccaacacctcctcattttcctgaaccaccaccaccaatctgatctctagttccaggagttcagctacactagattccccatatcagtgagctcacacagtatttgtctttctgacttatttctcttagcataatgccttcaaggttcatccatgttgtttcaatgttgagatttccttctttttggtggctgaatatagatctctattattattgtgtctacttaggttttcacagagtctagacgcgcagcaaggatatcggattctcccatcccctgtgtttaatgctaacggcaccaacagtagtgtccacaaacatctcttaccacatgccgggcactgctcttaatgctttacacacattcgcccagtggatctcatagcagccctctgaggttgctgcttgttatggactgaactgtgttctcacacattcatatgttgcagtcttaattcccccagtgtgactctgtttagagatatagcccttagggaggtgatttaggttaaatgaggtcataagggtggggccctcatccaacagaattagtgtctctctaagaagaggaagagaccccagagactcctctctctcctttctgggcacacacagagcaaaggccacgtgagggcacagtgagaaagtggccgtctataagccaggaggagaggcctcagcataaactgaacttcctgccaccttgatcttggacttgaccgtctggaactgtgagaaaacaaatgtcttctgtttaagcccccagactgttctatcctgttatggcagctctagctaactaatatactgtaatgttattcttaatctcatttgatgcatggacagtgaggcttggtgaacttaaggggcttgccccaaggtcatacctggtgagtggcaaagctgggctgtgaaccaggcattggctaccaagtccacactctccctgaacctgcctccaagttcaagggcaggggactgggcatcccagaagtaggtggccaggcccgagcagcatggacagtctatatcaaggagcatgggtggaggaacagggcacatttcggccaagactttcaggctgtttccaagacctgcctgctatgcccagcatctgaaggccggtggtagggagagggcctgaccgcatcctatgtgactacaagccggctgtggctaccgggagtcaccttcagcctggcctagagccagagcagttctacagtggaaaaggttcccaggtcgggtggtaagctccctgtccccaaaggtattcaagcactgctgttcgacctctacttactggtgatgtttggggaagaacgaacagcaagaagatattttcataccgtatgaacagcaagagtagatattttcaatagttctctccagcctcaagcagctgtgaaatattagaaggggcagcagttagaggagtccctggaaaaaacacttcctgaccagctttgcctgttaattcttgctcattttccaagtcccaactcagatatcacctcctccaagaagtcttccttaactctccctccaacctcctcatgtccaggttggtggcatgggagggtcctaccggggcttcatgggtggtgctagtggtaaagaacctgcctccctatgcagatgaaagagacttggcttcgagaaaacttcctccgaggagggcatggcaacccactccagtattcttgcctgaggactctcatggacaaaatagcctggcaggctacagtccatggggttgccaagaatcagacacaagtgaagcgacttagcacgcccacacgcatgagtctaactggcaaaactagaaatgacatgtgacaattgtagggagacacagttcatcttgatacagtaatatgaatcttccatctctacggagtcagagaggcctagggtttaaatcctggtgtccgccacttcctgcttttgggggaatgcctcaatccctctgaactacaatttcctcagctgtaaaatgatttcatctcagaggatgaaaccaaagatgaaagatatcaataatatctggcaatacaatatggggtatgggccactggcactcggcctgtgatcaggatatgcacatttccttccgtctctgggaaggcataaggtggcggaggtagtaagctgtctgacactgggcgtattcaagcagatgtcagagtttgagtgttaggatcggggtcagagttcttcttctttgcactgaaataaagattgtactcagcagtgtccttatgagttcttacaactctctaaaagcacacgtatgactcggccttggccggctacgcaaagagtggacatgctttccacccacctccaccaggctatgaaaagcaggagtccactcacaatgcatgattccatttacaaaaaatgtccagaaaaggcaaaatttacagagacagagggtagattggttgttgcctgaggcagggggcgggaacggggactgagagaaaataggaagcaggtttcttttggagggtgatggaagtagtctaaaattggattgtggtgatggttatacagcttcatgaatttactacaaatcagtgaatcatacccttaaagtgagagagttttatggtgcataaattgtgcctctataaagccgttaaaaacaaagccaaaacagtcaccaataaaacaggattccagaggaaccagtgctatggtggaggggtgatgtccacgccccacaggaagcatggtgggagcaggttgaggtcagaggtcagaggcctgaggtcacctcctgtctcctcgacctggggcttcacctgggtacttccttgttatctttcgttgggtaagatgcttgggtaagatgcgaggaaatggaacaggcccactggccaacctcattaaaagcctgcagagaacctcaggcgatgtgaggagggtgggggttctgcagaagggtgaggaatcccgagtcctgtaggagactggcctcccagaaggcttcagaggccagtgctgtgtggcag

SEQ ID NO: 60778 - DNA, 2841 bp, Bovine  19866880571363
  misc_feature (1)..(1): n is a, c, g, or t
ngattgtagcaagggccctctggggaccgaccgcccaaagtccctgggccacgcctctgaaggatgaccagggcagaaggatggggatcctgctttgttgccccagaaatttcctcaacctcgggccaggggtttcatctctgcaggcctcagtttcctcttctataaagcaggagtgcctatctcccaggtgattgagaaatagtgtgtgtaaaatgctctctgaagtcaaaataaattaagatgttagtctcaggaggctgccttgaatgatgggaagggtatgtgtgctgctaagtctcttcagcagtgtccgactctttgcaaccccatggactgcagcccgccaggctcctctgtccatgggattctccaggcaagaacgctggagtgggtagccatttccttctccaggggatcttcccaacccagggatcaaacctacatctcttaaatttcttacatcagcaggtggcttctttaccagtagccccaggtgggcagagcagggggcttaaaatcaggagttcctagttctggccctgctgtgtgactttggaccagaccctgcccctctctgggcctccacatgcccctggtgtgaaaagagagaattggagtcactaaggcttccttctctgaagatcctccgaaggcagagcagagggctcgtggcaggaacacagagtgcccagagctggttaagctcccagatcagagactgtgctctccaagatgctgcagccactctgcttcctcagcattcaagagtcagtgagtgcaggccggggaaggctgtcactcaggatctgctacatccaccacaggctctgcctccaggagcctaattagatgttaccccccatcagctgtgtccatgtccccatgtctgtgccattcaccaagtacgccaggatttggggccaattgcttatgagaccgtctgtctagagatgaagcacagcaagcaccaccagtgagcaaataagttcctcccccctcggcttggaacctgatgacaagcatcattgttattccagcaagtctcagccccaagtccttacgtttgtttttttcttttttggccaggcgactcagcaaatgggctctcgttccctaaccagggatcgaacctgtggcccgaagggattggactgccagggaaatactgccttcctttttttttcccctaagcctgagtcccatgtcctgaagaaggaacacaggggtcctagagtcaggcagacttgagtcagttctggctctaagggttttcaagccccctggggccttagtttcctcttctgtaaaagggaacaatggcaattcatctaatttgcagatctctttggaggatcaagtaaggtcactcattataggtgaatgcccaggacgcaataccctgcagaggctcaaaaatgttggtccctgccaacaaaaacgtgtgtgctccccacacacagggcccccaggcttccaggctgccctgtcacagccctgtcacccctaaggcagtcagccagtgctagtttcccttcctgcccggcatgctcgtggtccctgtggctgttaacagttctgagtaccaggttattcattctcagtagactcgagtccttgcaggagggaagctgctggcctctgtgtcttggacccagcccagtgctggcataaacacacaggaaggaaggaacgtctaaaatgcttttaccgacactatctctttgaatccacgcactgagcctgggagttaggtgtgagaatgcccgtctcagaggtgaagccatccatggaggctcaggtgatgaggaggctggtccaggcctcccagcttgctggaggcaagggcactggttgagacccaggtgaggctggtcccctgggactcccagaggctccacccggcaccacaggccctcacctggcaggagtgaatacaagacgtttcttggctcccaccagcccaaagcagacctacctttgcttcctccgatgcgggttttgccctgtctgtccacgtgctttcttttccctctctccagaaagcacgcccggggggctagaggcggtgaaaataaaaggagtgatttatgaactgagctgttcttcttcatcaaagaaccgctcctgggcctgctccgtgcagatggaactgagtggccgtctcggggcagtgggagcgggaagatgaataaagctgtctggcccaggccggcgcctgcagaggagaacacagcagtgctgcatgacctcgccccgcgtctgcccctctctgggcctcggggctcccatctgtcacaggatggcagcacggggtcatcccccagaggcctgcagctggcacgggggaggatgctagccggtccctgggatgcgctcgcctggttgcctgactctgggctgacggcactgggctagaaactttggagacagaggcatcgcactccttctttctggcaagccaagtccatggaccttatcggaagctctggtttggagtctagcagacttaggcttgactcatagccaagtcttactaaacatgtgattaaaattccaggccagttaattatatcctctgagcctcagtttcctcatctgtaaaatgggttaacaatgatacccacctcctatatgaagattgaataaaagaatgtgggagaaatgcttagcagagtctgatacatggtaaatgctcaatactaccagttattatgaggttcagttaccacaaaattgaagcaacaaagttgactttggggccactaagaggaaagatatatatatatatatatccctcctgaccaagccagatgtccatggtctgccccacacctacct

SEQ ID NO: 60779 - DNA, 1405 bp, Bovine  19866880620731
  misc_feature (1)..(1): n is a, c, g, or t
ncgtgcaaagtcagcctaaggaagattagtgcctcttaggtctttcctgggcgagctagcagccctttgcatgtagatttttagattctcagggatacactggcacttttcacagtcccctatggacacgtttttatttttaagcttctggctctgagtgggactgggagaggggaaaaaaggaagacaggaagggaaccacagctgataaacactacgtgccaggctcagcgctagctttcattataaacctctttacctgattcttataagaattcagttggttctttaaaaaaaaaaaaatcgcttatttggcttcaccgggtcttggcacgcggctctttgatcttcgctgtggcgtgtgagatcgttagttgcagcgtgcgagccgctagttgtggcctgttggatctggttccctgacccggccccctgccctggaagccaggagtcctcgccactgaccaccaggcaagtccccagttggttctttgttagctcatgtactttacagattaagcaaacaaacaaacaaacaaggatccagaaaggtgaagaaatgtgctctggggcccagcgctgcttaagtggtgacctcctgctctgtctccagggcccatgcctctctaccagtgtttctcaatcgtgagatgatttgaggtaaatagacgaccattcaacaacttgcatgtttgtgtgtatgtctagtttgtacacccaatccatgattttgtgcttaggacaaggcatatatcagtatttaacttttaaaagttagtctaaatacaattattaagtaggatgtgagtcacgtggtgtgttgtcggggcaaaagttgagaatgatggaaattggcatgataccacatcccgcctgtaagccctcctctctgacactgggagctgggctgggcaggacaggaagggctggttgtcggtatagtgctgtctggtagaatcttcagtgataagaggagcaagctgctatctgcaccgtccaacacaacagccatcagccacactgagcacttgaaatgtggcaagatggaaaaattgaatttttaattgtattcaatttgactgaatataatttgaatttagggcttcccggtagctcagctggtaaagaatccacctgcaatgccggagaccccggtttgattccttggtcagggagatcgctggagaagggataggctacccgctccagtattcttgggtttccctggtggctcagctggtaaagtttaaacagccttatgcaattagttgctaccgtaccagccagttcagccatagaccaacctcatcacaactgttccaaaagtcatccattgagtggagagtgtggctctcacggcccttacccaggaggccgcagacccagcttctactgagcccctgga

SEQ ID NO: 60780 - DNA, 1364 bp, Bovine  19866880675528
  misc_feature (1)..(1): n is a, c, g, or t
nccctgacttgctcctgaaccagcataactaatcttgaaggctccttgtgagcgcacctccctctgccgtatgacagcccccgctttttagtctcagcatattcctaaaagccccctgcgaggtaccattgcccacctgtgtcagatggcgagactgaggtccagagagggtaagtaacatttcttaggccacacagcaagtttacaaaggaaaagacaaatcgtggaaagcttttttcttagtagatataaaagccaatagagctattttccttctcaaggctccaaattggacaatttaattctggcggtgatggctacagaggggaagaatcctgtaagccctgcaactgggtggtttttttttttaatttccccgcccgtgacttatttttgttgggaagtgagaacctcagcttttctgccgaacccagccctgcctcgtgtaaacattcataagctgtgaaaagaattcattgatgaatttatacagcactcccttatccccgggagaatgaaacccagccactgacacgagggtggtagggcaaggctgttgcacaccgaatacccacatgtctctctcctctcatccctgttctcatcgctctctggatgcccaggcgctctgcacaacctcatctgcagaaaggcaaaggcggccggacgcctgggttcttccttcctcttgctctcttctctgcttggagcagaggggagggaattcgtgtagaaatcaactctgacacatgacttcctcaatcctggctggcttctccagtacaggagaaataaagccagtgatgaggtgccaccagctcttgtcgaacacctccctttggaggaaacccctcctccaaactgcacgggccactgtggccgccactggccacacatggctattaaatttaaatcaataaaacgtaaatagaattaaagggcccgggagcgaagttctgctttgccaggtccagtcaatgacccgatgcatacagagtggagcagagccggggaacctctggacaaagggagcactattaatggtataaaccaccttgccaaagccacaaatattttgtggaaaaatactcacagagggctacactgtgtgccaaaacgcaaaagaggcatttgagaggaaaagctggcttcacggagtggtggggggtgggagacacacaccaccaggaggaatttttttttttttttttggtcagaagaaaaaaaaaatcacctatctttcttcctttttaaaaactgcaggagtgggactgggagactctgtaaggctccccctgagagtagagctctactagcatttgctggatgaatgtatcaatcaagagaaaatattaaagtaacgg

SEQ ID NO: 60781 - DNA, 1321 bp, Bovine  19866880701034
  misc_feature (1)..(1): n is a, c, g, or t
nctccactgcatctgaaaggaccatcttttgccccaaaccatccagctcttcccctgcttacagaccctgtctgtgagccggcagttctgcatcattttgcatcattcctctggtcttcccaccacacggagatttcaagcacttcccagtctttgaagtccatgatgccagatgatttctcctgcaacagatctgtttccaagactggtctgtgcccaagaccaatggaatgatgtctgttgaaccctgctaggcaccttcaggtccttgggaggtgggaaacggtatcttcgtctaaccatgaggaagctagggctcagagaggttaaggcacttgaccaaggtctcacagcgaacgcatggcacagccctttctctggactaagctgcttgtctccagagataagtgaggcatggagaggcggactgtggagaggaagtcatgaacaagaaggctttctaggagcggatttgagagtggggagcccgccccgactgagagctcctgtgcggacaaccaggatggcttcggtctgtgttttcccagcataggcgtcagagcacgttcacgaacttggggagcatcttggggctggagtcagggggacctggggctcagccctggctctgctatgaacctactgtgtgaccttcggcggattgttggccccctctggggctcagcgtggaatcagagggttggactgaacgacctcagtgcccagtggctctaacacttaaggagactatgaacgtggcagatagactctacaggacatggttcctcgcagcccaaagtagagtgttggtcagagatgggctctgcaggatgcgtgatgcaccctaggtcagagttaaggagggaagttcaaagcagaggaaaacacagagggagtctctgcccagctcacttggcacctctgccccagggcctccagcagagagctggtgtgtgtatgtggggtgtctaaccaccatgtctccccgtgtcttccccatggtcctgcctggccccggggagcagctgggcggggcctgcttgctgggcatcggcatctgggtcattggtggaccccaccggcttccgggagatcgtggccgccaaccccctgctcatcacgggcgcctacatcctcctggccatggggggtctgctttttctgctcggcttcctgggctgctgcggggccgtccgggagaacaagtgtctgctgctgtttgtgagtatcccatcccccaccccatgcatgggtgccctggggagggggggtggatagagccctgcacccacactaggggggactcacactggggtctgag

SEQ ID NO: 60782 - DNA, 1266 bp, Bovine  19866880742817
  misc_feature (1)..(1): n is a, c, g, or t
ntcaccaactcccggagtttactcaaactcgtgtccattgagtcagtgatgccacccaaccatctcatcctctgtcttccccttctcctcctgccttcaatctttcccagcatcagggtcttttccaatgagtcaattcttcgcatgaggtggccaaagtattggagtttcaggttttcagcatcagtccttccaatgaatattcaggactgatttcctttaggatggactggttggatctccttgcagtccaagggactctcaagagtcttctccaacaccacagttcaaaagcatcattcttctgtgttcagctttctttatagtccaactctcacatccatacatgaccactggaaaaaacatagccttgaccagacggacctttcacactccaaatgtctgctctggaccaggctttgtctcagatactggggcctttaagctgagctgaccaatcacatcctgatcctctgttggctcttagacaagtgggcaagaaggatccccctgggagccccgagaccctgcctgtcccccaggagtccctctctccccagcacctcacccacgatgtgagagggttaaaaagcacagggcagtgcaggcccacgcctgggtcgaccagccaggccaccactgggggcttgccgtcttccttttcctcctcctcctcgctccttttttttgttcaagaaacatatgtcactcgccataactcatgtgcttattataatcatgaccagatgcttaatggcatgtaataaaaccaccactaacctggccctgctcacaaatctctcccccttacccccaccctgcggccagcccgcctgcccctcagctactcttgacagtttctcatggcaagactgacttgaggaaaagggacaaaagggaaagtgaactctgtcattcacttctggctcattcattctttcatcatccgtctctcatccattcacttttttattaactgtgcactacacaccagacactgaagatgcaatggtaaatgaggacaggctgacctctgtcctcctcagtcctctgggaggaaagatcgatgtcttgtaaacaggtaattaaacccttaattaattgcagttaattacaggggagattacctaataggagagtctatccagactggatagtcaccttcaagagcagaaccgtgtctatccgatgcatccacatacattgggtccctaaaaagtccttttttggatatttgtccaggaagtgaatgaataaaggagtgag

SEQ ID NO: 60783 - DNA, 1177 bp, Bovine  19866880822073
  misc_feature (1)..(1): n is a, c, g, or t
nacagtccctgttgaagctgggctgcaacccagatgtagaatgttggtttcacggctcctcgaactacgccaggtgctgcctagcatcccaccattttcgctttgtcttctcctctcagcctctgagcttccttggacctgagcctgtcagcgaggggaccacacggcacctggcttgcctcccttttgcctgagtgatgcctgcatgcggcgtaggggtgggggcctctcacagttgggtgatcccaacaagctcctccacccagaggcaaacagcacgctccctcccgagacagcagtcttcctgtgctgaaagcaggctggtgaagctgccggctcctcctctgagcatccttcatcccatggaaggctcctccaactccccagggaccaggacttgtcaccggagatggagccaagctgcacccaagcctcacacccaccaagcgcacggccccacttacattcactcggtagtaaatattagagacacccggtcttcttagggcaactgcaatgattctagtcatctggcctgatttagggagggccacaaccccttcccattagaggaatgactacaggtatttggagttcaagttatggagggaaagcaacggagaagtagagggctcatgacaaagagtcccggctggcttgagaagatcctgagaggaaatgaatcaagggaagatccgggctggggcctgagaagaggaggaggcgggaggcagagagatctgcattctttcctccccataaaaaatcatcccagctgtgcctaggagccctaaaggaagatgtgggcaggatggggcagggcttagatggagacaggcgcaggctcaggcaaatccacagctccagtggatgtaaggatcaaaagtccagggttctgaaatcaaatcccgtttgggatttcacggccaccagctagctctgtggctggaccagtcccctctcactctggcttaggttctgtgtaccaggcttccctctgtctctccgtcttgagtctcatttctctgctctgtctgcgctctctcccctctctgaatgtatgagagcacgcgcgtactcacacacacagacactgtgaccccttcctgcaggggtggaaggctgcctgctgttggtggctagatctctttcctcttaaagcccacctccctggggg

SEQ ID NO: 60784 - DNA, 2612 bp, Bovine  19866880872285
  misc_feature (1)..(1): n is a, c, g, or t
ntctagaaactgtggagctcggtgtggccttcagcctgtcagccccagatggtcttgcttcccacaaaaatcactgccctaggcctgtatcctcagctataactgaggggttggggctaagccattgcatttcaggatttttgagccagggatgactttaccagtgaagttggcctgaggacagttgaactaatgggccacacctgtgctaccacctcctgcaaatgttttctcctgggcctcaggccaccaccctcatccaggtttcacctgactttgcttcatggccctcctaggtctcctttgccatttttctttatcctaaataattcctattctgcagtgtggttcctctaagcttctcaaagcagcccagctgatcttccaaaaactgtatatccaatcatgaacctcacgtgctactatggtctgaatcatggttttccaaattcatatatgaagccttaacctccaaggtgatgctttttggagatagagcatttaggaggtttagatgaagtcatgggggtggggccctcttactgggattagtgcccttgtaggaagaaacaacagagagtttcccttccctctctctgtctctgtctctctctgtgtgtgtcatagaagcacacagagagaaggtggccatctgcaaaccaggaagagagccttcaccagaaattaaaaatgtcggcacctgatcttggacttcccagcctctagaatagttaaaaaaaaaaaaaaaagtctattgtttaagccactcagtctatggtatttccttataatagcccaagctaagacatggactgaaaaatcctccatggcaatggcctaaccccctagacttccactccccattctccccctcacactcttggcttcagctctgctggatatgtatacactccactcaaacactccagtaccacatcccaggtgaaaggtgcttctaaaagtgatcagacagctgtcccctggactcatccttgtggagccctctcccctttagagtggactggacccaaggacgccattgtaatcacttctgactagcaaagtaatgggacttcccagatggtgcagtgataaagaatctgcctgccaatgcaagagatgcaatttcgatccctgggttgggaagataccctgaagtagggaatggcaacctgctccagtattcttgccttgaaaactcagtggacaaaggagtctgatgggctacagtacatgaggttgcaaagagttggacacaactgagtgactgagcacacacgtagcaaggggactggctgtcactggggctgggtcatgaaagactgcggcttctgtcctgctctctcatctgctcgctctgataaagccaccttccatgttgtgaactctctgtggagaagcctatgtggcagggaaccaattaggctgaccgcttgggaggaatggaggccctcatgtcaacaaccaaggaggaactaaatttagcagtacttccattggttgagcttggaagcagatccactcccagtcaagccttaagataactatagtcccagctgagactttgactaaacctgtaagagacctggagcccgaagacccagccaaaccatgtccagattctgacccacaggctctgtgagataataaatgttttaagccactaacttagggagttatttgttatgcagcaatagctaactaatacaccaggctttacacatactctcctctctgtccaggacacaccattgaccctccagacagatgcttcctcaacaggatagcttaggctcctctggtcatcagagatcacttgaacctcacttcttcagtcccctaggcagtagtacctggtttttttcccctaaatgctcaccctacttgactgtattgtggtgctggagaagactcttgagagtcccttgaagggcaaggagatcaaaccagtcaatcctaaaggaaatcaactctgactattcattggaaggactgatgctgaagctgaagctccaaaactttggccacagattcaaagagccaactcattggaaacaaccctgatgctgggaaaggttgcaaccaaaaagagaagggggcagaagaggatgagatggttagatagcatcacagactcaaaggacatcaactggagcaggctctgggagagagtggaggacagagaagcctggcatgctgcagtccatggggtctcaaagagtcagacacaacttagtgactgaacaacacggaaaactaagaaaatgaacacaagaaggaatttaatacttttcaaatcattgtagaaaaaatgcaaaattatgcaagaaagagaacaatgctattatttcgtgtctttccatgaacaatatttacatagtcatgatgatgaagagctggataatgaattttactaaaaattgggataaattattcaggggggatggagggaaaggacaaccccttgtgtgcataaaaccattatgagtgtgtaaaagttaaaccctcagtaaaaagatcataattctgaataaattacaaaaaccaaggacttctaatacaaagatattatttagaaatacagaggtaaatataggtagcagccaaaagaa

SEQ ID NO: 60785 - DNA, 1119 bp, Bovine  19866881030007
  misc_feature (1)..(1): n is a, c, g, or t
nttccctggatgaatatatagagacctttaaagttaactgattctatttaaaatgtaactgttagatactagaggctcagctctggaattctccaactagccaagctccctcatcagcaatcaaattcgagccccggcggcgcccgtctttcccttctcccttcgttcttcaacccagatgaacattaagctaccacgaccattatctaactggcgtttcctgtctcaacctgtcacctctaattcatcctgtgatctcactgcctggaccagatacctctttgcaaacctacaacacctctttactgccttcgacttttcagctgacctcttagcctgtccatcacctggccctacgtgggtgaaccaacccagcttccgacgtcaacccaaacgcaagctccgtccccaccacgtcaatcgacgttggagtcccccatgcgcccacactcacccagcgtgttctaacttaggtgctttccctcttggtgcttctacagcaggaaaacccactcgggatggtttcgtgtcctcaagaaaaaaaaaaagtggggccttccacactattttgctatcttctcctgattctttacttgccatcaccttgtggagttgtggacaaaataacacagataaattctcataatttattagcgcccaagctgtttacccagaggctgccacctatggtatgcagaggagcagaggaagggatcagcactttgtgcacaaaacagtacatggctgctcatagtcaattctcagccccacgtgaacgactgactttataaccagtgttattggccaggagtgtttcacatctctcaggtgaaaaatgttcaacacttaagtgctactaataatttttatggttggaaatgaggatcaaagtacgaaaggaaaaataaattcccgggttcatacagccagccaagtctgcatggctcattttctgccacatgttttaaacggcctctctgaaaggcgggggaggggaggaggaacaagttgcattttatttctcagctctttaggtttgaaataaaagcagacggacgtggcggggggtggggggaatcaaacattcgagtaacactatacactgctactgttccccca

SEQ ID NO: 60786 - DNA, 849 bp, Bovine  19866881055495
  misc_feature (1)..(1): n is a, c, g, or t
ntaatcctgcccatgtttcaaaagatgctttgtctcattatcgtagttggggatgattaaaatcaacatagatatttttaatgataccttttatttatataacactgcacatttttatagcattcaccactttcttccattattgggtttaaacttaggaggaagaaatgtagccatcgtagggcaggaaatgccagaaaccagatttgccttttcctcatgactctgcctctcatcaactgtgagactctgaacaagccacggagtttcctggagcctccgttttccaactgagaaaatggaggaatgtattcagttgtctgggcttcccagatggctcagtggtaaagagtctgcctgtaatgaagaagactcaggttcagttcctgggtcatgaagatcccctggagaaggaaatggcaacccactccagtattcttgcctggggaaatcccatggacagagaagcctggcgggctacagtccatgggatcacgtagagttagacatgacttcgcgacagaacaagaataacttagctgtctagcacggcgggtgggttgttagttaaccttcactgattggtggcaaattcattgagcaattcctacatcccaggctcagctccgagtgctggggacaggacagggggtgtgacagaagacttctcagcagctgctgtcccagatacagacagtgggcaaagaacattataaagtgcctcatttcattgagagaaatatgcaaagtgatggcacactgtccccagagagctctggcaaagggttcaacaggtctgatgggggcactaatgcctgaacacagcctcatcatctgaaggcttgttgg

SEQ ID NO: 60787 - DNA, 1009 bp, Bovine  19866881059106
  misc_feature (1)..(1): n is a, c, g, or t
ntacctataacttaaataatactgtatagcaattacacttgcacttaaataaaataatctgcttactacattttcagcaatttttcaacatgtgctaaaaaccagtcattttcaaaaatgaaattatataaactatatagaaattatgtaagtcaatcatagtaaaaacaaaagtaaaaaaataagtaaaaatcatagtaaatcaaatcatagtaaaaaaaaaaaaagggaaaaggtactcagacaatactgcttatggtcgacattattgcacttcgctcccatctgtgctccgggggttcttcccgtccaggtgtccgcttggggggccaccacgtggtggtgccgtgccccgctcttcccagctctgcgtgcagtgatagcacagcacgaccctgaatcagccacagtgggggtatgcacactatgggggactccgcaaaagccacagataggacctctcctgccccagggccagtcattaaacactgaccacacgtcgctgagtgtctccccctgagagcagggacccagccagcaggaggggctgaggcgggaaagagccagaagaggagaagcagcagaatcagagtcaggaagtaactcaccccagatggcagagaacgtggtccccaaggcagaggtgggtctcctgactccaagactggggcaactgaggcaagcagccggctctctggggggagcattccagggaatcccagagaagacagccccttggagctggggatgccgctcagaggtgcagtgggacttacccgtctggacagcaggtcaaagcagagtttgttctcactggtgcccaagttaatgatgccctggaggtgagaggtacagagccacgtaagcacagcagagggtgccagcagaaggctccaggagcacacgaggcagcgaagtggagctctgcaatctcgaccttcccactaccccacctggtctttgctcaagcgctgccctccacagggttccctgatcgcatctccccatt

SEQ ID NO: 60788 - DNA, 1055 bp, Bovine  19866881062928
  misc_feature (1)..(1): n is a, c, g, or t
nctggatatgtctgatgcatcatcaaagcctgatggagctagaaaccactcctgctgctgctaagtcgcttcagtcgtgttcgactctgtgcgaccccacagacggcagcccaccaggctcccctgcccctgggattctccaggcaagagtactggagtggggtgccattgccttctccgaaaccactcctgaggaaatcctaattcggaacacttcctagttcctagacaaccacatagcatataagacattgcactgggctgttacgtttccattctgtctcagcactgtcccactgagatggtgcagccatagtactaaagggaacgtctatctgttattaatggatattcatcttatatccaaggtacaaccagcaaacgggagatactttgcgaaggtggtggtggtggggggaaatccttgcatcttctgtgccttggagaagaggcagttgacgaaatcttcattgggtcaagttgtcagtacatcaaaccaaactgctgacaagaacaaggctgtatggagagaaattactgggactatacccagaaaacaagaacagagattgggcacagggtaggcagaagggaggagatgaaggtaaagcccctcaggatctactaggtagactattggaaatcctataggacctgctgccaccaatatacaattttcgttaattatctcaattgtggctgttatccccttaatgagaaacacagctttacttctaagcaggcagtgaggctggcagaaagctgaaacctgaaaatcagcagatacagggctgcatacagcccttactattgaaatgaagccacatccacaacacagggggaggactccaaatagcttcagacagcagccagccacacagggccctcaccaggcaccgggtggacgctctccggactagtcaagaggccccaatcccaagtgctcatttcaataacattagaaaataaacacggggcttatttatagcacaggaaaggcactggggcaaaagagccactcatctggtattctaccctgacggggccggatagga

SEQ ID NO: 60789 - DNA, 1394 bp, Bovine  19866881192703
  misc_feature (1)..(1): n is a, c, g, or t
ngaagcggagccccagcacaaagaaaagaaaggccccccaggtttccctcaccctccatggtccccccgcagttgctcatcaccttccaggcgtctgcccagcaatactcactgaggagggcaccgccatagaggcggatgggggtcttactggtcacctgcgctccgtcgaagaccgcatcgtagagctggtcaggaaaggcaagggcctgtggacagtgggcgggaggcttggggtgactccctgtggaaccttccccttggtcatctccttcctttccccagcagcagtccagggccaggaccctgactgcccccaccccgtccatggcaacagagatctcaggttccaaggacaaacagtcaggactgtggaccaggggaccttggatgccccagggcagggcacagggggtatgagcatccgcacaggtcagagaggcggccagagagcctggacagcagaggcgtcagtatgatggtccgatggccctgtgggcaacggcagcaaggggtcccagggcagcagagggcgccgggtcccagggctggggcagggactcaccatgatggcaatgccggagaagagcacagcagagacaaactgccagactctggggagacgcagagaggaaggtcagaggcagaccgctcactgccactctcaggccccaccccggaccctcccttctccaggcaagatggagggatagctggtctggaggagggaaccaaggacaagactacacagggcccctccccacagccttgccccccgccaacactcacaagtcaatgctcacctgagccccaaaggctctcgaacagcaaacttgatctcattgcctaagacctggctgatctgtggacagagaggggtcagaaggcagcgctgtctgcccagctcactccctacctcccagagcctgccagatgcccagggacccacctgggtgcctctgcttagccagagtgacctaggctgggagggtcacactgaggccacactctgcctcctcttgataccagggcccagaggaagctgaaaatatggggcctgagaatgtgagttcaggcatctgccagttgtggacttgaagcctggctctaccatttattggtgtggtcctgggcaaatctttaatctctctgagcctcagttttcccatccataaaatgggttaataactgaacctacatctcccagggctaacaggaagattaaaaaatgcttatagagcagctggtgccataacaagcaaataatcagcactcaactaattctaaccatccgttttcattattgctgctattcctctgacatatccattacagttccagaaaatatgagctgaatctaggggccccctgcagctatacgggtctcagctact

SEQ ID NO: 60790 - DNA, 1006 bp, Bovine  19866881236685
  misc_feature (1)..(1): n is a, c, g, or t
nctaaagcacgtgttttaaatcgcttttccggagcaggtaagggacatttgctgagtcattacactctcttgcccagtctttgtgatcgtctatctgctttcatgggatgtctgactgggatcttgaacgtggtctggaatggcggaaagaggtttcctttgtgtggaaccagctcacctaacaggcctccaacccacagccttggcctcatgaacaccatgttgtaatcaactgagctaatcggccacaggcgtcatcataatagctgcagacaaatgaatcagtgtcaaacatttcctcagatgtataatgctgcggctgtgttctctctactctggggtttgtatttcagcagattaatataatactgttatggagccacaacacaggctgtgggtcctaacttctatctggcctgcagactggggtagaccccaccaaagtgcacagccaggtttctctgcttggcactaagcacctgcctgttcaagccacatcacaaccaccatcatcaattcgtctcaatgggatgaaagaggtttctggagggctacgagcacaagcaactgcactcagcaccagcaacaggcaaggtagaggagaaggggcagggtggggggcatccattcagttggcacctctgctggatagaagctgaatcccatctcccccccacccacatgtatttgagtcaactctctaatctggggctttctggtagctcagttggtaaagaatccaactgcaatgcaggagaccccggttcaattcctgggttgggaagacctcctggggaagggacaggctacccactctggtattcctgggcttccctggtggcttggatggtaaagaatcagcctgcaattcaggagacctgggtttgatccttgggttgggaagatcccctggagaagggaaaggctacccactccagcattcttgcctggagaatccccatggagagaggaggctggcaggctacagtccatggggtcgcaagag

SEQ ID NO: 60791 - DNA, 782 bp, Bovine  19866881241231
  misc_feature (1)..(1): n is a, c, g, or t
nctttaactagacggacttttgtagcaaagtgatgtctttgctttttaataagctgtttgctgccgctgctgctgctgctgctaagtcgcttcagtcgtgtccgactctgtgcgaccccatggactgcagcctaccaggtctctccgtccatgggattctccaggcaagaacactggagtgggttgccatttccttctccaatgcatgaaagtgaaaagttaaagtgaagtcgctcagtcgtgtccgacccttcgagaccccatggactgcagcctaccaggctcctccgtccatggaatttgccaggcaagagtaccggagtgggttgccattgtcttctccaataagctgtttagccatagcttttccttcaaggagcaagtgccttttaatttttttgcgtttgatggatactagcaaattactcttcaggaatgttgcaccttcaatactgattatactcagactgttacatttctgtcagttctacatttttacaagtgaaccgttgttcagtttgcagtttctttcgtcgtggaggaggctgccggtcctctgaatttccctgggagcctgagccgcacccacctgcctgggagaagccctgagtggtgccctaactcctcccgtccagcaggaggcgcggccccggacgctcccgcatgcgcggtgcgctgggtgtcagaccgccgagcccagtggcctgcccggggctccccccgctcgttcccgcactcccggcccagcggtggcggcctggagctccgcgccatcccacccg

SEQ ID NO: 60792 - DNA, 1201 bp, Bovine  19866881384466
  misc_feature (1)..(1): n is a, c, g, or t
ngaatgatgctacagctgaaactccagactttggccacctcatgcgaagagttgactcattggaaaagactctgatgctgggagggattgggggcaggaagagaaggggacgacagaggaggagatggctggatggcatcaccgactcaatggacatgagtttgagtgaactcggggggctggtgatggaccagggaggcctgacgtgctgtgattcatggagtcacaaagagtcggacacaactgagcgactgaaccgaactgaactgacacttgctcccccactgcctgagtcctgtcctctcctatctccccaacaactatttacgcaggggtccaaattaggccagatgcgggaggaaggagtcctcaagggcaggacctctatgccacctaggatgaaggctccccacgcccacacctcccatccctttgatgcctggagggacaggaagcagggtggcaagatggtgcctctggtctagtccacaccccacacccctggtttggtggtgaggtggccccatgcctgaccaggaagatgactccttggccacagactggcctcgctgcatcctctgctccctacctctcctcctgaggtccctgggggtggggggaattggtggcctcctaggaaagaacccacttcatctgtactacagataccacccccgaccctgagaccacgagaggccttgtctttgcaccttaacacacctcgtctttgctcctctgtctgccctgcccccagcctccattggtttgactcctcagtgccttcctcctcatattcaaaagctcgaaaccatgaccgaaagtttggggacactgggtttgtcctgacacatctgggagcacatgttcaggcttggatccgtctgtctggatgttttccgtttgttggctggttttgcctgcaagaggtgtgaacctctgattggctttgaggttctggaaatcaggaaggtttgtgttcatttcaaagttcagaaaaatcactgtggttttgggtcacggttgggtttgcctgcttgatggcagcggtggtctggggggtatctgagctaggtctctgtggggtccccatggggtctgagtgtgagacgctcagggggtggccctctgggtggggctgatcctggactcagtgatggggtgagtggccaagggcggaggcaggggtagggcgctgtgctcg

SEQ ID NO: 60793 - DNA, 1163 bp, Bovine  19866881407972
  misc_feature (1)..(1): n is a, c, g, or t
ncttctgcgtttgtttctcgggattactgcttcctcccacaagaatgggagcttcacaagaacaggagcccttctctctgtctaccccacatttcccaagattaaacagaacccacatgcactatgggcttaatacatacttgttgacggattaacaaaagaaactagagtaagtgcctcattttaccaagactactgagaccaaaaaagggaaactaacttgcccaaggtcaccgctcaggtcaaggccaggccgggggtccaggcgtcccaacactgagggcacggtgtgcccgtcacacgtctcagcagggacaggcagaccctcggtgggcaccaccatcccctctctgtctcaggagtgggcatctccacgtgtgtgaccttccgccagcctggccaggctagcctggctcctgcacccccagactgggctcccgaaaggcctgttgtccctctcacttccccagagcagcatcaccccgaggggcctctgtgggaagagggtggggtggggaaggggaagaagcctgctggggatgggccttgggccacatctggaattaagagccgaaaacccagctcagcgctgataatgctttattgacaggagatgaaagtcgggcgggctgtccatctctgtgctccggctcgcgctgctttacgaggtgtgatgctctctgggaacttcgggggccctccccacccccttttcctgctcccagcccacattagagccttcacaggcaggagcccctggcttgcactccccacccttggccagggggtggaggtgggggatcggtcccaccttggaaaagactgaagaggcccatgaaagtgagggtttgttcctgccctgccccatgggacctgtctgcccccagcagcctcagctgtgatgaaccttcctttgcccatcatgtaacacatcacaggtcctgggaattaggacagggacatatgggggggggggcggtgcgcattttctgccaatcacacgagctaagaaagagaccctcctcggggtgtgtgtgtgtgtgcatgcgtgcatgcataggttgggtgggtgtgcagagaactgaacgttctagcaggaatccactcatagtgtgaggtggggcaatcagacaggtatatgctttacaggcgtaaattcaagt

SEQ ID NO: 60794 - DNA, 1468 bp, Bovine  19866881757043
  misc_feature (1)..(1): n is a, c, g, or t
ngtgagctaggacagagtccctcttcccccagcgcgcccgggcccttcagactctcccactgcctgcccttggcctcagctccagtcctgccttctcttggccacctctcggctgtttgcagaacctcgagtcacactgctctgtccagtgaagagctgttgagtgttgagccacgtgtttgtccgtgtgtctccctaatgtctagctcggtgcctggcatacatagaatccccccaaatggttgttgaattaattgaattaaagttagacaggactcttgagtgttcccctcgttgggaggtttcaaacaggtggcccccatggaggattcagcctgcatcttttaaaattctatgtgactggctttgagcgtttttaaaaaggggaggttccatggaagaatgaaccccactttctcttcaataagcagaagggttccaccgcctccttcctgggacctagctctgacaaaaagcccgttggttagagctgaagggtggccccttcttagaaacagagcaaatgttctccttttcccctgaagcttcttcccctgtcacttcacccttttacacaaaatctgtcctggactcctgtaagcactgacattttcggcctctgatttgtttaaaaccttattttgcagctggacatagatgcacggctagggggttgtccagaatttcatttagcgacgaagtttgggccaaggctgggaccgaggtccctgggtcttgcctgcactcttctgcctgcctcaggctccccatatgtccttcccccacactggaaccagcccgcacgcaccctacacgtgcttggaatctccgctttggatttgccttaagctccttttgctacaaggttgggatgttttagagcttcctaagtgtacatcagctcctcccattaccacccccaacgagctcctcggtgccccccgagcgcagcgtccagagctacatccatcacggacactgggctgtcagcgtggccacgtgcccctctcaaaggcccgaatccagaatgaatttatcccagggggaaccttgttatgcttttatgtcttcaattcattagattctctgtcagcagcataaatcagggccggaccctcttctcacacactcgggaatggggaagacacgcagagaagagagaaaatgcgcagggggcttgggtgtgctggacagtggcttccccacccccgtatttattcctttgtttttttttttttagccaaaaagggatcttagagagatcaccgggggcaccaggcagagggagaggctagatgggggagactgaggctaaaagtgttgcttcccccataattttatcagattgcccctaattccaccccagttccatagtcgaaagctctctccttttagtccaccatggcatgcctaggggagttatctttacaaaaaaccaaccaaatcacgttaaattcctcaacacctc

SEQ ID NO: 60795 - DNA, 736 bp, Bovine  19866881824487
  misc_feature (1)..(1): n is a, c, g, or t
nccactgccctcctccgacctcagcttttcagtttcccggcttgatggatatagaggttgttaggcttggcccctggcctcagcctgaaggaagctgttacatcgtacatttcagatagatttaactcagccttctgttttaactgatttcagtttttaaatttgaattgatctcagggaactcccctatggccaccccagcttcgggttgctacttccacagttcttaataggcaggatgggattggctgagcgtttcagggcggtctgtcgggatgggggccatcgagaagcagaagcaggagtgcccttccttccagctgaattcagggaccgtggggagtgaggctctggggacccgctgttcaccaggcaggttgaggacttctggagggagctcaagatttgtacagagataacctgatggttgattttgtgaatctgtggttgtgtttgacagtgatccccaggatggacttggggtcatcgtcggacaacctgaacatttcgtagtacctttgccaagttggagaattctcctagctcacatggctcctggcatccaacttggagaaaactgttaatcaatacatgtttttaaaaaaatccttaacacaaggagttctttttctccttcaagttggactaaagctcagaactgtaaagttatcaggtcagttggctcagctgtttgtttttcataaattggcaatgtttttgagaaatctatttttca

SEQ ID NO: 60796 - DNA, 688 bp, Bovine  19866881840829
  misc_feature (1)..(1): n is a, c, g, or t
ncaggacgttcttagaacaactgtggagtctccagaatggatcaagatccattgttccccagccagtcggtgggctccaccccgcattgtccacggcccctcccagctcctgcgaggctcctcgaaggagccgatgaacctctcgatcagagctttggctggcagccctgtgtgctggtggcttttattgtgagtgcccaaggatctcggggtttccttgtccccgggctgcacaccccgctggggaaaggcctgtttatggtaaatgatgcctgtttgctttgattcctagctcaggccccagggccacgattgagtccccgtaaattaaaagctgcttatattggaggggggtgggggaggagggcggtggattaagcaatactgtgaagccctgggaaccatggggacttcagagagagcagccagttgggcctcccagaggcagccagggggcgtatccttgtcccacgtaggcgggaccctctgggtggtgccgctggactcaggaactagggtgacactgtgtcttctctagacctacaaactgtttagaaagaaaaaacacaaacttccgtcacggcgggcttctcctctttcctgcttcttatatttgcctaagatgttcggacgcctgggaggtgctgtcccatgatctacactgcaaactgagggctggtcccaatat

SEQ ID NO: 60797 - DNA, 2053 bp, Bovine  19866880845919
  misc_feature (1)..(1): n is a, c, g, or t
nttgcagtttggtagataatgcctctctggggccgcaattgcccccttctggctctggctgccctcgcatgtctgggccaggatagcgctgctcagtcctttgttctgcaagtgggcctgatggtgtcttaggttagcactttttgtgaagtagctatcccacagtctggtttgctagcccaagttagttccctcagattgcccttggggcattcaggccaggtccttactctaagcaatgtagtccgtgtctccctgaccaaccccagcttgctagtggtggatgcagacgtctgcactgcttctcctctgggggagttactgttgggcacataatctgtgggttttaattatttacttatttttcctcccggttatgttgccctctatggttccaaggctcgccacagactcagcagtgagagtgtttcctggtgtttggaaacttctctcttttttaagactcccttccctcgacggagctccatccctacctcttttgtctctctttttatcttttatattttttcctacctcctttcgaagacaatgggctgtttttctgggtgcctgatgtcctctgctggcattcagaagttgttttgtgaaatttactcagtgttcaaatgttcttttgatgaatttgtgggggagaaagtggtctccctgtcctattcctctgccatcttaggactgcccccttagaggcatttctgacaacgtaatttcatacagtggtggttttaggattctgagttttatgaggcagatttgccctaaattgtagtaattccatctcctccttcctcatacccatccaacagtgtcagcttctcagtaattatcttccattgccttatgtggcatcccttctttcctgttctgtttttctgtttctaactgtgatatggaaagccatataactcaattaaaatgctgagcctatggtagctgatttggcatctttgtcccctggtttggctttctttggggtttgctcatagatgagtagggtctagataagagttgaagagttactctaccttgtaaccatgttctttagcaaactgcagaatcagtgaccgtcgttctctggtagtgttggtggcatcaaaaacctagaggcacatgatgagattggtttgctttaaatctagttctgatagaatgcctactctttgaccatccctatgctaagcaaatgatttcaaggaggagataaaacttgaccagggttttgaaggattttaaacgacttatatcaatttctcaagcactcgttgaggccttgctgtctgcccagaaatgtagccgactctgtaggcataaaaaggccagaggaaaattgtggaattctattagtctcattttacaggtaaaatagctgagacttagaagaagggtttcttttacccaaggccactgagacttactgacgaagcagaattgaaactgattttctcaactcctaggtgaagcttcttccctccctatcactttggagttctttgaagcccttttagaatttccaaatcctatatcagaggtttatgagattaaattggctaggtgtttaggtaaatctctagaactaaaaaatgtttgtattgcagtcaaattctagtgtagtcctgttgaattattgggggtagagtggtagactctattggttaggagtatagattctggagctatacaacctgtattccagttctggcttaccctttgggaaaatatttaactatttggtctttctgcactacatttttctggggtataaaatggagtataataaaaaatacttatcttgtgggggagggtggaattacattaatacatgcaaagtgcttagaataatgtatagaacataataaacactcaatatatattagctcttctccatcccaacagaaacccaagagaaaatgcaaattttcttactgcaacacgaccttcctcatggctgagatagctatgaacatctttcagggctgctagggcacactgcctgaaaaagatgaagaaagaaacagagacatctactgtatcaaag

SEQ ID NO: 60798 - DNA, 990 bp, Bovine  19866881757324
  misc_feature (1)..(1): n is a, c, g, or t
ntgccagttcagttgttagtcagcagtatgaccttgggcaactcccttccttctttcctggggccttactttttcatctattaaatggggcaatcaatatagtggaatagataacaataacaataataaaactttccactaaaaaatccctagaaaagctggataaaataaatgtttgcattgctgatctttcaagaaaacaaaacattatgaatatagggttcccaaatgaagcaaaacttggggaaaagagtgataaatggatagagaagccataattcccatggggacatttgccaatcacagtattcaagagccttgagcttttaaaacataatagaaatatgagatgaaaccttaggtgtatatagggtagggatttatctgggaccttcaaaggactacatcctcaataaaattataaactaaaaaatatatccacaggcaaagggaaacaataagaaaatatgtctgcctcacttttggtagaaaaaattaggaaaagcctccactaagaatgtataaccccaaacatattgttagatagatttgtggttcagaattatattacccatgtgtttcagaaaatgctaagctgagagtttaataaaaagtgatttcaagtcatttgcttccaggagtgtctggaaaaagcaaatgtaaattctctctagattctctcaactgaggctgcatggattttccacagataaatttttgtcaaactgaggctcatataacatacacagaacataagctataataagtaaaaataagcagaaacaacaagaactctaacaacttaagataaaggatccacaatataaaataaatattctcgagatttttaggagaagtaaaagattgactcaaaaatgcaaggaagaaataagatgctattgaatataagatccagatttgaaaaagaattaagtagaatttttataaatgaagaatatattcattaaaatggaaatctcaatgggtaga

SEQ ID NO: 60799 - DNA, 2325 bp, Bovine  19866880457320
  misc_feature (1)..(1): n is a, c, g, or t
ntaagcattcggtttgtcattctttattttcttattggaacacacttaaggaatgacttctccaccatagtgattcagggcataaccttccccagctggttgtttgagactctgctttatttgctctctcactggactacctttctcattagtgaagacatttggaaatacacccactcagtcctaatttgagtgaattagattttcatcagcatcagtgtgcacatgactgtgattaacaaggaaaatgaacacataccatttaaaatttattaaagtttgggagaaaaattccgtttgatcacaagtaaaattctctgcatgtttagtcacttagtggaaaacatttacatttggggagaagtacttacttgctaatatgtcagcagagcacaaatgaaactgttcataacctcctgctgccatcattatgaaatgtagtcaacgttaattgaaatatctgactgcttattgtcacaacctgtgagccaggcgtgacactcctttgtatgttttattatttgttttctcctgtatgaccattggaacatcaggttttcattaattgcttgttttgttttgataactttgacagtaagtggttcctctaaaatgtgcttaagagacacccataaaggagttgatgtcccaatctctgtgccgagtgaacacaaggaaatcagttgtttgcaataaaggttcaaaagtagacaacctcaattccatcttcaaaggattgacgttgtaaggttatgtgcatgctcagtcactcagtcatgtccagctctttgcaaccacatggactgtagcctaccaggctcctctattcatggggttctccatgcaagaaaactggagtgggtttccatttcctactccaggggatcttcccgacccagggatcgaacctgcgtcccctgcatcttctatattggcaggcagactctttagaactgagccatctgggaagccccctactttgacaatatgtgtcttaagagcagggatagttccagatgcatgtttacatctccctctcattagaattgggtttcacttgtggctcagctggtaaagaatctgcctgcaatgtgagagacttgggttcgattcctgggtcgggaagatctcctggagaagggaacagctacccacttcagtattctggcctggagaattccatggtctgtatagtccatgagttcacaaagagtcggacacgactgagtgactttcacttcattcattagaatcacaccgccacttactgcctgtcatccccagtaaacaccaattatgatgggatttggttttaagatatttgcagtttgatggccaaaggaaataactgttatagtgtatccattgtgatcaatccctatgcatgcctggcatatcagattataaaaggaattcacttggtgtggacgagtgcttggttaaattcaaccaagcccagagagatataataagggaaaagaaatgctggggaaatcatttgcaaggaaagactgcactcttctccacctatgaggactaaagaatacaatggagggagaccctcgtgcatagttgaagaatggaagaggttgaagcagaagcaggcacaatcgtgttcagaactgtatatctctgccccttctttgctacactcgcccgaggaaggcacagtccaccaggcatggagaagcatcaggtagttctttggattttctcttacattttagcttggatcacaatactgatagcttgtcctgaagaggctttgttgttgttcagtcgctaagtcatgtccgagtctttgcaacaccatggattgcggcatgccaggcttccctgcccttcaccatctcccagggtttgctcaaactcatgtccattgagtcagtgatgccatccaaccatctcatcctctgtctctcccttctctttttgcctccaatctttcccagcatcaggatcttttccaatgagtcagctcttcacatcaggtgaccaaagtattggagcttcagcttcagcatcagcatcagtccttccaatgaatgttcttgccttgagaaccccatgaacagtatgaagaggctttggtgcttttaaagaaaacaaccctatagtatcttccctgttctctgcagccaggagtgcatttcatctcaagggcttttccctccaacgcttcaccttgactcatggtatcccctagggatgaagagctctccttgactccgcggagtcccgtgaacgggcactcagaactcacttgccagcatcacgggagggaaaattttccttagagtcatttgagaagagaatgcctcttac

SEQ ID NO: 60800 - DNA, 1085 bp, Bovine  19866880482716
  misc_feature (1)..(1): n is a, c, g, or t
nttaaaggtgatagcctgcaggagcttattctgtgcccctgtaacattttggggaaaaaaatcacccaggatgtccaatatgcatttcttaaagatttagtatacgtgagtcactttgcaaagctatttcagtatggaaagaaacagatcattccattggctttctctcttatatcctctgcgcgcaacctaaaaccccatgggcatgacttaaggcaatggcaattactccgcattccttgcttaggataatccttccttaatgtgtttaactatctattgagcacccatgacagtgccaccatttatcttaaaacttggaaatcaacacatatcagtcttggaaggtaaaactgatttttaaagatgaaccaaaaattcaaatattcatataaaatattcttaagtgttggcgcaaaaatactgagcaatacaaatcagcaaaacaacaggttaattaggtttcatgcttgatcactgcgacagtttagttctttattttcattttttgacaatttagttcttgatatccaacctctcatctattctcatttttaatctctttcaatgtttcctgtaaaattcatgtcttttttcctttcttttttggaaaaaaaaaaaaagaagtctctgaagtacaagagattcagaaataaaggaagtcagggaagagaactgcatgcccctagggaatttatttcctgtccttgggtcatcccattttattttcttctagttctgaaaacaccatgctgaccggatttttgattaaaagtggatttgggctgagcagaaagttagagaactatatatcaactgaccaaaatccttttcagaaatgaaactaaagaaattacactttccttttacctacaattctcagaaaagcgaaagtatttcctcagtatttagcaattccccaatctcttaactccaagaaatctatcaaaggctcttttataattatgtaattgagtaattattatatgccaggcattaggctaaagtgaataacagcatgaaaaaagaactattatccatcctatttttcagtttcgaaatcaggaactcaaatatttacaata

SEQ ID NO: 60801 - DNA, 1908 bp, Bovine  19866880565506
  misc_feature (1)..(1): n is a, c, g, or t
nccataccccagggcaaggagacagtgaagaaagagggtgaccattctagactggtaggtggctgtataagcctgatatgcataggcaccaatactatggcacagatttttgagataagaaaaagtactgtgatttcggctggcaatgagacaggtggccaggctcaaatctgtcaaacttctataaatcagaggaggacagctgggtatgctgaagccctgtcagggcaggatttgactgctggagggctctggaacttggcaatttatgggaaggtgtggggaaagggcttcagcagaacagatttctgggtaatagattcgtccttttctaaagggtccgggacattcaggttccgggtcatactcggggttttttggtgccgtgggaggggagagttttggttctggaaagttttgaggtaaaaattttctcctctgcgaatgtctactgtgtgagttgcagtttcattctgttacagcttaaaaacagttcagtatctggttagaaccaggatagagccagagtgaggttggctctatgttggcggcaggtttaataagcaaggaaacgggagtaatgcttacttgggctctcgctagaggaagaaatcaccctctacacccatctgccagaatcttatacagaggcttcaatagagttcagtctccttagcttcaaaatggtctcaacatcaccctttctctctcgagacttctcctggaaccagcttctccggtgggaatgatggcagaacacaccattctaaggacaagcgagagggtgctgctgctgctgctgttgctaagtcgcttcagtcgtgtctgactccgtgcgaccccatagacggcagtccaccaggctccgccgtccctaggattctccaggcaagaacactggagtgggtgaaagtaaagtcactcagttgtgtccgactcttcgcgacgccatggactgcagcctaccaggctcctccgcccatgggattttccaggcaagagtactggagtgggttgccattgctttctccgggagagggtgaggagcctccagttgcctggattcagcttgagggtcaactagtgagcacagcctctggatgcttcctctaacaggtgtgtcttataatcataagacaagaaagttgtcttataatcatatgtcttataatcataaaacaagaaagttcaccgaggctgaggacaagtaggtagttttgaagagtgcaggcctagagttcaaaagaagatacttgtgagttttagaaacaagttgaatgtatctgaactgcagcactgaaatctgaagttacagaaaaagaatggtgaacttgaatggtgaacaagtgagtaactctgttgcatgaaacacagctgtggggtaaggaaataatcatagttactactggggttacagtctcagtccagttcttatgattaccatggcacatgtatcagcttaagtgcttgtaaataagtcaaattatttaaagtataataatttgcagtaaaggacttcagtttggttttttccaaattcatcatgaaaagtcgctgatcacacattttcagcaatatgcggacttttagattatataaaattaattttcatgaactacatttaatcttctggagataaactgaaaagatgactgtttcatttggcaggactggttgatcattcatctctcctcgacatttggaaaaagaaaagaaagaagacaagactcctaaagatactgtgtagaaacgatttccttgtctcaagatggtcagtagacccaggtgtatttaactatggctgatgacccaattaagccagttaaactacccttatcgttcttgtttcattaagaatttttctccatttacctctattcatttgcttatttgcaccttttgaaacta

SEQ ID NO: 60802 - DNA, 1837 bp, Bovine  19866880682779
  misc_feature (1)..(1): n is a, c, g, or t
ntatgaatgacacagcctcatgggtgcaggttagtcaagaaaaagagaactccagtcagtgaagctcccctcaaaggcctcagattatattaatgagatcaccaaaggaatatatatttattttatactaaaacaaaatactctagtatgtacgcttcattttttcatgatcccctctttacatgctatgctatgctatgctaagtcacttcagtcatgtccgactctgtgtgaccccatagacggcagccaccaggctcccccgtccctgggattctccaggcaagaacactggagtgggtcgccatttccttctccaatgcatgaaagtgaaaagtgaaagcgaagtcgctcagtcgtgtccgactcttagcgaccccatggactgcagcctaccagactccgtccatcggattttccaggcaagagtactggagtgggataccattgccttctccacctctttacaggactttttcaattaatccaccacccattgtttctacttactttagtaaggtcctcttttattttgctaatttaaccacatttcacttcctcctgttactctacttcccccaaggcaaacccctctgaatagtatttattaagaaagctctctatagcatgactaaaaaatgctggcaactataaagatagcaagtctttgcattgtaactgtgagtagtgataaggaatcctaacaacctgcatacattaagatttcattctggcttcaatttacttctaaccctgttatcatctcatgacattttgcactactaggggaagaggttggctaaagttgttggtacagatgtaatttatggcaatttaaactgagtcaagaagttaataactttgaaataatgcatgcacctcacactgagtttaatcagggcttattaaagatgagttacatgtgccttttcgcccttcatgtatcctcatgtagaaacaagtttacctataattaagcaaaagccctcacaatgctcttaatattttctaaattgtgagctttctgtaaaaatgacttgtcagaacataaatggttaaaatgaagattcccgcagctcaccttcatcactcctcaggtacattatcagctaaaagcacatttttctccactctgaaagtacagaaaatgacactgttgtgaagcctccaggactcctcactaaacatgaatattcagtaccaagaacagaagcttcagcacatcaaattaaatgtaaccttaagaagagcttatcatttttgagttatttgcatcttttccccctagacttcccttcccaactgtggaggatgactgggcatttctacccagtcagcgtgaacttcaaatgaattcttttgctggggctacagagtgggcactctggctggtcacctataacaaccatgcaaccgccagtgagtcagtattctgtggataaggttatcactgacaagccttgagatactattcaagttctgtgagagtaagtatgtgttaggaattctcaattaggattgtttggttacaagtatcagaaaccccattaaagatgatttaagcagcagcaggcaccccactccagtattctcgtctggagaattccatggacagagaagcctggtgggctacaggccatggggttacaaagaatcagacatgactaagcaaccaatgctttcacttttctcagggatatactacacttaacctggaagttacaggggagcaaactggcctcaggcatagatggttgaggggttcaaacaatgaggtcgtatctctttctccttatgaatctctgctctcccagaaaaccctcactgtataagggca

SEQ ID NO: 60803 - DNA, 1117 bp, Bovine  19866880692450
  misc_feature (1)..(1): n is a, c, g, or t
ntttaaagtggtatcatctgcatatctgaggttgttgatatttctcctggaaattgatttcagcttgtgattcatctagctcagcattttgcacgatgtactctgcatataatttaaataagcagagtgacaataaataaccttgacatattcctttcctgattttgaactcgcctgttgctccatgtctggttctaactgttactacttgttttgcatacaagtttctcaggaggcaggtaaggtggtctggtattcccatctctttaagaatagtacacagtttgttgtcaaaggctttagcatagtcaatgaagccaaagtagatgtttttcacattagtgctaaataaacttaactcagtcaccttatttatctagggcttcatcactaccatattaaatgcagatcaagagatcaggccctgttttgataaacaaacaaaaaaacattaaactgggcaatctatattgcaattattgctgcttctgtaagtgcattcactgattcactgtaataatgaattcaatgacaagttggttgattttcaaaagtttctgatgcatatctatattcatgagcaaaaattagaagagtctgctacttatattcctaaaagctatcattaccgtcattatttcctcactaagtcatgtctaatcctttgcgaacccatggactatagcctgccaggctcctctgtccatcagatttcccaggcaagaatattgcagttggtcgccattttcttcctccaaaaaactatcatagccaacagcatttctaaatcctgatcatcaaactatttgactctgcttgtatagaaagagaagtaggctttggcctgagttacccagataagtgattaattctggtaagaccaatttgaatctaatatattttcccatagtgtacacattactttttatggtttattcctagatagcttctggtaggctatcctcaggtgttggatttaatgacaagtaaggaagaaaagtgaaaatcggtcaatcatcaaccatggtttttagtgtatagtttctagaccagtaatatgagtactacctgagaacttgatagaaatgctattctcaggcttgcctcagatacacta

SEQ ID NO: 60804 - DNA, 1416 bp, Bovine  19866880781995
  misc_feature (1)..(1): n is a, c, g, or t
ncttttgttgacaagtactaatttgggtttgtgtaagatgacccattcaaagcagccctcataggataacaaggtgatttaaatgggatttgtttgaaacaaatccttagtttctaatcagtatgtggtttggtatgacatggtttacagaatttcttacttttatcctccaccactttttttccccttgtttgcaatcataacaagtactacagcatattgtagagtttagaaataattctggtatctttatagggtttaaggaaaaggtgttttttcccccttacttttgctttaaaaaagtagagattgttaccgttatgccttgtgcactttgattaaaactttaaagcctaaactaagtcatctttctggcagatatttcaacaaactcttttaatgttcagcttggcagcatatgttttatggacatacaccgtcctctataaagatgtggtgattatgtgtctagggacagaggaattgaagccctctctgtaaagcatatacactgagaaaatatgtcattaattgaacattctatcacctatttaagaaaaaaaatagactgtcagatattcaatgtttttgttcctacttacactttctgtccttgtacctttaatagaactatttcatcttctgctttgtgtctttctccaaatctgtcttttgtgccatttatattcagaatagatatgaaatgaacttataaatcacttattatttttttgctgggtacctttctgagatgttatgtattagcttatcacacactaaaagggttctacaatcataaaaaaaaagtgcctgttcagttgagatttcagaaagcaacaggggcagttcttctagatatcagaaacaaggtgcttgattatattttcatatgtaattatacaactactacaatactttcaaattttattattacctaaaaaactttataccaccagaatgaacatctttctctatttcttcttgactcctgagctctcttgggaaatatagccatctctttttctattgcatatagtgttcaatacagaaacttgtcaggtggatgtcaaaaaacttagagcattctgagatggtacagatttgctcttccattcaaagtaatactgtgaaatgacagaagcagagggagataagtctcctcctggtcagagtagatttcaaggtaatgttgacagttttcattcaatatttttccacatctgattctcttccagatatttcccaaatcagatagaaatgaccatgaaaaagcacatattaataatcaaactataccatgctactaagtcacttcagtcgtgtccgactctgtgtgaccctgtagacggcagcccaccaggctcccccgtgccctgggattctccaggcaagaatacggaggggtgccatttcctt

SEQ ID NO: 60805 - DNA, 1047 bp, Bovine  19866880794051
  misc_feature (1)..(1): n is a, c, g, or t
ntggagttttaatagtgagatatacccaataataatcccataaaagttacctagtatataagctatcaatgtcagtgtggagaacataaattttaagtcactacagagcttatggcacatgcaaaatagagctgtgtcactgtccagttggacaccaacaggcttgcattactctagctgtcttttcttttcactactatctctcacaatttcagtggtgagccagatggctttacaccgtgcctagacatagcatgaagcaatatcaaatcacatcatgagataatgttcttttgtcagccttcctttcacaaatcttgctttttaactaagagaataagggcttctgaaacagaattttcagggagcaaccatatttacagataggattttggttttattatttctgccaaatacgtatttttatacagagcaaacaatactggtcttccattcctattctcggcataaagtccttctctaagacgcatttatttaataaacaaaaaaatgacttaaggagaaatgttgagtaatcaacaagtttttgacctgtaaatatagcaaaaataattaagggaataaaagactaagcgtatattttaaaatgtcactggaataggcaaatgactatgtttgagaaaatggtggttatttatcctagattggaatatttaagcaatagtattgtttggggcctagcataaaacttaagaaaaaaggacagactgacataaaataaaatctctttaacttctctgtggatcccttgaggcacagcaagtggtctttagaattagttaatacatgtctaattaatgaggcttggtacttgaacatctgcattttgctcttcatttattttccttctccaacagaataaacctctgaacagtcaaattatatataatagggccaattagtagagaaggagcctgaacatctttagagaagatgtgagaaggtatggttggcttaagatttaaactaattgtcgtacttcatttgttctcatttctttttctctgcaactttaaataaagtacc

SEQ ID NO: 60806 - DNA, 1729 bp, Bovine  19866880949953
  misc_feature (1)..(1): n is a, c, g, or t
nctagaggggcgggatggaaagcgaatgggaggctccagaggaagggatatatgtatgcatataactgattcatgctgttgtacagcagagactaacacaacactgtaaagcaattatactccaataaaaactaattaattaagacaacagcaaaaacaaagaacagagaggagcctgtgtggctggggcatattgttttggaaagagagccagagtggcctcaagcagtaactgcacggggaggacagtgcaaggccctgcagactgtggtaagagaaagcaatggagtattttgaaacaggatgatttgacatacgttgggcttccctggtggctcagacagtaaagaatctgcctgcaatgcaggagacccaggttcaatccctaggttgggaagatcccctggagaagggaatggcaacccactccagtcattattcttgcctggagaattccatggacagaggagcctggtaggctacattccactggtttgcaaagaaccgtacatgactaagtgactttcactttcacttgttaaaatattacagctctggctgctctgtgtaaaatgaattgtgtcagattacgactggaagcaaacagaccaactaggatgcttactttaatagacaagaggtaactacccaaagtttgaccagcataggactccccaaaagcagtccctggcttatattagccctctactaaagagataccgcaaataacttttttggggaaaagctctcaattcttcatttcccccagttaaccttctggaaaaaccaatctcacttcatctcagctctactgacagtgtttgtattttggcagatgtgaatgataagacgtgaaggaacagacccctgcccacaagatctcccagtctaatacaggagatgaaatgggtacaaataaaatcagaggatcagccatttgcctcacgaaataaaatttccatttgtttctctaaaatctacctccttcacacttcaaaggatgtttctaggactggatagtcaagtttaacagttatgatttttgtgtctcctttctaaaccctatccaccttttttctttcttatgtgaaaacctatttttaccttcattccaaagagaattgaggcttcctatggcattgatatacactcttaggaggtcatagctgaaggcaaggatgaaatctaggcatgctgttttttgttttttaacatataaaagcgttagatgaaaagcaaaatgctcagagattaatgtgtattttcacagctaggagaaagatgcgatggaagcaaattactttgagcagatatcttgctttaaacatttcagagcaatttcatcacaagctaaagtggaattatccatatgctggagatattataatcaacttaatcatttaatcttaacctttccagcacttgctttcttctcataaataatacttaaggacaccaattcaaatcaatattaccacactcacctaaataaatctaagtaaagtatcattgcactccagctaatctccactttcccacatttattctacgtttcaggtattagaactccatttctttaatactgattttcttcacaaatcaactgggaaaaatagagcagtttttttttttttttttaaaccacagcagaataaaacatgtataacaaattaattgagcatggttagaaaaagggagtcatgatccactcgtaatcatacctgcaaaa

SEQ ID NO: 60807 - DNA, 789 bp, Bovine  19866881235261
  misc_feature (1)..(1): n is a, c, g, or t
ncctgactcctgtgtacatgtgtgatcttaggtaagggccttaaaccacactgtgcttcgttttcctcatttgtgaaataacacacagtaccttccaaatagagtttgctctgaggataaaataaaataatggctgctaagggcttactcattacaatgccattgtaaattttcaatgatgctgttttttattattattgttagtatgttactgcaaacagttcaataaaatattaaatcagtatatgaaagagggtgatatttttcacctaagttggttttttatgtcttttggtttaatgaatggttttccaatattttttcattattggcacacctatgaatttagtgaatagtgtgaaagaatgaagtaaaatggatgtaaaaacaatctaaaaagtaaattatttcttcttcaatcatctcaaaactaatatcattgtatttaaatatataaagttaggtattttattacccaggtgattttcctactatttgaaattattacttgtcctgataggaagtatatcaaaatgagactctaaaatgttgctttcgtactgcagagctggtagagaagagctgtcaaaagcaaaatggaacaaggtagagatattcaaggcttgaaatgtacccagggggtcttaaagtctggacgggaaaagagtttcatagttctactttcatgaaaaatatggattgaaaaggagtagaaaatctgcccttcctcctccatcggtttccatttcagcatagaagtatctcagttccctggacagtaaaatatgg

SEQ ID NO: 60808 - DNA, 3267 bp, Bovine  19866881363284
  misc_feature (1)..(1): n is a, c, g, or t
ncaaatgtatttagtggagctgacatctgctctgaagatagggaaagttcactcaatctggaaaaagcaagaaagaagagagggcataatgacattcctgcatatgtcaagtgaaggctgagtacagagaatggtgggtcgtaccacagtgagaataaacatgattttaaggatagtgaaacacacacatatacaaaacaaacaaaacaaaaaacaaaaacttgagttggctcactccagactgtgagctccttcagtacagtaactattcatagcatttgtggcattttcagatcaagatgtagtagatgataaacaagaagaaatgttaaagagaaagaggaataatggaaaggaaaggaggagggcatgataaatgtggtataggagggaggagggagagtggcagggaaaatagaaaaaaaaaggacaaagaagaagatggatggaaggaaggcttcccttccttccaggatgggaggtagaggcataatcatagggaatacttagaagtacaatattcatatattcagatatatgtgcttctttgttggataaagaacacagttaataaaaatgccataaatggaacagtaaataaaacttcaaattcaatcattaatataccaaggcagacactgaattttgagcagttgaatgatagaatgaaaatataatttgcccttgagtggtaagtgcaggtgtacaacaaataaatgttgacattacctgatcatgcagaatgatatttataataacacattattgctaatgataatcttcctataattgtaatgtacaggataacattttcaaaactccctagtctgcttaatctgtctgctattcattcatatttttatttatagaggaaacatctattgtatatcttatgtgtaaggagcattgttccagatctaacaggaaaaggatgattatttctttgcatatgtacatgtgctgcaccttattccaaaaaagtagacagcagtggtgatatatttgcagagctggaggatattagaaaaattaaggagatttaaattataggcagttaagaatatcaaatgaagtgtagattttattttctatgaaaataagatttctattcaagaggaggagaattaaaaagattttatgaagcaacaaatgctaagaatacaactttgctaagagtacaaaagtgaattacagaaataacacgtgggaatcagacagaccacagggaagtattgtaacattccaaagtagctatgattaaggctttaatttaggtttttttgatggaaaaaaaatgcagaatttaaagaatcaaataaatttagtgaccaatttattgagagacagtaagtataaggaggaagttaaaaagacaatatttctagctttagtaaccaaggggttaataacttcagaggaatcttagactttggaagagaaattaattaaaatttttggaaagtgatttttttggactagtgggatatttaaaagaagatattacacaaaaagctatagaggttaaaaagacattaggattgcaagtacagatttagaagtcatcttcatcaagaagattttaaatcaagcaaccggactgaaagagaattctccaggaaaggatgctaaaccagaagaaattaagatgaagatacaatctggagaatacctatactttaagagcaaatagaggcatgaagaagattaaaaaaaaaaaaaaaaagatatcggtcagtacaatttgatttgttgttgatttgtactgcaggttattaaaacagacatttttattatattagacatatgtgttatattctgtcaggaataaaaatgaccctgagcagctagcatgactttatctataggaattattatattttttgttcaaaggagaactcagaggcaaaattgtggcttggttcttctaaatgtgtgtgttctttttattatttcatttattaaattatcatgtaatacaattgactttttggtatgcatatctatgtattttaaaataaatatttatgtaaacatcaccataataaatatacttaacagtttcatgacagggaaaactttctcatgctacctcattttgcaattgtatccttcttccaccccagcctctagcagccactaatctattctccatcactacagttttgcttttttccagcaagtcttctaaatgaaatgatccattacagacctttgaggactggcttctttcccacatcttctcctacagagaagctctgtcccacatctaaaaggaattccatgggtaagagaataggcagatggtggagaggatgtattcaaagagacaatgtctacaaaattccagtttttgtgaaaaatataaatcctcggcatgaggcctttgagatacacgcatgattttgtatgtgtcagtagtccattccttttcatttctgagtagtattctactggatagatataccacagttttatctatttactcattgaaggacatttgcatttttccattttttggcaatcacaactagagttgctataaacattcatatacaggttttgtgtgattataacctcatttatgtaaagtaaatgccaagaaaggaattgctgggtcataaagtaagaaaccaccaaacttttttggtgacattttatattcccaccagcatgtgaaagtacaagttgtcccatatcctcacagatgtcaggtactggccgttagacattttaatgagtatgaaatggtattgcattgtggttttaatttttatttcactaatggctaacagtgtcaaatatcattttgtttatttgccatgtatgtatattctttggtgaagttgtgtgtaaggttaaagggcatttattttgcataatatattaacactttgctctacttgtttccatatcttttccccctcaatttttagcctgtttttaagtgtatccattctttattatacgccctctaataagccactttaaatatttgtgaaacaagtatcaggaactggatgagagagagagaaaaattcatggtgacatataaatagttaaatatgcaagaaatggaatccctcctgcaattaaaaactagggaaattaatttaattctctcaagggcatttctagtttaccaaatcagacttgtaattatgtagtcatatgaaggaaacttggataaaagatgggaacagaaagagtcctagttttcctcactatctttttatagaaagaattattttgatgggtaaaaaagacaaa

SEQ ID NO: 60809 - DNA, 892 bp, Bovine  19866881634468
  misc_feature (1)..(1): n is a, c, g, or t
naaataatctatgtttcatttgacaagaagaaaagatgagccagtattctgtttttcctccaatagcctttactagaagattttaaatggatccaagttttgaaggaacttaagtttacagaggtgttctgattcaatcagctggaaagcaagaaaatagcaatttcaggtatgtaatcaatcaaaactatctttgcttcaaaagctctctaacaatgaatgaaggaggagcaaagctggaaagttacttccacttaagtatattactctttctttttattgttatctatcacaacgaatcataacataactcaataatgaatcatctccttgactgcagttggtcctaactataggatgaggtgatagatcacggcctggcttagtcaatgatgatatatccctttcaactttacaatagaatttgacttaagagtccctggtacctttgaaattgaaatgaccatttaaaagcctatagaaatatgtaatacactgaaacggtgtacatctggatgggatccgaaaagtgattggtttagcctgttaccccacctcaggccaaggtccctagaatgctgaagcatcagttctggatcagggtcggactcgatccacatccaaaattaattaatgatacaggaaaacttgaacaaggttgaccgttaagcccttgagaacaactgaggcttgcatttcttattctgatgagctaacaacaacaacaacaaatataataatgaaactacacaatcttcaactttaagctaatttttccactgaccacaagtatacacagcattctctcaatattcaatagcttaaaaatactacttctaagtgcaaaaacatctttactttatttgagaatatttgatatttacatatagaa

SEQ ID NO: 60810 - DNA, 1180 bp, Bovine  19866881758904
  misc_feature (1)..(1): n is a, c, g, or t
ntaactcaagagagcatataagaaccaaacaagtggtcagatgtagattttgagttcaaaggagaaaacaagtcaaagttagtatttcttttcaagtgctttcttaagtgttttaccagtcctctctcatttaatccttaaaatgcaactctgtaaaatagttattattatgcccactttacagatgcaaacatgtcaatagttttgagtgatgtgcacaagataatacagctgcaaagtggtcaaacttaggcaatgactccaactattgtaccccagtgtgggaaggatagcaaaactttggttagaatatgagaggtgcactaggacataaagcatgcatagtatttccagttattagaaagagaaggagtatcatggacaaagagtgaacatattgtaggcatcaggaaaaacatgacattgcagcgacagcaacgtgatgagtccatgtaaagcagtgttagaaaattaagatggaacgttaggaagggatcaaaaccaaggtcaagtgctgggctttctattgtaggcagtgggagataatacaactgtctgggtacaggaggagtagatagaaaacagacttttactaaccttaatctggcaggaatatggaatttaaaaagagaaaaagagcagaaagacccaaaacggaattgaaatatttgaaatccagaacagcagcctacactagaaataataaccagccagatttgtttaaggagtcctcaccaataacacaccagattcatttcttaccagctctgaaaaatatgccctcactcccaatgtttgtttttacgcactggcaccattttcagttacaaatatattcaataatattttgaaaaattgaaatgttgattcttatttactcaaatgtttttgtctttgtttagtctgaaattactgaggactgactctggttaccaaagagtccctaagaaaaatagaatagtcggagtatctatctaaaatctgacctagattaaatgttccgaatgttttccattataaaggacacgtctacacgaataaggtgttgagaacagcacactgcttataataaaggatactgtaatcaagtacttggtagcccattaaaaaaaaatacattctcacataagaacccaatgtcaaaaatctgcttctttttaacaaggcaaaaaaagaatat

SEQ ID NO: 60811 - DNA, 732 bp, Bovine  19866881780760
  misc_feature (1)..(1): n is a, c, g, or t
ncattttagaaaatttagaggctaaagagagctatttgagaacattatttataatagttcaagctgtgttaagctttatcacagacttttaaaatgtgagccccacttgaatgtttgtgtctggatggaaattatgtgtgagagaaaaacaaaattatctctaagagactgagaaatcaagacagtataaaaaacaaaacatagcaaaaaagaaaaaaacaccaccaaaagctactttctaatgtatttgtatcaaaataacatgaatagtgacataaactttcaaaggagaaattgttttgcagttgtacattaggtttaagtgttatttgctcattcatgctcaacccagggatcgaaccagggtcttctgtactacaggcagactcttaaccaactgagctacaagggaagcctgttagatttagtgtaggaaaatagagttcctcatggatctcaccttacagctgaattctctcccatgcaatctcaagcatggccagggcctcacttaacaaacacatgtggctattcaggcttgcttctccacaccagacccttctgtgagctgctgctgctgctaagtcacttcagtcgtgtccgactctgtgcgaccccatagacggcagcccaccaggctccctgatccctgggattctccaggcaagaacactggagtgggttgccatttccttctccaatgcatgaaagtgaaaagtgaaagtgaagttg

SEQ ID NO: 60812 - DNA, 1570 bp, Bovine  19866880427806
  misc_feature (1)..(1): n is a, c, g, or t
ntagttctgtgctttctgtgctttcatagcatagttaagacaacatacctgaggacagtaagaaatatgtctggggcttccctggtggctcagtggtaaagaatccacctgccaatgcaggagacaaggattcaatccctggtccaggaagattccacatgccactgagcaactaagcccatgtgcccacaactactgagcttgtgctctagagccctggagctgcaactactgaagctggcacaccctagggcccatgctctccaacaagggaagatactgtaatgagaagccaatgtaccgcaactagaaagtaagttctgctctccacaactagagaaaagcccatgcagcaacgaagacctagcacagccaaaaacaaacaaacaaacaaacaaaaagtgtgaatgggacagggacagatcacagaattgaagcctctgacctttatcctccaagtaacagaaacagttgaggattttcaggaaaggaaactatgaaatcaggatttaagattaatctggcaggagagggaaagacctgatgccaagaaacctattaggaagctgtttaggcaggacaaacagcagaagttgaaaggaagggaccagttgtgacgagaatagcataggaagaatcaagcacactctgagtaaattgacttatgaatattctggaaatgacaatacacctgaaatacaatttgaaaacgacaacatattttggtaatcaaatcattaattcaaacttaccctctgcgatgtccgagcacgatgtgccaatggctgtgtccccactgtcagctaaacttgaacaacgactgaagcggctccgaaaggcctctgagataactggggtctgccattcagtccccagggaactgcccttctgaatcacgctggaacctgaaacaaccagcatttcccactgttaatgttaatcagcttgtataataccacaaaactttttaaaaaaaatcacttaaacctgtgagagaagagccatacctcacccctttcttcctcctgtgcctatttcagctactctgaattagttaactttatttttttttaatgatgttttttaaaattaggcattcatccattcattcatggctgcacggggtctctgttgtggcatggggactcttcattgctgcaggtgggctttctctagttgtggcgagtaggggctactctctagttgtggtgctgggcttctccttgcagtgggttctcttgtctcagagcacgggctctagacactagggctcagcagttgtggcacacaggttcagctgccccaaggcatgtggaatcttagttcccaaactagggatcgaacccatgttccctgcattgcaaggcagattctcaaccactgaaccaccagggaagtccttgaattagttaagtctaaatggaaatagcataagagatgagaatgttcaaagacacaaaaaaagacctaccaaggatccaagagtactgagacagtaatagttaacagcggctccattctttgaaatctagaagccacggcactttacagacatggtctcatctaccta

SEQ ID NO: 60813 - DNA, 1169 bp, Bovine  19866880456162
  misc_feature (1)..(1): n is a, c, g, or t
ncctcttccgctctgtttcctgtttcattttctggctcctgctccgactggaaaacaaggaggctgaatcttgtgctcacaaagctctggcttgtcagaatggaggaagacttaggtgggatgggaggggttctgggcctccaggactgtgagtaagtagtggaggaggcagctctctagtctgcttttagagtctgctgctagaatggagcctgcagccacgcagggagccagctgagcggccagcgctgtgggagagccagggaggcagagacttacccagggctcccaaaagattctacaccactcagccacttccctaaagaagtaaatacgccacaccaccaagacacggtttcataatacagatctctgactaaattaaccaatgtaagcagtgtaccactgtttctagaatcctagaatgtaagagagttagaacatttctctttcttgaacttgcctagctatgctcttgctgtttcctctgcttgaaatgcttcactgccgattaccctttggccaacccacttcaggtctcagctgaaatgccacctccttggagaagctttctctgtctaccccacggcagtcaccaccctgtacttcccaccaccctaattctgctctctttatggcatttatgatcacctggttgtcctgtccatgaatcaagtatttgtttcattgtcttgttttcctcatggaatctaagtgctatggcggggagggggccttgttcaccaaggtgtttccagcacttagcaccttgtatattgtgtgtactcagtaaggatctagtgaatacatctgttcgtttaacctgcactttatggatgaggaaactgaggctcaggtgaaaatgaccagttctgaagttacacagctagtggcagatgtgggatttgaatgaaaaaccttcctggctgttttgttttttttttaccaccccacactattttaaatctttctcaagtttacctctttgcttctcttccttttttcactcaactatgggtctttatgggctatattgaaaattctacatagggcacaccaagtcttaacagctcctacctactgtttccttcattaaattccaattttaccttttgatttactcaacaaaatagactactatgtaatgaggatgagaacaaaacactgaa

SEQ ID NO: 60814 - DNA, 697 bp, Bovine  19866880473331
  misc_feature (1)..(1): n is a, c, g, or t
nttcaccaccgccacgcgccggcccagcgcgcgcaggaactcgctcatgcccagacaatacgtggtcttccccgagcccggcgggccgatcaccgcctgcccaaacgccgtggtcggagcggctcccgccatgggcggccggcatacggctccgtgcggagcagctgagcgcggcaggggagggaggcgggagccacaccggagacgacctctgagggcaacgacgggatcccccaacgtgcgcttcgccccgggctggccgcgatgccgggggctcgcctgaggaagaggagggaacccacgcgctgtgaggggatcagaaggccaggtaccgacaggacctgcacccgacttccggatgacgtcgggaaagcccggcccggagaggaagtcccgcccttacggtgacgacacagcttggcgccgagagctgtggagatgagccccaagtggtgacgctggggcgtggagccgattgggggccccgcagggacctttccgggggtttccccaccgtactcctggcccaaatccgaagagaaagagaaattcggtagttaacctttttattctcccgttaggtcgcagacccggcacatctgcggcgggttgttcgctgccccagcccagcactggagcccgccccaagaccgtctgttaggaacatgagccctctcttcttccgtgtccttaacgc

SEQ ID NO: 60815 - DNA, 4220 bp, Bovine  19866880478061
  misc_feature (1)..(1): n is a, c, g, or t
ncctgtcatgcaagaaacagcaaaaaccctcacatccaccacccgcccaggccagggcactttatcccttcctggaggccttcttgtgtctggtctgcccctttaggtccatcttctctgcagcagccagatggagggttccgatcacaagtctgtgccctgtctgtaccctttctctgcccttgggatagcccaggcaatgagatgcttgtgatcttagcctcctttcgccccactccacagctcagccacgcccagcttctcagatccttagaggagactctaagccattgtacatgctgttcctgctaactagacaaccattccttgtccatcctttgaggctcagctcacacactgtcctctgagaaacctggcctcacgctgctcctccagcccgttgcccctgctaagctgcacttgctgagctgcccagagctgactttgtgtctctcccactgcagcctgagccatatgaaggcagggcctgggtctgtcctgtgcacagtcagtccccacatggctggcacactaacggacctggtacatacttgtcagataaataaagatgcgacgggctgctcgggggaagtgacaagttccccgacatcagagacgtacaagcacccctctgctaaaacctgtccctctaggaggcctttcagaacactcctccccagtatgtggccaaaacattaggatttaccaagttccctctcagaagccccctccttggcttctatctgtaatcccatggactgagtgggtctgtggctaagtccgtgttccagatgcgtcaccgaagcccagttgtcagagcagccaaagccgattcccacgctagcccctgacctctgggcaccgtcacccctgctctgccagaccgtgcacctcgcgcatttgccaggtcagattcttcacccctgacgtgagtgggagcctgatgtgtctggtctttccagtgggctgaaggtgcccggggccaagggtcctgacttttctattgtggcccactcacccactcactcccacccccttgcccaggcacaaagaagcccatagagccccagagtgggacagccaggctgaatgagacggggacaaagagtcagagactccccgcctgtctgcccacacacctgggcctgcctcagccctcagggcccctgtgccccaaagaggccccgactccccacttccctcctggggaagggaaagcccaggacaaagtcagacgagggacgcacccttgggtgtgcgggacgtgaactcagtgtcaaagtagaaggtgtcatcgggttgcgccacggccggcttgaagggtggcttgatctcacgccggtacagcttctgcaaggtggagtgggcgccctggttaccttggcacccccacagcccatcagcagccccatgcaggaggaggagttaatggcctggacggagcacaggctatgcagacagggcataactgctcgccctcgggaggccggcccgtgcccccaaggccacgctgtcacctctgcttcacgtcggaggctcgagtcagcagaggccccctcccaccacagccgaagccctgcctggggccccagggtggatagactcactcacattccagtcaatggtggagtagaagacatgccgcttgatttcctctgccccatcagggccggagcctgcaagagcccagatgaggggcctgccccagggccttccgaccccagacagccgccctgtcctccgagtggccgcgcctcactggggtctgggaccagaggctgggctcacaccaccccaagtccagctaccatcccgaggcctacagaccactcagcattttccactttctggagcctcttgatgattgggctcccatgtactgatgggagaaggagggtccagagaagagaagctagacaacttgtcaaaggccaaagtcaggacaggtcaaacctgtcctgagatttgcagggggtccccacctcccccagctccgcaccaacttaggcctcatctctgctgctcttagcccatcgcccttgtcagccaccagacaggctctccctcctttcaagcccagacacctggatgggaccttacgaagctggtcaaggtccaggtgaacccgggagccaaggagccaacacatactgatcagctactacaggcacgttcatgtgagttcatttaatccacgaagctcgagatcattgtccctggtggagacaaggacctcgggctctggggggagacgtcaactgctttgggtcactctgctcacaaacagcactcatccgaccacagtatctgtggagggaccaccgcgtgccagcagtggggtcccgagcccctggcgcccgaactcgtgccccttctcctgagccagcagccttggcggaggagccgtgccggcctctgtcctcatccccagggggagtggagatgactcagttccttgctttcccccagacacaggtcacccccccgccccacactccacacatggggccagaaggcagggtggccgccggcattgtctgcccacacaaaggacaacggcccctttcagccccagatgtggccccgtggcctaggccacagctgtacccgctcccctcccctgggctggggccacttaccgagccggttggcaggattccgcttgaacagggccctcaggaggctctgggcttccgtgcttagaaactggggcatgcccagctttgccctgcaatggcccccgggtctcgtcagggttgagccccgccccggaggccccatctcacctcccgcctctgtccacatctcatttccagctcagtccagacaagccgtccactagcttccctcccagagactcaggattctccacccacaggccccgtgggtgaaaagggagccctagcaaaagcatagcactcgaaccagaggagtgtctcgttcttggagaatctgaggataggtgtggggtgatactctggcccccaaacgaggccaagaaaggagacacctggaggtgtcagagagaggctggagcttacttcagaatcagggtcatagtctccttccggtccttcccctggaagggcagggagcccgtcagcatctcaaactgcagggaacaagggtccgttcaggctctgctcccgcccctcaggccccccacctcctcccacccgggccagccactcagccccctgcccaggaggtccacctggatcaagaactgtgtgtgtccctcccctctccatcaatcagaccaccaggagcagaactaggggcctgaggttggggagaggcccagtacggggcgggaggcaccccaggtggggccaagcccggaatccttccaaggaaggaaactgcagctcggaggagtgtgaggccagcttagctatgagaggacaagagaagagccttagagaccagaaaccaccctcccttgcccccatgccccacagatggggaaactgaggcccaatgcctgggctggttgctggatgctttacccctgcctgggcactcaccatcaacaccccataggaccaccagtctgcactgtgggtatggccctggcggttgacaacctcaggggccatgtactccactgtcccgcagaaggaataggccttcttctcatggtcgatggcctccttgctcaaaccgaagtctgtgacaaggagcgcaagtggacacaccttcaggaccccctaccttcctcgctgccacccctgcacacccatgccctcctgcccagaggcctgagggcatcaccgccatggtactcaggaggaaggtgaggcccaggggggtgagatggtctgctcagcattacacagtggggacctgggatgcaaacccacgtcatgccaggcctggacttttgaccacttctaagtgcctggcacagcctctcaggacacgcggataccctagcactcagcccaggtccctctagagcccacccttccctcccctgaaaccagaggggcaggcgccctccactcaccagtgagtttgatgtggccttcctcatccagaaggatgctgcaatggagagaagggttcagggcccctcagtcgtgggcctttggtggggtcaggtgacgccacgggtctgtaggggctgggctcagcccagggaagctggtccaccaggtccggctgatgaatgggtgggtggcgcagggactgggggtgctgcacaggtgtgttgccta

SEQ ID NO: 60816 - DNA, 1778 bp, Bovine  19866880543353
  misc_feature (1)..(1): n is a, c, g, or t
ncctccctggtaaatggcacttctaagaagagtaagaataagaatcctggtcattataacatcagttcacgagtattcagggctgaccaactcaccagattctgtgctaagagcttttcttgatctcatcagaacttaacagccctagatgtaggtgccatgattatccccacttagagggaaactgaggctggaaggaggaaaccacttgctcaaggcccttacagccaggctccagaaccaggtatgttttccgagcccagcatggagttgtaaagagcatggactccagagccaggctgccttgggagaacctggccgatcaccagctgtgtggcctgcagcaagctgcacgacctctctgtgcctcagttttcacatgggaaaaagggagataataattgtacggctcctaggattgcggtgaggatgggatgtcctggagcacgggaagccttttagccccgcctggagcgtggtaaagtcagggccagcccttctgcttgtgctgctcccgctggtctcttgtctgccaccaagtcctacagaccccaggtccttaacagggccagtgttgtttctctccacttgtccctggtctaggacatcattatttgtcctggttctctgtcgcagcaccccactgccttcccccgcccacccctctctgcccatgcagcagagccatcttcctgtttcactcttccctgcccagaaccaccacctcagtggtcacccctgcccccagcccaccccgagcgccagcctctcctggccctggcccaccctggtttcaggacacaccactctgcgctgtaatctttctgggttccttgaaggcagggctgtgtctgatttatttcagggtccccaggatctatctcagcagggactcaataaatccctggtaggctgacctggctttgaagcactggggtcaagaggccctggggtcattctgaggaaggctggatttaagcccaacagctcactcagcagtgggaagaggcaggctcacctctgcctcaggggtgcctggaactggacaggggcactcaccaggggcaccttccggagagagcccaggactgtggaggccaggcagcccatggctgtaagagtagggaactcgcccctcagacagaatgtactgctcaccctcaaaattcttctcatcaaacaggatccagctggggaaggaaggggaagaatagggggacatgagtaggtattttagcccactctgtccttggcctgcacggcccccctgagatacagcagactgaatgcaaccttgatggggatcccccaggccaggggaggccaaggatgaccaggcactgcagcagcacgaactgaagtcagacttaagaaagaactgaatggactcacactgcccttcaggagaaatctggcagtcacgccaaacgccatgcacaattactcagcaagcctatttctcagaatctgttccaaggacacccttcaagaaacaacacatacacaaggctagtgattacacattgtttgcagtggcagagtggcagcagccaaatgtccatcaattggggattggttgaataaagcacgaatctggagtataacacagcagtcaacaaggatgaggaagagctttcaaagggatataaagtgaccttcaaacagtctaaaaaaacaagatgcataacagtattgataatatgtttcctgtttaaaaaattgagataaaattcacataccataaaattcacttttttaaagtacacaattcagatgtc

SEQ ID NO: 60817 - DNA, 1675 bp, Bovine  19866880550748
  misc_feature (1)..(1): n is a, c, g, or t
ncccatggtggccatgggagtaggcatgtatttctgagagcaaaggcctctggggccagggctccgctcacccaccagccctggccagtgggagatgctcaggggacacccccgcccccccgaggacagggctctacagcagtgcttacaagagaggttccaggggccaatgggggtggggagggggaggagatataacaggccagcatgagctgaggaccaggcccagaagaaggtcccaagaggcccagcatctatgagttagagaaagtcacgatggggtgtccgtgtgtgtgtgtgtgtgtgtgtgtgtgtgtgttgggcatggggggtggtgaggtcatttctgaaatcagagccctgtgtacaaaggactgatttggggaagtgttgggcagacaggcacgtatgcggatgtgtggtgctctggagttaggatggcaggagttctgttcaggcagaggtttcaaaatgttttaaaaacaggaatgccctctatgcaaatagaatcgtacatggaagtgtgaacaaacaaaacagataaaaaggcagcactctctggaactccgatcagcagcccctgaagggcccagtggtccccgctggagcccagtttggagaagctgagtcccagctccagacagagctcagaggtgccctcagcctgcagctctgagtaaggacaggtcaggtgaggtggccagggtgagagccggcagggggacagcatggccacggtccccaacctctccccaagtccaacgcctggtcccctagtctcttccctgttaatggaggccctggctccttcccttcccaggagggaccaaggctgagccagaggctctttggttagaaactaagattgacttgaatgagtagggtgacggaatgggaggggccccgcagaggtctaggggactcagaggccctggtccaggtagggagagagcttggcttgggagggggcagggtttgcctcacagccaggcaggtccacctccaatggatggatctggaaggcagttctggcgggagggagggcgcttcccaggaggcaaggggaagccgtgctgcggtgggggctgtgggcccagctgccatgcggtgggggagggccggggccagttcaggtcgggaaggaggaggggaaccccgccctcgccccccgccagcagccctagctctggtgggagagtccgtggtgggagggcaccgcccgctggcccccccccgtgctactggcccttggggatgaaaggctctccctccccaggctcggggtgggggcctgggtcactgaggcagcgctgtatcctctgagagctggggctgtcgctcggtgccggggtgaaaacatcgtcggtgcccggggatgagggctccttggtccgcatcgtaaggcccccatcggggtccttgtcgtcctcctcctcctcagccagccttcccggatcccggctcagccccaggaccttgcccttcagctcctcgttcaccaggtccacagactcaggcgactgcggggaggccgggtcgatggtgatcacaggcaagtcggccttgggctcataggccagcgggtctgcaaaccaagagcaaggagcatgctggcttccggccctgggtcctcccagtgtgtggcccacctctgcccacgccagtggctcccaaa

SEQ ID NO: 60818 - DNA, 876 bp, Bovine  19866880641869
  misc_feature (1)..(1): n is a, c, g, or t
ntggatggggaagatcccctggagaagggaatggccgcccactccagtattcttgcctggagaattccatggacagaggagcctggtgggctacggtccatggcgtcacaaagagtcagagtcagacatgactgagtgactaacacttccacttccataaaatgtctgaagcatcatagatgctcaaatgatcattaatattcatataaatgctcagttctttcctgtgctaacattctaggtttgtttgttttttttttttcaatttatttatcttggttgcactgggtctttgttactatgcgggggctttctctagttgcggtatgcaggcttctcattgcagtgacttctcttgctgcagagcacgggctctagcgtgtgggctcagtagctgtggtgctggggcttagttgctctgcagcatgtgcaatcttcctggaccagggattgaacccgtgtcccctgcatcggcaggtggattcttatccctatgccaccaggggagtccaacattctgattcttaaaaatttctttttttaatcaacctctcccctgaccacttgccatctgatgacaacggtagttttgagggactggcctcataccaatcaaatgagagagataagaagattaatgctgattctttccctactattattctctgcccaggcattccagtccacgtgggctgctgttgacaagtggtttatttagtactttttctccagaggagcctcagggcactttaccaaaactgacagctctcctcagagtgcctctgtgaaggaagccgccacgttgccaccacaggcctccaggcccctgggatccctcagctgcactaggacactcacctgtgtgtctctggagag

SEQ ID NO: 60819 - DNA, 2175 bp, Bovine  19866880642752
  misc_feature (1)..(1): n is a, c, g, or t
naacccccaactccacctgacataggaggagctcacggcttggcccgtgagaagccagtcctccctgcaggctctctgaggcccgtgcccagcctcgaggcccctccccgggcccccacggcctgcctcacctgagccgatgcgggcccgagacatggtgggcgagtccagcttgtgggccggcacggtcaggtagttgctgatctgacagaggaagagcagatgggggcagtggggtgagcagaggcggctcctctggatggcgccccaggccggtggccgcacacccttcctttgggtgcccggggtgcccacacctactctgcccatacccgtggagcctgggccagtgctgggtcctgagggcttggcccagcctcttgtcgagctctgggatgaccttggacacccccacactgtcccacctctcccgtggggacaccagcccagcctctagctctggccctcatctgcccctaaggacagacccaccatcaactcaggaatgtcacccgggccctggatgacccccgggattctcagtgcaacacgctatgactgaattcagctacttcttttcttccaaaacctgctccttcctccgtgtcccctcaaccaccccacctgcctaccccaatcaaaggccagacgtgacccctgcctccttttccccttccctcggtcccacctcaaactggtaaccaagtcttgccactccaacctcctaaatgatccttgaattctgcctgctcctcccctccccctgccacccccctaatccacccgcaccccttcccatgtgcttcccttactgagaacccttcatgacttctccatgctttggaaggaagcccaaacctttaacgccattaacgagcttccttgaaagctgagccccctgtgtgtggtcaggaacttatgcagtttcttcctttctgcctggcccttcccctgaccacactccctcccctgtgactctcattcctaagcgcactctgaccacttccttgtttgaggtgctcagagccccttgcacttccggttctgcccggggccactgtgtgctccataagggagggactgggtgaggcagttctgccgcgtggcacttagggagagctccgcaaatattctcctgaacgaatgaatgaaggcatgcgtgtctttgccttctgattctgagccttagttttctcactagaaaatgagaggttagagcacatggacagactcttctagatctgatacccaaggacacagtggggaaggggggcctctttgctgctctgagtggagaagaggtggagaaagcagctttctggaactttccctggggctcagcctttgaaacacatggggggtgtgtgtgtgtgttcggttgccaagttgtgtctgactctgcaaccccatggactggggagcctggagggctgcagtccatggaattttccaggcgagaacactgggggaggccaaaacaccagatgggagtggctctgtctcccagagggctggctgggggtgatgcaggcagaggaagagcccaggttcccagagaaaggcaggagccggctccagctttggacacaccttctgctccagttgcctggccttctgtctccggagcagcatctggttccaggcctcctcgtaggggtcggccaccagcgtgtgtctgttgtaggaccgcagctgtgggaggaacagctgtcaggcaggcccggccagggcccagaagctgggcctggaggggctggggtggctctgggcgtgtggagcggaggcgggtggggcggggtgggggcgggggcctcctctgcagtaagtgaagtgggccgggcaggggcagcccctcacccgctgcctggtcttctgcaagttgttcctcaggattttgcggatctcctcttccttgtccttggacagtgctggcaggatgcgctcggccggcagggacttggggttggatgttcctgggataacggggcacagatgagacaattcctgggactctgggggctgggccgggccagaagggtcccctgggggatgatccggttgggtgcaccaagcctgggtcctcagtatgatccgcccgcccggtggagtgacctagggacccgctccaggtgggtattgagggctcaacgtgtggcttgcagacgcggccggggt

SEQ ID NO: 60820 - DNA, 1163 bp, Bovine  19866880720739
  misc_feature (1)..(1): n is a, c, g, or t
ncaaatgtttatgaaacagggacttctctggtcatccagtggctaagatgctgagctcccaatacagggggcccaggtttgatccctggtcagagaactagaccccagatgctgcaactaagacccagcatagctgaataagtaaataaataagtattttttaaatgtttatgaaacatctactgagtgtaagacatatgctatggtcctgtcctaccccttctcattcggtcttcccagcgggaagtgttaacggcgttcacagactaggaaagtcagacccagtgaggttaagtgggctgcctgagggcacccagcctgtaagtggcaggggccaagaacagagcagtgcagtttttgttcactgttgcaacccagcacgtcccagtgcctggagcacactaggcaccgaatcaatgctgactgaataaaaggaacccaagtccaccggacttcaaagcccttggctctcttttgtacctcattacctcccacatgaagatgaatttatggtgagaagctcacaataaattgtctacaaacacctctgtgtttctggagaggctttgaaaattctcgtcccctcttttgcatggccaggccactgccctagttaacataagattctcttcctctcttaccaggagtattgcaacagctctggactcaagggttattttgtccttccattaaaaaagaagaagaagaagaaaaaaatcccaaaacgtctgttaggccctgattttagatttctgctttctcttctgggtctctctggtgtccaagatggttttgtcagcttaattttagtgatttgtaaatttgtgttctgaccatggtacttcccctccttagcgacatgaaactgtaatactggctgtgccctttccgaccacgtcctgttgtttagtccctttggtcgtgtccgactctttacgaccccatggactatagctggccatgttcctgtccatgggatttcccaggcaagaacactggagtgggttgcgacttccttctctaagggatcttcctgacccagggaccaaacccctgtctcctgcattggcaggcagattctttagcactgagctaccagggaaacatctgtgtgtgcgtgcatctatacgcggcacctcaactctggctgtgggcctgaacgc

SEQ ID NO: 60821 - DNA, 2200 bp, Bovine  19866880811619
  misc_feature (1)..(1): n is a, c, g, or t
nctacctgaggctggttgtacttgtccttgaattctatgaaatacctccataccctcaaataaatgattcctttgaaaaaagagaaaaactagcttgtcatacttgccactgaagaggtcttattaacagcagaaagatttagagttccttaactagccccagaaaagagagctgaaggttaggataaggctggaggtggtggaaggacgcacgctcccctctgacagcatcttactgttcttccatcaggcggctaaacttctcccgggccagatccattagcccgtctacttcactcttggagcgtttgaagttctcgatgctgaacgcatagaccgtcacctccaggatgcccaagttcaaacaccaacgcagagtctgagggggagaaggcaaggagctaggatccaggaagagcaggaagggaaacggggcatgcctcagccccatctcagtgctggaagtgggagacagactttcttccttcccactctgggtagaactaggataataccagaatagtgaaccaaacaagcagaaagccaccaattgagagactgaaaaatgcgaacttaatgagtattattacgctgatgctactgtggtttactggaaagaactcttcactgagagagtaaagttctaggtcctagcccctgactccatcatgcactagctatgtgactgcaggcatatcatttaacctctcagggcctaaatctccttatctgtgaaacggcatcacaatccatccctcaacaggtggctaaaggtacataagaacacaggtgcccatagcatcattattccagaagactgagaggctgatgagttacaagaaaacacgcaacaactgcacaagtgtgtagcatttaagtctccaaagtgtttccacatacattttttcatttgattcttcaagcaaccctttgagaaaggcattattgttttcatgcctactttacagatagtaaaactgagcctgggaaagtgaagaaatgtatcaaaagtccacagctctactgtacgaatccattatgtgaggttctagaacagcaaacattcatcacactgagtgacagaaatcagaacagtgggtgcctgtagagaggaagaggaggtagcataggctttcactggggtggggggggcacaaaggaaccttctagaaagatggaaatgttctatatcttgataggggtgtggaatagacagacaagtgcaattgtcaaaaccccaaatttgtgcatttccctgtatgaaattacatctcaatgaaaagagaagtaaaactcaaatttaaactcagtcttctggtacttctctaacccagtgccactaaaggtggagaacaaactggagctgagaacagcagtgctgaaacagggagcctagaggttaaaggcaagggatagaagacatccaaacagaactgaagaaataaagctgaagaaccacctttctaattcgctatcagatacacaaacacattaactgccaataggcttgggccctgaagaccttaccaggcagcgaacttagtgggtacatccgggttggagcccaccattgacctcagtcagtaaagacgctaataacaacttcaatttttgagcacttcctttacgccagcatgtgccacatgcttttcattgaaccatattatttaatccttatgttatttccccatactgtagatggaggaactgaggcaaagggaagctatgtaacttaaagcaggtcacagagccaggaagtggcagagcaggggtgccgatgaattctaagtgaccacagagcttaagctcctaagcactagggcaaaaccgcctctagtcataaaagagaaacttcaggtcaacagacctgaagactccacaatgttggagagaactccacaaccactcattcaaggcaaaaagtatcacctgtgctggctgtgttcttgtgccaggaagctgagatccatgggctagagtttcacaaagatcaacacagtccattgttatcgttaaatttaatgtttcccaatttgcaataggcattaaaaccataaaatgccgatgacctctgttggagtcatgtccttgtttgtctggtccttttcctagtttaagcacttaaaggcccgtgtcctgaaaaacacctcaatctcaggatgggtagttaccccttacttttgctctggaaatgtcacgt

SEQ ID NO: 60822 - DNA, 1830 bp, Bovine  19866880847324
  misc_feature (1)..(1): n is a, c, g, or t
naaactaaagtcttgagcctactgggagctgggatggctggagtgctctgtgcagggagaggaagccttgcacacacccacccacctgccataataggccctgggccacaacgatggaatttcaaatgtggaaggacagctaagcagcagaggtgggcttgggattagctcaaacccctggcccagtgctccagccatctgactttgctgtctcacattctcccattaggaccctgttctcagtgctaagtcgcttcagttatgtccaactctgcaactctatggaacgtagcccgccaggctcctctgtccatgggatttcccaggcaagaacactggagcgggttgccatttccttctccagcgcatcttccccacccagggattgaacctggcctcctatgtctcctgcactgacaggcgggtcctttaccactagtgccacccaggaagcccattaggaccccagctcccgttgactcagaaaagccagaccctgccagttgatctcaccttcttccccaccagggaccaggggcagaggagctttgaggaagctggattccccagaaccaccaccctgtgctttaaatttccagcctgcccaggctcccccaccccctccaaagacagtcacctcctgctgcttggcactgatcccccttctgcgacatcctttctgctctccccccaactcctacacagtccttgtcccaaaccacttcctgcagcttcccatctgatcagtttcttaggaaggatgattatccgcggagggaggaggcggaacattccctgagccaagaacatgggggaaaacgtcaccgagttcattctccacccgccaggagggccttcgccctaaacacaagccattcagccacggcctgaagggagtcacgcctcgctcccaaacctccgcaattgctgccactgtactgttatcctcactgctcggccgtggaccagaggcctttcattgggggcccgactccggtccgggccccagcaccactccgttctaagagacggcgccagaacggagcccgtctgccaccagggcccacgcggcatcgcgcctcctgccggtgtccctccggcctgccttgtatttaagctgtttgcatgtctatctcccacacagaactgtcagccgcctcccacacagccctgcagatgtgtacgtagtaggtgctcagaggcgagtcggggagaaggtggggcgccgggggcagcgggctcaccccttggaacccagcaggagcaaaggcccactcccaccaccgccgaagagctccagaccagggcttgagacctgaactaacccagctctgccaccgcccgctgtggcctgtgggcaagccatttcctccctggccttctgcttcctcctctgtgacacagggggctgggccagacacggatgagccctcgctgctgcgtgctccccacagcaccgtcaccgaacctcccaacgccgcccatcagtcaccgcacagctgggtgaccaggagccaggattcgagtccaggcctcttaaaccccaccacccttatctttttccattacaccccctgaactcctgactctgtctctaggatccctgtcaacaatcgaggctaattctctgattccaggccggccctttctgggcctgataactccccaggccacgtgggcccagggttcagccgggaacaggcatgtcagggtcctggggctcagcagtgccacgcctcccacacgacaggtctggtgacatcctgcccggggcgggggggtgcagggctgggccaggagtccagcagagccggcacctcactggcccct

SEQ ID NO: 60823 - DNA, 1617 bp, Bovine  19866880866016
  misc_feature (1)..(1): n is a, c, g, or t
nggcaggcaccagacccccaaagaggaggctgcctccaagacgggaagtgggccggctgcctgcctgccactctggcccaggttctgggtgggggcccttggcacctgctacatgcttcttcatcatctccagaggagagcaagagacctgggtgggccgggcaggggaggggtccctgggggggcctagcctggctctctcctgcctgcgctggagcttttcatcgtcgctcaggtaggggttctctggctcttcttcctcctcctcctgtgccttctcctccttctttacttccagggctggcacctcctgggggctgggtcccagcacacatggcccaggctggtcctcctcgatggcaggcagggtggcgtacatggccaggtaggaggagcggggggctcgaggtagccggtgagtgcgcaggatctcaggaggctccatgctccgcagggtatccaggaaaatctccaggtcagcagtcagggccacctcctcctcctccctcgatggctccaggaatgtcttgtccttggtggcttcagggacaagctgggactcctggctggtctctgctcccatcatcaccggggctgggggacctcctggaccagaggataccttgcccactgaggaggagggggcgatgagagtggctggggcctggacagctactttctgggtggaagatgggacattagaagcatcagggtcctggacaacttctttttgggtgggagatgagacgatgctttcttcagacccctggacaaccttttcctgtttgggggatggaacggcaggaattgtcaggccttgagcagcctcttccttggggaggggagggaccgggctgcctgctgtactccagacgacctctttctggctgatcaggctgacttctgggccctgggcaacgttggttggtttggggcctgaggcagcaggagcactcagaccctgcactacctctttttggttgggagatgagtcagcaggaactccagggccctgtactatctctttctgggtaagggagacaacagggactttttcagagtcctgaacaaccttattctttggggaggatggagcagaaagacctcccgggctggtgatggccttccatctcatagaggatggagcaagagattgtccagggactatcacaacctcagtcttcaccataggaaggacggtggccgcagggggatctgaaagcccttctcttttgatggagggcagggcctggggtccccggggcttgagagtgagctgggcccgagcctgagtaggtgcttcaggttgctctggaggttgaactaggtccagggagagggttcgggtctggagtctgggagaggaaggtactggggtgtggccctgagaggtctggagaggggactgggtggggctggcgggtctctgcacccttgggacctcatggaccccggcacccagggttctgtcctgttcctggtctgggtgggctgcagggacctcctggctcggagtggggtgagcttcctccaggaagcccgcagggcccggggcagatctgtccttcggctctgctgtcctcgtctcaggcagctgcctcagggctacccttctgt

SEQ ID NO: 60824 - DNA, 770 bp, Bovine  19866880937395
  misc_feature (1)..(1): n is a, c, g, or t
ngggggcgtttccacatagggcatgtctgtggaaatggtttccgatcagcggactctgtgcatctgtgtgtgtcagttcctgtgagggtactgggtgagtgatgtggtgaggccatgtggcaaagggccgggcctggtccccccctgccccacggctacctgtgaggtccatgccttctgcaccgtccccccccaccgcccccacctcagggccctgggcagacaagcttcttcagggcagcgctgagtgcggtcgtgcctgctctgtgggctgccattttgggtgggcccagccatgggaaggtcaccacagggggaggaacgcctgtgctctgggccagactgtcagaggtggtggccctgctgccttttaccccccattgtctcctggaggtgtttgcaagtaaagggtgtcccctgtgtggctgccgcctctacttgtgacttctgtctgtgtccggctcttctttccttaggatcagagaagacgaggagaaaggtctctctgcatccaccctggagttgtgggcttggggtctacggtgtcccctcctccgcaggggagccttacccatgttctgtccctcctcccggcagagggggaagtgagaaggagggggtcagggaccctgccttctgggccaggaaagttgcaaaagcagaagtgaggggagtagccaggctctctggccataggcgtgggacccaccatgcagaccccagcagatttccccagggctgagagagactcacgcccctgccccagaaag

SEQ ID NO: 60825 - DNA, 2259 bp, Bovine  19866881009197
  misc_feature (1)..(1): n is a, c, g, or t
ntgaacaagataaataagtaaagcttgtagtaattgttagtaataggtgcttaggtggacaagacagtcagggattgagtattaacaatttggggaaatcttagctttgagagtgctgcttacttgggaatctgagttccattcctggttttgctcgattggccgggcactgccctcttcagaccattgtttggctaaggaaaaccgaacgtgcatctgagttctcgaggtgctctgtgctggagatggaggcaatttggaaggaggccatggagcccaaatgcttccagactggacctgagaatcgcctgaagagattcctggccccatcccagagctgctgattcagaatctggagggcaggattctagtatgcggctgaggaggttaaggtgcgacctggctagcacctgcccctctctccccagctggtcagagagctgggatggaaacccagtcgttctctcagtctggtgtactcttttcaccacgttgtactgctgcctcactcttcagattaaaaagttgtaaagaaggggatgtttaattttatcaaatggcatttcattcttgtttagttactgtcttggggccttgtgtgcctacatgctcagtcgtgtctgactctttgtgactctatggattgtagcccaccaggctgttctctccatgggattttccaggcgacgacactggagggggttgctattcctcccggggatcttcccaacccaacccagggatcagacgtgtaactcctgtgtctcttgcattggaggtggattctttaccactgagccgtcagggaagtcttgtcttggggcctcactgttttatatattttatccctgttttactagtacctttctcaagagggtgtgtgtctttcttagaggtttttgtaattcattggaaattgggagaatttggtttgctaagtttggtgtttcaaaaaagtgatcatttttggaagaccactttactttctctgtgaaaggtggctaatgaaagtgctctgaatgagaagaactttatcatttgttggggaatttattactttgatgctctagctgctttatttgaagaccctttcaggaaccaacgaagaaataaagatttatcagccacctggttgtggtttttctgtcatatgcctcttttggatggacagctgtgaggtggttattacagttggctctcatgatctgaagattcaatgactttcccgctctggtctctcttttctgccttgagtgaggttgtttcttttaatcccctgatcttctggtttggaaggatggagcacaacagcctaaatacctctgagcctggacaagccaagcctcgtgtcactttcgagacagtgtgggttggaaggtctctgagtctgtcgtctggttgcagcccctcctaggggttccgtgaggttgatgcttcaggtgatgtctttgaaatgcgctcttacttaaggctgcaaagaggaatgtgccctcatcttcaggaatcacttccggtaaacagaatgggggtaggtataacttttcattgactttggattttttatttatattgtgaacatgtacagaactttgaaagaatttttttttttttaaactgtctctttggagtggtagttgtaaactagtggttggtaattcctctcacaccacaggcgtatgaccagtttgttgagcacttgaatgaactagaactaaactgaaagaattttcactctcttgtgaagtagaaaaatggggtgtgattctcaggttatgagtgataagacatataggctaagtgggttgatttcctgggttaggtatgggtagatttgatgagagatttttattatcaatttagattcaggaaatcatcagtgaatgctgctggtgagaccagataggaagtaaagaatctcttactgccctgggtcacattatcggtggggaaatgactacttaactgcaagacaaaacgaaaaggaaggaatctcattgttggaggcaggatctgggatagaactaaataagcaggtttctgggcagtttctccgtgattggggttgggctcctagaccagtcttcaaagccttgaagtgtgctggaggagtgagaaaagactgaatgaggatacagatgtctgtatggctggggaggggagcacaacgagaatgatttatgctggtcaacacgtgtatctcggggtgcaaagggtgggttctgtttatggaagtctgctcagtccttcctaagatctgag

SEQ ID NO: 60826 - DNA, 1059 bp, Bovine  19866881018801
  misc_feature (1)..(1): n is a, c, g, or t
ncatccattgaagcgcacgattcaatggcttttagcttattcaaagtgcacacccatcaccacaatcaactttagaacatttcatcaccctaagaaatccccataccctttagcggtcaccccctctttgtccgcctgcaataccagagaccacctgcaatgcaggagacccagggtagacccctgggttggaaagatcccctggagaaggaaacgacaacctactccagtattcttgcctggcaggctatagtccatggggtcacaagagtcagacacaacttagtgactaaatcaccagcaccattctctttgcccccagcctcaggtcctaggtaaccactaatctaccttctgtctctgtagatttgtctatgttggacatttcatataggtgaaattgtacaatataggtctttcgtgattggcttgtttctcttcccatgtttgcaaggtccgtccatgttgttcatcgatccgtcttgctccttcctctgaagtggcagttcttttaacagatgtgtgggtgtcaagcaatgtgaccttctcccccattccttccaggggagttcctgggtgccaccgctcctctaaaagaaggctttttccttccatcgctaactaccctactaaggaggccttttgcagagttctccttttccatcttttcgctgggactaagcagctcaagtacagctggccctaggccaagtttctctccacagcacctgcaggcactaccagtgctgccaccttatgcccattccttgaagtagtggacactggggcaggcactgtcttcctccccgagagcccagctctttgctttttgctcagcactcaagggtgtgactcatgacagagtgtgaccaggagaggtcgagggtgtgctgtgtggccatgcatgcctggcacctccaaacagccaaaagccagagaaagaagcaaatgcagatgcacttcaggctaaaggggggcatgttttgcaatctctcttcctgattcttggctggttcttcagctcccatttctcttcctctcctcaattcactttcattt

SEQ ID NO: 60827 - DNA, 1481 bp, Bovine  19866881047686
  misc_feature (1)..(1): n is a, c, g, or t
nccgatgagctgagcgtgatgtgatcagatgtccatttttgaaaagcacctccaagtacagaaagtgcatttaagggatgtgattggaagcaggagcgtttttagtctccaggtgagaacggatgaaatgttagtatgagaatagaaaaaggggtgtggcctgggaaaaatactaaggagatagacaaccagagctggtgaccaggtggttataggatagaaggaggtggagcagaagttagactcccaggtggttgggctggttgtaggcctccttggtggcttggatggtaaaggatgtgcctgcaacgcaggtttgatccctggatggggaaaacctctgactcctggaggggcatggctacccactccagtatccttgcctggagaattccatggacacagaagcctgatggtctgtggtccatgggttcgcagtcagacatgactaagcaactaacactttgacttttcggggtggttgtgctcactgaggccaaaaaaggaagaggagagggcaggtttgtcaggtgggtagcagggatgggagctgagggttgtgccatctttgaggggcatggctccagagcacgtgccacaacacagagccggaaggttggcgcgctccagttctctgctgcttagcactgtggggaaaaggcacaaagaggagcgtgtgagtctggttgcttcaagggacttctcagaccagttggtccccatggcctgaagctataattatgaggaagggaacaggatgggaggaacctgccagacacagttgggaggcaggcatcacagagatcagatcctgcccagaccagttccccatccttgcctgtgctgtcagccttgacaagccccccatcagcaccctgggcctccaggagaagtacctggcgccctcagagcagtcagtggagcaggaggccatgcagctgtagcagcaagctgggctccggaggacgagacacacgacccagcactggggggagtggcggctcccagtgaccagctggacagctcagctgcagcagatccaagagcagccctccgggctagagctgggagacaggcatgaggatacctaggcctgcagaggacttctggcctgaagccagacgtgtcgcaaagcagagcatcagtcacacccttatgagctctggatgctgccactgggcattcagcactgacccacttgggctgtgatgggatgtgctgcaatacaagagcttattttctacttcttgtggcttccaaactttcttcccgctaccctggccaagggaggtgggaacgtgggaaggccacccttccccagaagaggcctgtttcttggtattccagggcaggctcgcccccaagcccaggaccatgctggagggatgacccagtctccagtggtgctcctttgtccatcttcagcgctaacagtgaactcaagcctgagctttcacaagcaccatttccagcagatcttg

SEQ ID NO: 60828 - DNA, 2349 bp, Bovine  19866881115218
  misc_feature (1)..(1): n is a, c, g, or t
ntcaagcagcaactctgggcctgaagagcacatagcccagtgcccaaaagccccttagtgtttcatatcaacattaacttcctggagggcgacaaaaatctgtcctggattactgagtgatttctaatatgtaccataaccaacactaagtcaacatttcagggatcaaatttcctagttggctgcatgttggaatgcattcttggcatcagacttcctcccactgcagtccacccttagaaaatgcagacgccactgggaaataaagattcaacctgtcccaagaccatcttctagtatgcacaaatgactaacaaaaataaacaaaagttcactcagatgtcccttcaaattcactaatgccatccatttaaacagggggaagagtgagttcaaggaagaatactcaggacagttaagccaatattcaccctaacttggattcttctaaaacctagattgactgagaagttcatctcagcacctacaaacttgctgctgaaccactgtgcccatttccaagttgctggaaactcatttttgcaaaatgccagaacggccaggaaaaggtggtgaaagagatatttccaaactagaatctgtattcaagactccatacaactttacatgggaacagcataacccaccctcctcctccaggtggaagccctgtagtaacctggcactggatcctccatgcacctttagctgttaagcatctacttagagccctttgagaagtgccaaaaattgcttgtgatccaatcacacatggaccagcaggtaaagagaaaccaaaattactacattaaagaggctcctataaggaataagcatgtgtttgcagcatttaggagcttcttggccacagccaacctagtcaaaaacaatattgaaggccatttctgtgaacagatgggcaaactgcgtatatgcaggtttacccgtccaacaaccctcaatataaggtctgatccaagcaactcagcttgagcatggctcccaaatcttcaaaaacagcagcagtctaagatctggacaggtacctcatggctcctgttttaagaaaggtcaattacctctgccaaaaaagaaaaaactcaggttctctaaccaaagttgaaccacggacactgaagcatccagggcacacaactctgaaggtgacacaaccttccaaacccaaaattactacaaaagaggccctgaactggccaagaacttggcaggctgtactaaaggccccatgtaaccacaggaaccactaagaccctgaaaccactctctttcatggaattggttacagtccaaatccccaaagtcaccagaatgagacaactacaggtctggggatggatgtgtaatttggattctgtaaagcccgtgaaactcagagtagcactatgaaaaagcaaattagtaatttaactttcccttttttggacatttaacttcataaatcactgcctctgaaaagctgtcccaggtttaccctgcccaaatctcattgctccttattcccagattccttcaggccatacacttagtttggtctatatccatttataaaaccttgctctgcaagttttccacatgtgtgcacataagcatgcttcccaagaaaactaaattcctctgaagcagatattgcctctatctctcaggtccctccctagtatctagtagatatgttcagacagagctacttcccactctcatctgaaactccagacctccctgagctagaaatcaggctcttagcaacaaacctgaagttctaagaccctccctaccaccatactgggaaaggcctggataaccaatgtgagtgtcaacccaagtttttgtatcttgttttaaaacaagctgatagtctttggtaagtgagctgaacctaactaaaaattatggtcagagccataattacattcatactccctactatcgatactatgttgggtcaaaaaggcacttccaggaatctggtctaaaaaacacttcttgagaagaaaactggtgtcagagctagtggattacgtttgaaaagggactttgagaaagtaaatccagtcatctcacaagaccaccaagggagattacgatcagaagacagttcaaacaattctaaaatacttcctcctccataaaaaggatgtttcactaaaacaacccagaaatgtgtttaatcctaaaatggcaattttaaaaacaaaaattgaatctacccacataacccttcaggcaagatttgttgagtccccaaacactgtactgaaacctggggcattaattttcatatataaataagtgatgcataggagtccagtaaaaactacataaataaacaca

SEQ ID NO: 60829 - DNA, 669 bp, Bovine  19866881120400
  misc_feature (1)..(1): n is a, c, g, or t
ntggctttgggtaagtgacttggcctctatgagtcctcagttttcctgaataaaaatggggcttgttgtgagcattaaatgagttgatggaaagcatagcagagtggatggtaactattaatatcatgtgaaaagaaaaccgagccttattattataaacatacacacttaaagcactaatatggagctgatttctatgcaataaggaagggccccaaaccaagtctcaaccaaaggccagaccctgcccaactggagagacgatgaacgaatggtcagaggcactcactcagcactacctccgccctctccagctcacacattcctctggcctccacaggccttgggcccttgaggaccttccttggtactagtcatccagcctgggctctcccaggtcctggggaaagctggagattccagaacattagaaacctggagggcagggcctgggagacctagggattttggcagatgttttctgtctcaaggcaggaagacttctcttcctgccactctcgccaaagacctggtggcggctcacaccacgagctccaggccctcagtacagtgctgggcagggaaaagggagtctcctcactccttcccctcccctgctgaagctcaggggtgaatttgggagccaggctacctaacacctcctgcccg

SEQ ID NO: 60830 - DNA, 1248 bp, Bovine  19866881141364
  misc_feature (1)..(1): n is a, c, g, or t
nagagttctagactattgcaaaaataatgtcccaaaaagctccagtgcttgaataatttattttggataagcaaacttagtattttataatgttacatagttctggagaatcagacaaacctagattcaaatctgaactctaccttttactagttttttttgccctagggcaaatttctcattcttactctactttctcgtctgtaaagtgggaggagtaacagtagaacccgcctttcagggttttgaagattaaatgaagaaattcatggagacacacaagcatagtgcttggcacacagtaagtactcaaagacatggcagttgtcagtaatagtcacctctgacatgccatcagtagaaaacacggaactcagtgaggtccctggtctatccctggcccaggacaaaattgtggacacattaactactgaagtgatccccaaatcttttataactttggcagcccagactcctaaacaagtaaaaaagttagaagtctagaaacaaaaggcaggctaatgctcacgaaactccatcactttgtggccagaacagaatcttgtccaaaatgcaagagagaatgccatctgtattcaccagagaagatgcagtaacaaacagtaacctatttccagcatttctgctcaggtgacttctttaagaacagcagaaagcagtaataaggtctacccaagagacaggggaaatcactgggcaagaagagcccaaagacatatctgtttcctctaaaaggaagcacccagcacgaggtagcctttaatcctctaccacgtggctgaactcacactcttcttaaagtcaaagtacaccaggcaccagtcagttgagaataaacagctggatccagatgcactcatgcaagttgtgacctcaaggaaaacaggaggcaaaataaaaaacactaagcacacagcaaatgggttttcaaacgactgacatcacaccagtccctcatctcccctgctgctgtcatgctgctgctagatcttgaagggggagttccttttaacagagatgtctataaacaagcaagctgaaagctaacaagtttaagagggaaacgcatacaaaattcttggctgctgggtgaagagccacaaaaaaatcatgaatgcgccagtgccaagggaagaaggaagtctaatatctaacactgcagacttggggaacccagaagcaatgaagccataaggaagcccaaatgcaaaaaaggcgagggggaag

SEQ ID NO: 60831 - DNA, 1249 bp, Bovine  19866881177497
  misc_feature (1)..(1): n is a, c, g, or t
ncctgcatgctctggaggctgtgcttcacaagagaagccaatgagaagtcacactacaactggagtgtagctcctgctcaccacaactagagaaaagcccatgcagcaaaaaagatgcagcacagcccccccagaaacaaataaaaaaagtatgtaagatagttcaagatgttttcagaatatgaaagggaatgggagggacaaatgatttggagcagaggagttataatttgcagtaggagtcacagacaacttggaagacaatgtgcccttcacaacccacaagaatccctttacttgaaacacaagatacctgaggcaggtaggtatcagccataaacctgaaaaataggggaattcactggaagtctatattcaggttagctggatatcattctcaccctaggttttcccaaaaggagactggagatttattctttgaggagaaatcaaatcagagagagcccagctcaggggtatcagtcatggcagagagagacagagagtgaagcactgggttgaaaataagcataaataagaatctatgtgtagaactatgggactttaaatctaatttccttctcagtgttgagaacccaaaggccaaaagcattcctgtccccagcctccccaccaggcagcaggctgaagattcttttttagagagagtaagatgagacatcagatattgacatttaagggttcccaagtgaaaagggaagactaagtctgatcatcccacagagaagcccaccaggcaacttccatgaacccagagcttccatgcaatttaaaaatactatattcttaaatatgagcactctttcattcaaggatcatcaatcctctaacgtgtaagacacaaaaacaaaataagacctgaaagaaacactataagcagatgcagatatcccaaaaggcataatcaatatcatcagagaaaagatactgcattcatgaaacaaaaatagcaaaaaaatgcattaagtaagagaacactattcaaaaatacagacgtgtatgtcaggagaaagaaaagagttgaggacagctaattctgtagagtggggctgatattgatattgatgttgatgtttgataacatgttggttatttaacttagacacatgtattatttcgattacaagttttttttctctgttttttcaaacaagcctctaagtccacgctgtaccaatgcaccaatatcgcctggtaagattgtcagaaatgcagaatcccagggctg

SEQ ID NO: 60832 - DNA, 1539 bp, Bovine  19866881244277
  misc_feature (1)..(1): n is a, c, g, or t
ntccacactcctccactgcccacctcccttgaccctgcatctccccttctccttcaagttcaagacaccaggcaaactgaagccctcgtgtctctcccaagtgaccagtgccccttcatggctgggcctctgtatttgttgctccttctgatcagattcctacttatcctcaggtacaaacaaccctgaagccttccaagggaccagccaccagggagcccactggtcaacaggaaaccaatcatctgtaagggcagacgtggccattcctcagcccctggccttctgctcttggccacggtggaggctggtgaggaaggatacgaggagaagtggaagtcagctcccatggcggcagacatcatggcctccaggctccgctgctcctggaccccaaagcagtagccgttggctttatccacagcctgcagcacctgctggatactctccttgtcctgagcagggaggagagaaacagaggtatgtggaactgaggttgtaccaaaccaactgcattctccaaatatgccccctccatcttgcctcgtgaagcctttaatccatgcagcttccttggcctggaatatatctagtgtcgccagaggcccgactacaccccttctttcctaactgccaactcacccaaattagaacagataagctcctccatgcacacttaccatcccctgggttgatccccactgtggctatgagcctaccatcttactattaacaagttagtaactcccccactggactgtgcacccttggaggtcaggaacctgtttgcccagacatccccagtgcctggcacaggcatttagctaacagcaggcacccgtaaatatgcatgtaacttatttgttcctccatataaaagtggtaaggatggtccctatatcacatgatgggaaagagatcaaaacagtacatgtaacagtcctcagcacacacacacagtgtctaatacagaaagccttcaacaagctgtaaattgtacgattaatattatagggttcacctcctcactgtagaggagagaagtgtggcattaaacagaagagacaagttctttaagtccaccacagcagaaaggataatctaacacgcaccttttcctcccaggttccctttgcagggtacaaggtgagaggcacaagagttgggtactactttgcaaagtcaacagtcagttgcccatctggaaagagcctgaaagacttgtctctggccttggtcaagtcccttgctgggcactttctgaacccctccattttcacacagaggaggtaacatacgtggagagaacccagcaaaacagaacagacagggccaaagtctggtccaccctctttactggaatcctgcctcccactggcctcgaagccaatgagactgatgagctgagaccaggacaaagactactgttcgaggcctccacgcttcctatatccttggtctgcaagtgcagtcccaggcacgtcagagccgatagccaagggagggagtcgttccagtgcctagtacaagcacacctcg

SEQ ID NO: 60833 - DNA, 4368 bp, Bovine  19866881254889
  misc_feature (1)..(1): n is a, c, g, or t
nagcttcttggagtggggagtgggattcacctgcctgtgcttgtttcagaggggaggagccagaaatccatggcacacgcgtgtgtgcactggattcagcccacgtgcgctggctaccccttcagggggtggaaacacaacagtaaacaaagaccaacatccctacccttgtgaaaatcacactcgaatgggaaagagaaaataaactaaattatatagtcttagaaggtcagcgacgcctaagaatatacgtagctgggtaagggattggaagtgctgaggtgtgcaactttaaaaagggtgtgcctccttgaaagggcaacaatctgactgaacaaagacaatggggagcaaaccatgcggatgtctggggaaagagccttccgggtggaggggactcatcacatgctcctggcaggtgtgtctggggaagggcacgtgtgcctgaggctgcccggctcaccctgcacaggtctgtgtgctgcccaagagaagtggaagacgggagtttcctgctaacagctaccacttctggagagctctcccccagactgggcgccaggctgaggtctccccaatcacagcatcccaatgcaccccggcaacaactccacgagagaaggacaagtatttccattttacagacaagaaaactgacgccagagaggcttgtgggccattgctgttaactcctgcaccatcctgcccttacactctggtttcacctggttgggcatgacagtatgtctcctatacatacatgtgacatggcacatttggcatgtgacagataaaaaagcttgcattactgtgacttggccattttacaacgatggcagagtggtagcagttgtgcccacctgtacattttcttgatggaactgtgacacctgatacggcttgtggtggcagtgtcagaggcctatatgacagcgggcgtgcctgttggggtgtgtttggaggaggtgtagtgtttccgggtgtgagagaaacactgactcagtggctggcattgttctctgatggacaatccctgtagccatctaagatgccaggacaggaaagaatcaagaactaggagccagaaagggggaagactgagggaggaaaagacccataccccttctcctctccaagcaacagtccatttccccccaagacctgcagtgggtaggagagccccagagcaggaactgccttgttgcgaaatttggggattgaaagataggcccccaggaagctgctggacgtgttggcccttccagtcccactctctgccctccttcatgctctgtgatcctgggaggctgacctctatgaactgtgcatcaatggctcccttgttccctgcctctctgttgggttcagccaatgagagtccccagcaggaggtaccagagggaggaggagaatggggtgtttatttccctgctcccttcccaacttcccttctcggtggttgcctacatcgctcaaccagaggccactgctcctgtcagggtccctctccgcacagttgcactctccaattcccaaagcccttgcctcccctctcccctctttaccccttcaggcccaggagtcgtgaaggcttctctctgttgctagccctacagatagctgtggtaccttgttagtttcttaagcccagcccacagctttggaaatagtctctttaaaaaaaattttttttaattttttaaaaatttatttatttggctgatctgggtcttagttgcagctcccaggaccttcgatcttcattgcagcaggatctttagttcccaactcttagttgcagcatgtgggatctagttcccccaccagggatagaacctgggtccccggcattgggtactcagagtcttagccacaggaccaccagggaagtccaagaaatagtccctttttaaatctctccccagtttgagtgtgccctgtctctgctgggaccccgcctgacaggggcacccatccaccagcacggtcacacgcagttccccacggatcaccatgctgccatgtcatcacactcacatccctttgtcccatgagggcatcccatccccgagcttccgcatcacatccttcattcaggaagcttcctggagaggttcagcttggagccaagtcaagggagcagtcagtctgcaaatccatcaacaggcccagactgccaaacgaaactaaacggcaactgctcaaagaactgccaacttaaagagccctgccagacacgcgaaaaggcaaggtggtgcaggcactcacagagtagacctcaagaccacacgggctgatctcacatcactgaggtttattcttcctgaatgcacacaacaggcaactgactccatatgcgttccttttgtggaattctacaagttctgggtgaggtgtgagtccatctggcccccttccgtctaccatcaagatatttgaatcaagtgctcccttttttcatttaaaacttaatatttttatgtggtcaacccctcttcccgagaaagaggtgtctcccctgggagccagcagcccattatctttctgaggggccgcaggcaggcacccacacaggacaaggatggtgggcaaagaaaactgagggactgttcagagcaacattttccctcaaacagccctcctgccactgtttgactgagcagcaacggcacctaccaaaatggggaccccagctgcgctgagacttgttttttaaagagaaatccttttctcagtggaaaggtttgctgctctgttaatctgattgcatctcaaaggacttgtaacatccccagttgtaccatgtaagccagagtcaaatgcgggaacatataaattcctagtagaggcaacttccctagaacccagccccttgccactgtcaagtgaggggctcctttgaggtgaggagggtgctccgcttgtgcagggctgattagagaagtcttcctgaaggaggtgaaaggagcagaatccagaagtcagatcctgagttgaggctcgggaggagctgggaggagctggaaagaataatttcaagagctttcattacctctctctctctcacacagccacccagccccacccaaacccttcagcatttacctccttaagagaggccattgtggagagaaggcgcaagggcaatattttggaaaagggctccactggctcccgccctggaaggggtgggggctcctggggtgagctcccttgggcctctgtccttggctgggatccccactggtctgagcagctggaatggaatgttcctgggataaaacgcctgcccctcctccacatctccccttatggagttcctcggggaaggcactggggggagaagggggactgttctgggatgcctgatatggcgatgctctggacaagcaaaggcccacactacccaggggctctgtcctggcagcctctcctaggccaggtaggctggctccactgagcatttacagaccttctctgtgtgctagtgacctctcacttaatacttggaaatcatctccttcctaactccccataaaacacacacacacaagaaacgggctcagagaagggaagtcatttgcccaagttctcccagctgagaagctgagctccaggctaggactaaatcccacgtctttcttgttctaagtatcaggacactttctgccccaccagggagccagtcagcctcctcctctaccatcccaggctctgcactctccaatcatgctagcccaggtgcacagaggaggaggaagccctccaaggcaaacccaggccctaagcatccctgacctgcccttgctgactcagcctgactcataccccagagcacaaccaagctaggcagccagcctttggagggtgtggccagaccttggaggggtggcaccttttttgccaccaatgtctgatcacatccctcctcagaaccaaggactagggtttcctgtacccagactcaaagagcaagtgctcagaaacccatgtggagccctcaatatcttgaaaaacagaaagccacatagcctaatgttgaaggtgtcccccacttaggtgttccatgtgattgggccagtcactcactctccctgaccctcagtttcctcatctgtggaaatgggaataactcctactttgttggcagagtagctgggaggattgaaacagctaatgggtgtaaagcgcttagcacagtacttggcatagatgtgggtggttaatatattattccacaacaaaggattcccttcccctatcactcctagccagggtgcggtcaagatctaatgcaggaataaataggctgggggatgtcccagctttcccaaatacctcctcccaagctgaatgtaaaggcgggag

SEQ ID NO: 60834 - DNA, 1435 bp, Bovine  19866881259105
  misc_feature (1)..(1): n is a, c, g, or t
nctcatcactcaaaagcccaaattgcagaagaagcttggccaacatcgttcagagctactgacctgagtgaaagcatagttttccctcagttgctcctagacatggaagaataaaaatgggaatggctctaaatccagtgctacctctgcttctctcttcatttggccagggccggtagatcaagacttctcagaacatcactcaattctaggaccttactatgaaccttgctctgccttccttttctcccaagtatgtcctgatatcaaggcacctggacttccacttgattccatcctcaggccttttctgccccctcaagagcagaacaggagatgttctataattaagaatgtttactttctgagggcaagaataccttacttcacttggtccattttctatctcctggatacctaccagtgccaagcacagggaagatactgagttatgacaagcagaatgccatcctggctgccaaggcttacctgcagcctcagcaagcagacgtccccaaagggggcagggcggcctaaaagagcactgtggacttgcagttcactctctcgcaccttctgctccagctgagagatatgtttcctctgcctgcaaaagtcagaacagaatgaggcccagggtccctgacacaaacccacttgtaatatgagccccaacttttcttaaataggtaaaaacctatttacaaaatacactttgtaaacaaagaccttggattctcgggtagtgctgatggaggaaatgcaaagaagaaaactgactgaggcaaaatgaagaaagatcagctgcaaagacccagctgcctcctctaggcattccccacagcccctacagagatatgtaacaaacctatcatattattcacacacagaactaggctacttatcatgaggcaaagtaggggtctaaacagaggaggatgcactgcccttggggagatgtcatcagttgggggcctatggccccttgcccccttacttgtcaataaggagctccttttccttcagaaggtgttcattactgttcaagatgctcatccattgtgctgggtctaacgtgggcaatgaaggagaaaaaccagcaggatggtggcagacggctccattctgaagctggaagacaaacaggcccagtgggacttaatgttaacctacaggcacctgaaagcacctataaagtgcccagctgtgtctatagtcaagattcactttggctcagttggagaaggcccactgtttatgaaataattttagctcatgatgcatgactggaaagaacctgcctgacagacttctgccaactggacactccctgctcagaaaggctctagtttctaagaaaaggtcagtttatctttctttatctggaacaaaagcaaatcagaagctaagatgccctcaccaaccaggaaaggag

SEQ ID NO: 60835 - DNA, 976 bp, Bovine  19866881340411
  misc_feature (1)..(1): n is a, c, g, or t
nttggaaggagaggtccccaaagtagaaggtatcacatgggctgttggaatggttacgtggcttttgatgggctggaaagaaggactgctaccttgaactgcaaaaatctgtggagagaatagtcttccgtaagtcaaaatcaaagcagcaagctttttttgagtttggctgctatgccagacattctctgcccgagagcaggcagagagggcactttcacaagtatcaggcagaaaaatatagcagcctaaatgggagatgtgtgttctaggatctcaaatgccattcccaaggcaaaccaaagaaaggtaacattggcttcacttttaatttatactgtcctttgtatttgaaagggcttccctggtggctcagaggttaaagtgtctgcctccaatgcgggagacctgggttcgatccctgggttggaaagatcccctggagaaagaaatggcaacccactccagtattcttgcccaaagaatcccatggacggaggagcctggtgggctacactccacggggttgcaaagagtcggacacagctaaaatcctgccagtcaataaagctgaaaactgaacttaaaaaaaaaaaatcacttacttaagggaactggattaggtcctactcttccaagagctgggcgactctaagctataatccaatctaataaaaatgtcttttccaagggctgctggaatcttctttgatctccaaaagctccacagcacaggtgaacaatggatctaaactatgcaaagaacaaggcagactcggtagtgctgctttgtgtctggggcagggagcactgcgtctgaatcaggattctgctctctctcccacacgccagacctgactgccaggatatgtcaagttattcttagcaactctcaggtttcattctagcacagtgagcactctcaactggtaaacactgaaatcctcttattttttactttgccttttatttaccc

SEQ ID NO: 60836 - DNA, 1477 bp, Bovine  19866881350712
  misc_feature (1)..(1): n is a, c, g, or t
ntatcaaaatgatttttaaaatgtacagaacagaaaggcatgattaataaaaaaaaaaaaaaaagatgaagaaccagacggtggtctcctgaggccagtatggggtgtggaggggccaggtgagggactgaggccggggagaggatgtcagccagggagaactgctggagggccagagtggagtgtgatgggaggaaggccggctggagactgagggcccacatgacacagaccctgcgtgcacgtgaaggcctgctctcccctgctggtcatcccctgctccagaccttccgtggagccctctgttggcctctgtggcccttagttggccttcgaggtctgctctgcagggagaaacctgaaggtcattctcctctcctttcccctcttcacccctccatgtccagccagaaacatttatcaaacgtctctggtaaccagacaactgggcatatatacacagaaggcatgtctgggcttatacacatcgggcagctgagtggacgtagctcctgcccttttggaggtgacagtccgcctgtgtcctgaacggctccctccagctctccagccatcacctttccagtctagcccagccttcaccttgatcgccagtggcttcctgtctccaaccccacgaatgttcctcacgtgctcttctctacactgaaacaaggagcacagtttaaagatacaactctgcatttcttacgtctgagttgtcctgcggctgttcatgtctcggtcttgtgtttgtttcctctgtagcatcacagtctgtaattattatcttttaaatatttatttatttggctgcaccaggtcttcattgcagcaggcatactcttagttgaggcatgtgggatctagttccctgaccagggatgaaacttgggcccccttgtattgagagcacagagtcttagccactggaccaccacagaaatccctcagtctttattcatctgtttactggcttaggtaaaaacagaagctctgaaaattatggcaaattgaacatatgcatctaatttcactccctccccaaagttcactaaaactacagtaaagggattttgtttaaggcacaaaccctttaacatgagcagaatgagggagaagacaagactagggcattggaagctggaaaacagatggtcgggtggtaactacactgcaaacccaaggaaaccactgcctaacctgggtgtggggaaggaaagccaacacagtttagaccccggctcccctaaaaggctcaggtacctctttaaacgggggtgtgaatacgaaaaaaggagaagaggttggaagatgtttctggatcagaactgttaggtccctacgtcccttccccagtcctggaaggaaactggaggtttattctctagacagaattaaacaggatcactgggatggtagaccattggcatagtagagggcgggggtatctttcccaaatcaggtggtgaagcga

SEQ ID NO: 60837 - DNA, 933 bp, Bovine  19866881411257
  misc_feature (1)..(1): n is a, c, g, or t
ncaagatattatttgctattattagttacagctaattaaagcttttgtttgtacaactagtaatcagacttacactgaattcttagatcctaccattagaaaaagtataaatgttttatttaagtaatggggaaatgggaagaaaatctcatgttcccagctgaggattggagttctgcttttgaccaagaattctgtccatcattgtacatcatatgactaactttcattactggaggaatcagggaattcattttatgttcatcaggattgaagctataatactttgctgttgttttggttacttagtttttttcctacctcactcttccatcccattccagcaggtaagaatatctttggcagctttttaattaaagtaatattatttttaatttttgcaataatcagaagggttctagaccttataggatcagtattgagaatctctgtttggttctaggtgttttcttcttgctttgggagaagtagagtgaaatattgggagttgctttgccttaaaaaaatatccttaggagtaaaacatgtggaagaatacttgaatactttatatgcattttggcagtttcagctgaatgggaatgaattacagggaattaaaagataatggagagatctgactgcttcctttattttacagctggctcaagtaactgtgttcgtggccatgcaggataaatacccaagtgagaggatctctcatgccacctcaccaggtgagtagtcaaagttttctggattaaattctgaccattggtctgttattttataacagaaatttccttaaaaggaaatactgaacaaacaagcatccactgaaatgctggtaccaaaagaacaaaaatgatgtggggctacatgaatagaaaaatagatctctcgagagaataactatttatctctcgtgctaca

SEQ ID NO: 60838 - DNA, 1171 bp, Bovine  19866881435099
  misc_feature (1)..(1): n is a, c, g, or t
ntcagctcatggtctcattctatgctcatcccagtcacaatgacagtcagccctaccccaacatcctcccagcccccttacctaaaatcatcctccactgctagacttcaccctctcctcttcttttaaaacaatttctttttttttttttccggtcacactttgtagcttatgggatcttagttcccttccaggaattgaagccacaccctcagccgtgagagcacggagtcctagccactggactaccagggaattccctcctcttcctgtaatgatacaggatggtggtaactcccatttctgagctcttatgatgtgctcggggctttacagacattatcccacttgcttgtggagactgaggctcagacaaggtgatgcagttatgaactggcagaatcttctgcccttaacactggcacagatcacctggcacctcatcagagctgagtctattttaaaaatcatcatctgttctgcaaaatttagtgcttttatagttacatatcaaattgtcatacaaaatctcgctttgctcattcaatgcttcaagtgataagtcttgctactccagcgaggtggggaaaggactgttacgtaggagatacagcagcacttggaatgggaagccctgggtctggcttcagctgtgccacagtcaggctatgtgatcctaggcaagtcacccaagtgctctgggccttcttttgctcgtttgtataaaggagaatgacagtatctctccaaaaggttttctgatgcatgctcaaaagcgctccacccacttcattgaaataataaattttatttatccgcagccacctcacccctgtgtttagcacagcactagatgcccagcagggatcaggaagtcttgctgagtgatttttcagttgctggagattcaggagtcacagaaaataagccactatttctcctcctccttatcctagaaggactcctaagtgccatcactgatcattatgttcagaatgtgtcaaactctatgccacgcatcttacaagggcactctccctgaatcctcccgacacccctgccaggcgttaccccatgcttgcacacgtgcatgctaagttgagtctgactcttggtgaccccaggacagtagcctgccaggctcttcgtccagggattctccaggcaagaa

SEQ ID NO: 60839 - DNA, 1191 bp, Bovine  19866881554728
  misc_feature (1)..(1): n is a, c, g, or t
nctgtgtcctagaaattaggggtacccgtggctacagggcacagcaccctgggcaagtgaacccattcctcttgttaccataacctctatggcactctgcactgtgacctgtacttcctgccaaagcggggcaagggtcagctctggtggctggattggggcaaaagagaacacctctccagcctgagcacagcctcagtggctcactctgagaagccctaaaatctgcaagggtccaggtcaaagacacacaacaggctccattgggcttccccctgccttcccagccagatccccaccacacacaaagcccatctgaggcctaggcagtgcccctagcctttgctgcttgctctctgcctctgggaagtagtgtgtagttttagaaacacttgctccaggactagaggacagacccagtgcagtgggaaattgtctcagagatgaaaacggaaatcaagtcaggctggtcttaaatgctgcagagtcatgggcccctgggagaatctgacatatgtttgatgcctgtaaccaacaccttttgttcaaaatcatacacagactaaaagccttgtctgaatcctctaaggaatgagaaaccgagcccagggaggggcaaggacttgccctagatcacatggcagagcctgggtgagcagccaagcccccaggtcgcagcagcagtcttaagaggcctgaaccccagagaaaggccagagggaagagaagacacgagtggaattgggtaaatggttttaatgtgtaacagcaggccagctggggaggacaagacccccccaaggccccaacccttctcccatgatggcctgggacctgtgtgtgccggccagccccgtgcctgccctggccctgcggcccaccagtcccagggagggtgggagaggagagtggggagccgggagttcagcctggagagttcaggggagcacacacaggggctagttgaatctggccttggaaaagtccatctctggatgctgatccatgaacctgcagagacaaagcgggaaggtgggacaggccatccgtcccccaactttgcccctttctctcagcctccaacatgaggtctcatctgtttacaactctcagcaacctggagccatgccaggcaggagtggggcccccaaggtctccccaaggttggatgctgaggtgccaataccggca

SEQ ID NO: 60840 - DNA, 1090 bp, Bovine  19866881763473
  misc_feature (1)..(1): n is a, c, g, or t
naaggaaaggcatgcctggcaggctagaccctttgaatatattcagaacaaaccacttacagactcaccacttgcatagagtccccctgctctaagcaaatggaattaaaagccccaccagatcagagggctaacggaataccttacaacttcttattgcaccaagggaagccataacaacctaaggggttgctgagatataacacacttgacttcccaattctcttgtgatcacgactgattcagaagggagtagagagggcatgaccaaggacccaactaccaagcgatatacaattcatcaaaacacaccgtaccacatggcaggggcaaaaggaaagagaaacttcttaattttcttgaaataaaagctccactcagaaaagctccaggtttcagtcccaatccaaagatgcagaaaggaagtgaccaggcagcaaaccaaaggagccagatttagtacccaaggaccagcaagaacgtgatcagagagggatgggccgggggctgccacaaaatgcatccatcagcaagcagaagtcttgactgccactcgacctgtcaccctaaatgccaactagttggggccagcagaaacctagaatatcatttcttactccttgtgctttcaaatttattcctggccagatctgttgtatgacttttaataataacaataaaaaaaagcatccctggctctttaacccgaaagaaccccctaattgattcccacagtaattaacctgcattttacctcagagagcggtagttaaggaagtcggcactgctatttataactcatctcaaattgagggcagactgcctaaaatctaacacatcccagctgtactcctgtttgaactggggccaagggaattttttaaagcaatcttggcaccgaatgaatgacaccaacagtatgagagcgcgagtggttgtgttgtggtgacgtagcactggaggtggaatgggagggggccagtgtactgtgatccctctcgtgcacgcctgctgcttgctgagtcccagtacagtaagctgggaaccgcccactgagagccaaacacaggaaaaggcttttcctgtggaa

SEQ ID NO: 60841 - DNA, 777 bp, Bovine  19866880396586
  misc_feature (1)..(1): n is a, c, g, or t
nctgggccccaatgtgatgagatgattctcatttgctggttacaagatgccctgtaccagaaaaacacatagccgccaatgagcactcaagagagggcattcctgcatactgacagccaccactatcctcaggcatattttcacccagaggaataaacatcctagtaggaagagacatgaaatgcgaaccttgaagtcataattcaatgtctaaggactcacaaaccagttcaagtttattagatggctaataaaaataaatcatggtcatgtttttaaaatgacttcccatgtgttgtggttacttcttgggcacactgtaaattagctgtgaagggctacttcctgctgggactttttttttttctccctcaaatataaagggttataaggctaaagaatgcagacacgcatcatgtctgcagaaatcattaaaaaagatcaaatgtaatatgtactttcaacatggacaacgggctttgagattttccattcaggcagcctcgaacactgcctccagcgtttgccaattacttctgacaaataccatttgggcctgagtgatgctgtaagtgaaataaaacagtgggaggaaaaaaaaacagagcatgataaaaggcattttttttggtctgctgagaacttactgtaagttatccattcacgggggaaggccttgcttcctgccagggacgggccccatgcgatccagagttctaagggacttttgtttgacagtaatagaaagagaagacaaaactcagttttaaagtccct

SEQ ID NO: 60842 - DNA, 1074 bp, Bovine  19866880457097
  misc_feature (1)..(1): n is a, c, g, or t
ntgttgcagcaagagcattgattaagagcttctacattctacataagagaaatcccttttcctccttttaacaaatgaagcaattggtgacttaaatgttgcttgctaaaactccccaaatttttcattaataagagaagaaactagaataaaaagagagtataagcagcttgattattagactttatgtaaactttaaattgtgtttatctcctcctcaagtaaaaagaacatttcactttgtataagaaccacttcttatagacagactgagttgatagagtttaaatcacaatgtctagttcagattcattttaatcattccacttatataaaccacaaatcaaaataaggtgattctgacagagcagaatcatttgcctaccagtttcatccttgtgattaaggcatgtttgtaataaattgtttggttttctttgggataacattgaatcatatttccttacctccaatcagaataagcttcatactgatatgagagaaaaagaaccaattgtgaaaaaaaaaagactggaaagcagccatatttataatcaagggctcctatttatagaaaggtgctagatatgatgattgcaaaaactgcctccaagcaattccaggtaccaactgctgcattaaggaagacagaaagataagaaattacatcgcattctgtgtacaaatctaatgaaggtggcatagaaatgtgagtgctgagaattcaccaagcactaagaaaaagactgatttctgacatggtcctgccagccctttgttctaggaatacaaggaccctggagagtcaatcaacggttcttctggtgtaaaaatgtgagagggctttatcccatgtaggtcatgggctagatgacatttgtcttaatttccaactcctttccatctccatggctactcaccctttacagaaccacctgaccaatgtcctcttttgtcatgaagtgcacaggtgcatcactttaagggtatatgtatgaccttcaccttcctagagtcgccactgccctctctccccaccccatcactatgttcatgtaactatgtttttagaga

SEQ ID NO: 60843 - DNA, 1854 bp, Bovine  19866880527920
  misc_feature (1)..(1): n is a, c, g, or t
ngtgagaacgtatcctgaaagcgtagaaaacaactcaacttcaaaacaaaagtgcagaccaggggcatagcaagagcatcactgaattaggcaccaatcgataaaaacaacacttcctgtctgctggacgggggcaaggagagtgccctgctgtgttctggaactcaccttccacacccacgctgtcatgactttggacaagcaagttcacctcccagggacccgctgtcctcatctgggcaataagacaaactgaccccctggtgccctactatcctaacacccccctcactctaacaccagcctctgatgtcacgaaagtcacatctgtccagaaccagcagcatcagagggaagggggcattttaaggtcagacgccacacacagttctcctgctgtgaacttgacagagaggtttgcagaaaacgagcctttctacaaaaagagtgtcgctgtgtcagtctgggaagctctgcaggccaatacagccacctgtcccatctgcacaggaggaggaacccaagagatggacatgagtcctgagggaatcaagggacagtctgttgtgagacaggaggacagaggaatttcgaagggcagcccttcccgctgagttcaggcaagccaaccaccatcgctcctgaatcttaacaaggaaattgatcaggtgcatgtttgctaattccccagctacttccttagctgccaagaatcagttaatagctcccacatctgtaaaattgagaaatttgtcatagcttcacagggtggaggagtgaattagaagatcccctcaaggagggcatggcagcccactccagtattcttgcctggagaaatcccatgggtacaggaccctggcaggctacagtccatggggttgcaaagagtcaacatgactaaagcgacatagcatgcacacacgcacaggttacgtaagatgcaaaaccccgtgtctggcctaaaggacaagtcagtacatgttcacacattctaagcatgctgttctcaaacctgattatttcccaggatgcatctctgatatgctgcttccttcatcctacatccctgtctcaccaccaacactcttctttgcctttctttgggtctggaaactcaaggcattctgtaagtggatgaaagaaagacccagaaaatacagatccaattgggcatctcaaacttcttcttacagttgacactgtgatgttagctaaaatattggaataattttgttttccattattagcatgtttcttccttaccagggtgaaatatggtttcctttggttttttaaaaaaatgttgcaaaagatgaagtaatgcctagtaaccttggttgttttttaaaaccccttcctatcaacttcttaagggacttggttgtaatgttgatccatgccacagtatatttgcttcatgcccagattctggctgacctcttaatgggtaaattaattaggtaatatgagtcaattaatcagaatgcatagttatttttatgaactctactgccagcacatgaactcatgacatgtgtttcataaatgggaagaatggctaaaatataggtatagatttttacatgatatatggttgtaaaagtcagatgctgtgaataattcatctgttcattcacccaagaagtgttcattaaggatctactaagaaccagccgcatttctcagcactgggtgtaatagatggatcaagacaaggagggacagtaggcatgcacacacagatttatgatgaggtggggttggggaacacagatttatgatgaggtggggatggtgaacacaatttatgaggaggtggggatggagtaggatggtgcacgcggtgggggc

SEQ ID NO: 60844 - DNA, 2495 bp, Bovine  19866880528240
  misc_feature (1)..(1): n is a, c, g, or t
ngcacagcagcggtgggcgcttatgtacacagccctggtgttgacggcgcaccaggcccaccgcagggcgcggtaactaaagatggtctcaacggcctcagaaaacagaggctgcagcgaggagaaaaagcctcgagaagaggaaaagaactcccacacgtggcttctctgctcccaggcctttgttttcaaagggttgggaagaagattcaccacttccggctccaaacaaactgggcaggtgtaggcctttggtaaaacctccaggtaaggcttccagggagaccgatccccagcatgcttctctgacactaaaaaggtgcacagagccagcagaggagatggaggaggctgccaccttttaaaacgaaaatccagattggaggagttactttgattcaaaatatggaataagcaagagatgcagacacctgagggcttagttctgcttccagaggggctgtggccaagtggtcagtacactccatgttcaccgaatgcatccaagagagggtcttccttcctcaagggctcctcccgggaccacccccagtacagaggccatgaacaggccacactgacacaagaactggctcgctaacctgagtccagctttgtttgcaagagattactttctgcaaaaacctctttgcttccaactctgttctccagttttaaagctgttgctagaatttcacttgttccactttagtaaggatataaaattgggggatatggggagcaattcatagaaagaacctagacgttccccattcgacagggtacccactgggcaccaggagctattccaattcttgctttctagttaaataatattgaaaattcaattccccagtcataggagccacattccaagtgctcgtcggccatatgtggctaccatacaggagaactcaacgtgaaatacttctatcactgcagagagttctactgcgcagtaataacccaggcagaaaaatgaataagctcattatatacctgttacagtttggaagtttttggtcttaaactcccccattctattgcaaattatatactgcagtatttttgtttattaccaataaaaagagctcacgtggcataggtgtacttagaaaagttttcattaatccttcaaaattcaggttcctatataaccatgcattctactcaaaactccagaaggatacagaaaatgttaataccaagagcatccttgcctctactcaggctcatgaaaatatatcagccttcttacaaaagtaagccagaggggcttaccgtgggttgaaaaacaacataatctttcttcctttatcatttagaaacctcttatgctgaggaccttcctcaatctgtcctcgaaaacccacccaaaagaaagagagacccccctataacatcagccagaaagtagttttcagctcctatgttggcctcttctcctctatgccaaatctaaccagctccttcatattgtcaacagctcttcatagctgaaggagaattcaagcaagtacagtaagggtaaaaataaaagcgtaaatagcatctgtcaagacccacaacagtggaagaggagtggagtgctgagtcaaggcactcagttatggtgtgtgtgtctatgctcccatgtaatcctcattttttggtaaggtcagctcaggattcaaatccacttcctaagaagcctattaaaaccttaaaaatgcagtttaccatgaattaagagccaacttcatagaatcaacttttcacatcacttctgacatatactagccacatgaaggaactgggtcctaagggactatgtcttagctgacatactttctgacgatacaaacttgaaaggagaaacactcacgccagatgagctggtgagcggtcacttacttagcaatgtacgcccctaagtagcttctgatcactgtgtccgtggtgagtaggcagctctcaggcaatgagataatcgtctgtccctccttaccagaaagaaagtaaagtttagaacacccgtgcttgggggaggacctgagtgaatcttctgaagtccccgattccacagtcatctactaagaacccagtggagcccaaccatagacaaccaaagagcttccaaagagcccggggacgggctccccgggccgagtcagcagacatgggcagaactgctcccacgccgggcactacaaccccaacgagagtcagaggttaatggtgtgactgacacccaccaccagtcaaccttccatcagaaaggaatgcagaaacactatgactcaagtcacagtgttccttcatgttcttacaccagcaaacagtgccacctacaggcaacagacagaaaccacaccaaaaatttcttccagtgaaatgcatgtgcctggtcattcccagtaatgacctattcgccatataacctgtaacaagtagctgaatttaaagggcaagggtggcccccccagcacaagaatcccactgatcaccgcaaaagt

SEQ ID NO: 60845 - DNA, 2045 bp, Bovine  19866880530254
  misc_feature (1)..(1): n is a, c, g, or t
ntatattaatatcatgtggccattataagttctcatttttcacatggaaggaaatttgttaggaactaaattgatacacacacggttaacattttttgaagtaaagaatgcacttgtataacaatcacaatgcagcctttacataaaatgctatataattaccctctgatttaatattgaatccccccaacctgggaaattcaaattattgaagatttaccataagctgaaaattatggactcctgagcaaggtgattgatgctagaagtatcataatttggctctttggtggttgtagtaaacagttctttttctgtctggttgcttttttggcataatgtcagtttaaatcaagcatttgggcactgtggtgatggacagataagcctggatagaaagatagctctggtttgatgctcaagatgaggtctttttaaatgaagggtcacctcacttcactttcactcttaaaagtttgaaccaccctgaaaaaaagtgacatgggcagatttgtgctgggaagttttcagcatctgatgaaattgacactctaacactttgacgaaagatgtgggggtaggggtagggggcctcaaagagcaagggggaaactccccagtctcccagctatgtgtcttgcttaaaagcagatttcaccactggtgagtgatggggtcatagagccagtggacacaggcgatggcagggaacaaagatgagcaagtgcgtacatgcgtgtgtatccacatgaaattcatctaaattctccattctttccaaacacttaaaatttaaaaacacatttcactgtgctggtaaggaaagataggctgtggaagggctcagcagtttttacaaagagcaaggctgaaatcttaaaaggattcaaggtgctttcccgctggattccctctccacccccaagggagttcgtgggttaataaattaatcaaaagcaagtgtggactgccatggaaaactgtagagaactgacatctctttggatccagctgcgcataccaatgtcaaagcagcaaaagcatccaaaagttatttagggctaaaatgaaacttgggtccatgaatcctaaacaaagccaatgaagcaagtgagttgcaactctgaggcagtgtaggacaatagtgcttaaaaaaaaatttttttttttctttttaatcagaatataattgctttacaatgttgtgttggtttctgctgtacaacaatgtaaagctctaggtatacatatatcccctccctcttgggctccctcccacccttccatccaaccaccctcccatccaagccctctaggtcttcacagagccccgagctgaggtccctgtgttatacagcaaattcccactaactgttttacacatggcgatgtatatgcatcagtgctactctctcaattcatcccatctctccttaggaggacagttcttaagcaccaatgtgggcaaatgttgctcaccatgagagataataatcaaggcagttgctagcatttttgtctttgagatgctctctccctcctgctagttaatccacacacgtaaatgttactcttacccttatccacttcacaccgccccccccacacacacacttttcagccctctggagacccagtgacaagccacaggacatctattagcatgaattaaaataaaaagcatcacttggaatctctcctctggttgggaccaatccagcttccttgggaacccagattctgccaagtttctctctctcctggaattcagacatttaatcaatgatactggctttgccaaggttgtaaaaataaaacatctctcaaagtactaagcctttattttggtctgtagtcacatgcttcagttggtgatcaaaatatagagaaccagattctaatcgagtagaaaataagtgcatgcgggttcacgatggcaagcactaatgccatctgatgtgaaaaataggcaccgtgagaaagatgttgtacgtcccgaagccagccacccatctgtcttggaaggagccttcttagacataagt

SEQ ID NO: 60846 - DNA, 1282 bp, Bovine  19866880540401
  misc_feature (1)..(1): n is a, c, g, or t
naggcaaaaatctcaatttttctctctttgtccctcttccctgtatgtaatcattattttatgaactgaatgacaattggatatattgtttccatcctgtaagatgactctaagaagatactacttaggaagaacctactgtgtgtcctaaaggaaggccagcatcttctctctgtggtccttccttctaggctgaccctaaatataaacatctcaaggacttggcactgaaccccacgtttacctggctgaactccatggttaaatgatgctgttttccatctaatatatttgccctgcaggcacaggaaaagggttggttccaccattttcagaagccaggcaaccgataaatttaacaggattttgttgacattaattgagtttgcattggtgtgacattctcactcctagcttatttgtcttctggatcatttgaatcacccaggttctgggccagctagtcattcaaccatgtgattccaggcttaacaatatctccgagtcactggtgactcaatcacactttcgtttattgctcaataaaataataataacaatttgttcaaacatttaaccaggctgcatttctccagggacaaaataaagctttccaaagaaataagtcaaatgcattcggtgttaacaaaagactctttccagaggtgtggctaccaacacctgagcaaattctaagaactggttttagaattgaagacagaattgagaagcgtagggacaactattgtttctatctttcaaatacatgaatacaaattgttatatcttatatatttgtaatatatatgtaatatatatgtaaatgtaatatataaatttgtaatatttaagttcttataaaactgtactttgcaaatttgtccactgataataatcaatatcagttataatagtcttgctctgttgccaagtggcaagactatgttaataattaagttttggtttttactacaagtgagcataggtgctcacttctgtacccctgtgctcaagaagtttttatgttggctgtgtgtgagttaaggcatatataaagctgagtgataatttgcaaatgggcctttatatccacaaattggttactagaccaattgctatctgggataaagggccatttaaaaaaaaatgtcaagtctcttcagaactggtgcttttatatcaatttgctgtttgttgttcagtcactaagttatgtccgactctctgtgaccccatagactgcagcacgccaggcttccctgttcttcactatctcccggag

SEQ ID NO: 60847 - DNA, 2860 bp, Bovine  19866880591165
  misc_feature (1)..(1): n is a, c, g, or t
nagaaggaaagctggaaactgtgagatctgttaggaggctagttggggtcatcccagagaggtgggtgggttctggatattttcagaaaggagacccaagcagattgcagggagttgaagagaagagtcaaagatgatgccaaaattttgggcctgattaaattcaaaaagtatcattcattaaactcacatcatggaaaattatagctatgagaatcagctgtagcacttttctcaaatgatggagacaaatctcattgtgagattcaatttccaaagaattggcagttgactatgagccactggacacctccaacagaacacagcttataaaattccacactcgttttttgtcttcccgtgttgattatttcacgagctttttttggaggttctcgtttacactggtcaaatcgtgcagaatgactgtggaaggcttttgaaggagccagactgcaagtttggtgccagatttcaaatcaagtgtgtttgtgcaaacgtgtcctattaaaataacattttgtagcttacttccacagacatgtagctgttgctctgcatgcgggcaattaactactgatgtatggatgttttgttacagctggtgctaaaaaagagacacattcagtgaattatttttcaagatttgagtactttatagtgctgattgctgtgaaaaaaaagggggcaggggaggacgaaaatgagaatgctgccatgtacagttagtagtcccagagcgaggctttttaatctagtccagataaccaaagcttgtcttaagatgtagaatttatagcaagaagagattatgtaaatcatagatctcagccaccagctttaaacagtgaggagaaggaggcccattatgttaactggctgagccaagagcatgcagagtagaacctagctggatgaacggctggctggtgttcttttcagcatccagtctatttcccttctttctgtactatgaaagtggagatacagtgggcttgcatttcaggagtcaatggaatgtccagaaagcctgggttcttggggctttgagacccaccagaaagaagagccctggtcaattttgtaatctaataaatgggtattgtttaaagcagctcagcttgtgggactttgttgcagagcaatagaaaactagtacagtgctcctcaaggcaagagatacgacatctaaaatgtcagaccttcccagagtcaacacagggcttctaggtattgaaataataaacttatcttgaatgagtcaggtgaaaacatcacatcgtttgatttttgccccaaagcatgggcaaatttagccttctctgatgtcacaccttatcaccaagcctcagtccagacagacaggaggtaccagtgacgggaccagagcttttgagcatcatcttttgtcaagggctgtgctaaaccagatggagcacttgaggcgatgaggtctttataagccaccctggtcagctgctcgtcagtactagaactttaatcaagtttctcatctaatgagcgttctgctggtctatgttttcttccttatgacttcttaggtctatgaagttcagcagttaggggactgtgagtgtgtgtctgagggtgtgtgtgtgtgtgtgtgtgtgtgcgtgtgtgtgtacattttctttaggcagacacatttccccccttactccttcggctatcgcattgtgtttttcaaagtttacacagcaaaaagaactatagcttaagccattattatactgctgctctatttctatatatcattattcattttttttctttcttacaagtacagtacatgaaagcatcagtatgaactttctctaattccctctcatcactgtaatcctttaaaaatttcctcttatttcttgctgttccttacctgttctgtttactttattaaaatgttctttgaatgttttttgatggtgagaaggaaaaggaaccagttaaagagtggtgaagccaccttgttcttatggaaaatgaagcaaatgaaggcagtacatttagaaatttttcagtctcttgggttgaaattgcctgggtattacctatactgcttactctacccttcagcaaaataagtacctgcctttccctcaggcatgccccttagaacataatctccctattcttcaatttctccactggtaaaaagaggcaacaattgtgcccacatcatagtagtatcaggattacatatagttgtcatggaggacagaataaagcccatcaaatttttgaccctttggtctaaatattattttgagttaaaggcaactgagaatcaatgatggagaaagagttctctgtctaaaagcagagcataaatttcccgttgggaaaggtatctccccaccaactctactaggaagaaaagagcaactcttatcattgaagacagggcatcaacactaagatgagtttgcataaacagactgtccttaaatagcccttatcttccattggttccctcatatatttcctagttacttcccctaaatttatcatttttgaagcccggaccctgttttcttgtttgaaagggtaccaggtctaaccacgtacttgagtttcacttctattctataaattctcatacacataaatattaataaaaactgcgctctttctcctgttaatccaacttttctttgtttaattcacatacccctaaagaattattctaaaagggtggggaaaaagtttttatttccacttgattaaaaaatatcttacactccaaagaaaacatatagatggctaacaaacacatgaaaagatgctcgacatcactcattatcagagaaatgcaaatcaaaaccactatgaggtaccattt

SEQ ID NO: 60848 - DNA, 2353 bp, Bovine  19866880688027
  misc_feature (1)..(1): n is a, c, g, or t
ntaatagtagtagtagtagtagtcagttcagtcgctcagtcgtgtctgactctttgtgaccccgtgaatcgcaacgcgccaggcctccctgtccatcaccaactcccggagttcactcaaactcagtagtagtagccgtggtagtactagtgatggtagtactgggagcttcccaggtggcacagcggtaaagaatccacctgccaatgtaggagatgcaagagaatgcaggttctatccctggatcaagaagattgcccggagtaggaaatggtcacccaatccagtatccttacttggaaaatccctggatagaggagactggcgagctacagtccatggggtcaaaaagagtaggacacaactaagccgctgagcagggtccccctcaataactgggcagaagcagcagtatccagtgatgacgagaggcatgggcacttcctctgactcacttgaactctggcctgaaataggcaaagccctaacatactgacacagccgtgacctgggcacgacgttgtttctgatgagtctgtttctgagtgcttagactagactcagccagaccagatttcactctgatatcccaccacactttgttgagtcacaaaactttcacaaaattaagtcaggcaaaccaaggcttagctgactacagtcacaagcatttaggaagagtggtggtaaaaaaaataataataataaataacagagatgcttctcaaggttgacaagcactctctttgctgttcaattatgccctgtttattctgcatgctttatttcatccatcagtctctttcgatatcccttttgaattatatatagtaaggctatttcttatcaaacaccaggctctagacattcataactttcatgggcccagaatataaaacttaatgttgcctttaaaatatctctcaaagatcttgactttgccaaattttattgtgtcagagttcatacaatatagtaatgccactaaccaaagacatctttaatgtagcatcatactttcaatgtctctttagaacatgagtcaacataattttttcctaacgcgttgatatctcaatgtctttatcctctgctgatatcaaaactccaggaaaaatacagtgtttaagaaacactacaatgttccctgaaaatatatagcacaaaaattttacagaccaaatacagaaataatcattttctcctcctctttctgtgtctttcttcctatcttctaccctttcttcttccgctgctgctgctaagtcacttcagtcgtgtccaactctgtgcgaccccatagatggcagcccatcaggctcctccgtccatgggattttccaggcaagagtacttggagtggggtgccattgccttctccgtttcttctaagagctttcaagtaaaaattcgaaaaggaggaaacttcccaaataaaactaaacaggcaaagtcattgacatagtatttaattctgtacatgatcataaaataatgctttgtgttaaaaacattttaaaaaaatatgaaaagttgttaagagtgaaattaaaaccactcagaattccattagccagaaatgatcatttttctgtaataaatatagctaaattggaattaaatagtataaacaatgtattctagtttttttttccctttaagatagtgggaagtgtattatagcggacttagtgtactttgcaaacatgacttttcatagctgtggtaagtgtctcgtctgtggatggtaataatattggcgtaactatcctcttgttgctggaaacataagtcttaataatgtattgctattataaataacattgtgacgaacatcttaaggtaccacttggttgttgataatccttcacaacagcatgagccatgggcctcttctcagctactatgtggatatggattgctgattttctgacttggaccgctgagaaaatgttcctggctggctaagacacttttccaaggaaaatattacaaagcttattttcagttatccttgataatggagggaaaaaagagatgaaaaccccaatttcatgtactttctgctggtcctgaagatgtgtgagaacagatccaagaattcctagacaccgtgggtggccttgaggggctatttttaaaactaattcggttcactttcttttgtgccagtcataagtttggccgatgaacccttttgccccttctctccgaatttgagagattagtcagtgttacagcctacatgaagagagattatttttcctcagacaagtcacaaacacaggaaggaggaccatatacgagatggaaatgcaattaattttgtctacgccctgaaagtagctcatga

SEQ ID NO: 60849 - DNA, 948 bp, Bovine  19866880719132
  misc_feature (1)..(1): n is a, c, g, or t
naatgcagttacagatcattaccgatgacacaggcctggagtcaggagactctggctgagagatccagcccagccagtcttcagaggtccccttgagcaagtcatctaggctctaggtgcctcagtttccccttctataaataaccctgttcacctaggctgaatgttaaggtccctgtcaacctaaaacttattttacttctagaagagtaaagctcatactctgagtagcaagaatgaggaatattgtcagttgattaagataagaaacatcattactacttctgggctatttgccaattaacattagaaacatcataattaacacatcatacaaattctccttccattaagaagttttttccaatagatctccttcaccctctctctcagctgattttttttttaagtttcaaataccatacaatttgatccaaaacacaatcattcaatttacccacctcagccagaaaaaagtgcttgtgaaagctatgtcaaagatcataaatttccttaaacagatctaagcaactggagtgtagcaaaactttaagttcttattaaatctgattatagagcaaactgatttagaatagtaattcagccaaagtcttttagattctctgaagaacacctttccaaaattatgacagcacacagtaaaattaaaaaaaaaaaaattttttttttttttttttggcttgagagaaaagtgctccgtgtatatctgtgggagtcttacatgtaactatagtaaaaattgttatttatgtgcttttttttgtagtttattcaattatcggttttccaatataggttgggtcttgtgtaaggacccagcacacatgctaaccgaggctgggggacagtcagagacatccccaggaattaccaggagccatgaaagtgacagaagactccaggattgttcgagaaaacaggaaggaa

SEQ ID NO: 60850 - DNA, 1906 bp, Bovine  19866880773347
  misc_feature (1)..(1): n is a, c, g, or t
nactcagttttcctattctttaaaactggaaatacaaacactgcctgcaaaagtttactgggatgatgaaatgaagaaagagccaaaagggagaacagaaaaaatcataggagaatatgaaaggggggaaaaaggttaattgtgccagggatctgggatgagagtctgttaaacccaagcctgacttttcaatgtgaggtttttgaaagctttgcataagaagcagtgatggctttgaggggacaagcatgaccctcagattcgtaagtagaaatctgtgagtacagcagcctctatggcttttaattcaccatgggaagaggaaggttaaggctcagaattcctgagaattccttaaaaatctctcgttcatgactaagaaatatttatgttctttgtagaatatacagttgcttttctgggcttcccttgagggaaaaagcagaccccatctattacttttatttattttctgaaaaacaaagcaaaacaaaaaaatctgagccaatacttacagcaaatatttctggacttgaacaaaatgttattacaattctctgagtaatctaggctgggctgggccaactctctgggcctttctagctcatctgaacaggaaacagattaacttaaagaattccatggacctgtgtggagcatctggttcacgccttgccctgtgctgggcacccgtccatggatagccaaggcctccccatcacaagtggggatggaggggtgagtgtggggacaggagtcacttaacctgatacacatgggtggtgttgcatcaggtggtccacatgccgtgaagaaataatgccaggcagcagaagagagcatgaagggggcagccaggaagcaggaccgggcatatcatagaaggcttctctgaggaggtggcatttgggctcatatttgtgtgttacggaacctggcgcgaagcatgttacagctggctcttttggaagctgccttcacagaatgctagggaaggaagtcaaggcagcaaggaatttggattttgttagcaaatgtgaagctgtaagaagatgcctttactgggatcttgtcttcaacttacatacactttctatatcctccacattgtgtgtgtgtgtgtgtgtgctgtattcttttatgaataatcattcagatacggccacaagatgagatcaaggagaggctcaggaaaaaaacaaaacaaagtttattatattatggcaacttgaggcaggaccttatgggaaagaccccagaggggaggcagaagttgggggtggaggggccgccctgaggccttggtctttactgaggtttccccaggaaaggcaaggcttccctgggggctcagatggtaaagaatctgcctacaatgcaggagacgcgggttagatcctgtggagcagggaatggcaacctactccgttattcttgcctggaagattccatgaacagaggggcctggtgggctacagtccatggggttgcaaagagtcagacatgagtgagcaagcgactaacacacacacacacagggaaggcaaagcagggaggatgcacagcttaggatagtctagtcggaatgattcccatgggctttgggctctggagttggtcctagtgctgaagggaaagtggtatctacccctggggtgtaagggccagggagaggagttgtggttttggactggttagttcatctgtcaaagacagactcctgactaggcccttggctatccctaaggaaggcaaccagaaagctttgttttagaatgtcaagacatcattatgtaactgggaaggggtcatttttttttttttccaatttctttttttttttttggttaattttaaatttacactggatctgcttctgtacttaaactttttttgtatgtaacgt

SEQ ID NO: 60851 - DNA, 691 bp, Bovine  19866880787585
  misc_feature (1)..(1): n is a, c, g, or t
ngtgactacacatacacacaaactactgattcagaaagtggcatgtgaagatgccttggggttaagtgttacctatgtaagggagaaggttctggaaagaggatttagaacaaagagaacagctctgtgagctcaggttatttgttaaagagctccttatccagacccatcccggggaacaccccctcatcatcccctaatctgcctatctgctggattcattccattgctttgcagacttatttgtgatcagcccagtggaggctttgcaaatatggtcattaagtgactattgagggcctatcctttaggctttaagatctaggactcctgtcttaattgggaagtgcttatttggaaaatccactccttcaggatgtgatcagagacccgatttagccctaatgatacttaatggcagtggcaggaatttagtggggatgataatttcgtgtaattggggagccttcagacgagttaaatgctcccgagtggccttgcactggggcctgtgtctgagtcaaacatgtgcttcctgtatgcatttctccttctgcagctctgatgaaaaggagagattctgcagagcttgcagagttctggctgatctgcactcagcatctgtttgtgtggtcctccctttagagggtgtcaacaagaaattaagaaagatctaagaaagaattggaga

SEQ ID NO: 60852 - DNA, 1052 bp, Bovine  19866880825327
  misc_feature (1)..(1): n is a, c, g, or t
nctgaatcaatacatcttcagtgaaacattacaaatgccacgaagcaaaataaagcaggggacagagacatgatgttagcaggcagtggttgaacatgggtggagggtggtggggaagatgcttcagaaagaggaatgggctctgtgaggaggtgagctttgagccaagccctgattgatcggatagagaagccatgcaaagatctggtgagtgctgtcattgcttttataataaaattaattatggagaatttttgtcaccactgccaacagaagatcttttaccctgtcttcagtgcgctacaatacaagagtaaaactggaagtgtgatggaaaaggaaagagtttctgaaaactggagggagtctgtgtgcttagtcgctcagtcatgtctgactctttgcgaccccctggactgtagccccccaggctcctctgtccatggggattctccaggcaagaatactagagtgggttaccatgccctcctctgggaatcttcccaactcagggatcaaacccaggtctcccacactgtgggcagattctttaccctctgagccaccagggaagctggagacagtttggttcctgcaaactctgaaggtgtcatgaatgaaaagagaccatttccaactctttgttgataattcacaaagtctcccaaagacaaaaccacagttggccacagttatgttggtttcacttaattctctgactctgactccttgtgtgactaaaagcatatcataatcacagtaaattctgcctcactttgctccattaaagggaacccaagccatttcacatatcatcctcccattcaatcttgattttacaatgcttttcactgaagattagagttaatgcttttctaagaggtttgtcacgaagggagtttaactgtggctcattttctccatctatacattttgttcaaaagctttatttttagagagtgtgtttagtcatatatatgactttggagcaataagccataagggaaaaccttccttgacttcctgggcatataaccattttgttcctcata

SEQ ID NO: 60853 - DNA, 1060 bp, Bovine  19866880843872
  misc_feature (1)..(1): n is a, c, g, or t
ncacatgtggatccatgtgggttggaaaatttaattacatctttgtgctgatgttgtatgtcataaaaaattgttaacagttaaaaatatgacaagcttaattgtttttcctctccccacttctagagcacctaagctttagcctaaaaaattaggctgtttgacatttttggtgctcaagctgttgggaaatacttttatttccaaacagaatcaaagaaaactttttattttaaaataggaaacatttatgagttattagtgtcatgtactgttgggagatcccagaatatattaggcagatgagtatttaaagtggtataaataagatttctcttgtcatcacttacgttgattaaggtttggagtttctctgtggatttctgacaaaccatcaacaaccatgaacgatgattttccttcgctggttttgctaataagttgtcaactgattaacactgagagctggtcagacttgggcagtgtgtggtttgtgatcacacagtatgggaccgggaaggggttttgattttgtcattagagtgcctttgcattagatagtaaaataagacagaacacagcttcactatcaatctcttgagcccttgagtcagatgtgtcttgaaacttggaaagtttcagaatttggaccgtaatataacaggcatgtcacatatcatatgagagccctagcgaggtttgtagcataattccataatctaaactgttaataatatgtctttaatcaaatatactcatattctcatcaatgggagaaggactatttgtagagacccatcacttaaggacaggttttgcaccaaatgagttagcacaaaatttcagtttccaggaatttttggaccttgaaattgtcatgagggattgtggatgagctaattaaagtccaaaatgttcatgtcgccaacagaaactctaaaagagcatcagatcaaataaccacagcatctttgataaaatgccacacaattttgtcctggggaaggactgtattcttagatgccactgaccttccctggtggttcaaatggtaaagcgt

SEQ ID NO: 60854 - DNA, 1020 bp, Bovine  19866880844565
  misc_feature (1)..(1): n is a, c, g, or t
nttgaaagtcccatttctttccattgtttaaacttaacttctcaaggtctttagtgtcaatgactcagacagcaaagaatcttcctgcaatgcaggagacctgggttcagtccctgagtcaggaagatcccctgaagagggaaatagcaacccactctagtattcttgcctggagaattccatggacagaggggcctggcgggctacagtccatggggtcacaaagagttggacacgactgagtgactaacattttggagagaaaaactgcaaggtctatagtgtatgaactggtccagatactgattaaaaattatgggaaaatcccagctcagaataccagacatttaacattctgttaacacacatatatgtttattttgcaaacttatcgtctaaaatgatacccaacccatagtacatgctcagaaaatatttgaatgaatgagtcttgtgcattcacctgggaccttttgtgtctctggcagctagcaacccgtgtactgccttttctttagcatcctaccttgccctgtagttcagccaggagaaaaagagaccagatcctgcagatgtgatggaactccaatggtgacagaatgaccccctgaccctttaaactgaaaatatgccctcatcaaatatgtcagtatccttcttcaagttgggtggccatacctttctcaatgtaatttactattgtctgattatttaatctacaaacagatatattgctgatgtattttaaccagcatgtttgtcttatttatgaattagttttcctctttcacagttttgatgttctcttgccaagaataactagaactaatttcaaataatgaatatcttttgtagttaataaaaggcttcccagatcaataaggttaataagtgatacagtcacttgggcatgttaataagttaaaaaaaaaaaaaagaaagaaaaagaggctgagccaactgaaaagctggaactgaaaatagattatagcattttgccctgaggctttggcagcaatt

SEQ ID NO: 60855 - DNA, 1463 bp, Bovine  19866880891776
  misc_feature (1)..(1): n is a, c, g, or t
nagtactgtgtgatagtaaaacaaaggtaaaattctccgaacactgttctttacatctggttatatttactaagcaattatttttaaacataacaataattttagtaaatgttaaataacattgtatattttgtactaattttgcattatgtttttgagtgaatttttatgtttttcttttccctgttcagtcatttgcttccagtagaaattttctaccaggctcctctgtccatgggattctccaggcaagaatactggagtgggttgccatttccttcccagggggatcttcccaacccagggaatgaacctgggtctcctgcattgcaggcagacactttaacctctgagctaccagggaagcccaatctactaagtgggacacagcaattatacattttgtttagttaaatgacaggtaatattttaaatatatatacacatgcacacatatgtatatatacacatacacatacacacataattagggcttcctttgtggctcagctggtaaagaatccacctgcaatgtgggagatctgggtctgatccctgagttgggaagatcccctggagaagggaaaagccactgcagtattctggcctggagaattacatggactgtagagtccatggggtcacaaagagtcggatatgactgagcaactttcacttccatatgcataatttagctactgctgctgctaagtcacttcagtcgtgtctaactctgcgagatcccatagacggcagcccaccaggctcccccgtccctgggattctccaggcaagaacactaaagtgggttgccatttccttctccaatgcatgaaagtgaaaagtgaaagtgaagtcgctcagtcgtgtccgactcttatcgaccccatggactatagcctaccaggctcctccgtccatgggattttccaggcaagaggactggagtggggtgccattgccttctctgttagttcccagagcaggaatcaaaactgtgtcccctacattgcaaggcagtttcttaaccactggaccaccagggaagttcctaatagtaacttttttttaaaaaaatttgatctgccctcaagtaatatgttctgattgtgaggtttgaagaggcagtgggtttgtttactagtttccaatctgtcttcatccacctggtttttcaggagcttaaggagcttaatagcaacctgcctgtattatttttttctgacacaaagagcttatattccaaatataaccatcataataaaaaatcagggaattgggtcccatcatcttaacactatttttaatgttctcttcaaaattagggtaaaagatccataacattgcaaacttttttttaaagaaatgccccaatggaagaagtgtttcagaccatgcttgccaatttttttaaagaagggaaaattttaaatataacatgtgcaagtcactataccaattta

SEQ ID NO: 60856 - DNA, 1985 bp, Bovine  19866880895012
  misc_feature (1)..(1): n is a, c, g, or t
ntatttttgcccacataagctagtttgtattttaaactgatctggatccaatacataaaaatctgatgacctgccaacagagatgatgttgcggttgcttgtggagcagctggtgagtcaggataactctttccaaacaacatacattttcccaagacttgaggaccccagcctgcttctctcaaacataaaacctgtgcaacacccaaggagatttgaatggtccaccttcaatcgataaactttttgaaagtcaggaaaattttgataagaaatcaatcaatttttagtcatggtgtgttcagttttccaacacgcttttgtgaatcctcttcatgtctttattccaatcacatccctatccacatccagtgactatacctctttacttttcctagtgatgaaacagggttggttcatttgcgtacctggcatctgaaagatacctgggatctgatgagcatccatccggggcattaaatattaacctctcacttatgagtcacgggccataggcttgtgaaccaaaccaactgttgatccataaacggtgtcctcatcctgaagattctgcagtgagggcaagcacaagaaaccagcaggataatcaccttccgttatttacaagtctgtaacataaaacacataatgttttatgtcttggtcaacatgtctaatatgtataatcagtagaggttccatttttatgagctcaagacacttcaactcataggctttttattcatatctagaatataggtattatatatttccagatataacgttatccggcctcttcagctgttagtactaatgatttcaaaaatactcaggcaatagggtggaacagattcctctagaatgaaacaaacaaaaaaaattaataaaagcaatcataagaccaaaatgatacattatcagagcttcatctgatgagcttatataaaaaataagccatctattaatgagcataataatactcattatttatgcattcaatcattcccatctccaactcattgttctactttttccttcaatattttttctatatgatgccctttgacccctcagtaggtttcattgggaaggcatgcttttagaaaaaacaaggtcaataaaggtatcattttcaactgtgctatccttttcacagatccaagttgaaatgaaatcaattatgagaacaaatagcactgttttattactaatgaatgaatttagcattgtttcccatattcccaccacttaaaatggaagaaatatagtaaatgtggtccagagaaagctcacatagtccaggctaatggtggaaatacttaagcatcatccgtatacagctaatataaaccaaagtggcttattaccactgttttgtgatttatgactcacattatgattttattttgaaatggtggcatgaaatattaatgtgtggtaaaagaacacacaacaaggagcagggatcatgttctatcagatgtaaggctgttcggtgatttattccttgtaataccctgaactcaagtcttagtatcctctttgctctcttattgtaatcagtccctcacattcaaacttttcaaggtgaggtagccccacttttgttcttagattagaggttgcgtactgttaatttttaaaaggatggagtagtttataacaaacatgaataatttatagcaaatgttctcagcattgattagtgttcttttgaaatagactatcttcttgatatgcatcactcttttaatgccttatgaaaagtcagaagacctgttactgcatggcttaatggacaaatcaactttaattttagtcatatataatatgaaagataagtacctatgtttttccctgtttgggatttgccaggcattaacactgaattagctcaaagcagtccacagaggagttaacaataggacacaattgctctcccttggaatttgcattggatctggcctctacaagtttgggggctg

SEQ ID NO: 60857 - DNA, 1023 bp, Bovine  19866880931002
  misc_feature (1)..(1): n is a, c, g, or t
nccaattaaaataaattttcaaaaaagagtatggtttgcatagtagagaagggacaaaggagaagagttgataatgaaagactggattgctggtggagccattacagtcagatgaagcaaaagaggtaaaggaactcagattttagggagcataattggtgtctgtaggcccggaacatagttatctggatgggaaaaggggagaagatgttactggaaagacaccatgctatggaaactggacttaggatttctcaacaggttaattgaaagctgttaataaccttttaatttaatttttttactggactatagttgatttacagtgtttttctagttcctgctgtacagcaaagcaagtcagttgtatgtatatgtatatctggttttttagtttctattcccatataggtcattagagagcattgaaaaaagttccttgtgctataaagtaggttcttattcattttccactttttatatagcagtgttaataactttcaagtaggaagatagcactgtcaaatgtaagcactagaaaactgactcaggagatgacacattgaaggaagacagtggtgtccaaaagaccctgtgaaccgtctgaagaaaaagagtaaagagccaaaggtgtctttctggcttaggtgagaggtgtgcgggtgatatccttcactggggaaaggtcaagttaggggcagaaagcaaagttctggagctcgtgagcgatattgagagtctgggaaaatgaatgcatgagtcatgtgcatggaagtgatagttaaagctctgggaacaaacgcgccttcctaggcgggtgtctagacttgagatgtgaagagctttgagtacaaaaccccggggagcactaacgtgaaagagtggagccaagaaagatgagtcagggaagtgaaacgaaggacaggagtcagaggctcctttggagaatctggaagcaccatatgaggcagacacaggcttggggggtgggggagaggatctcagtaaggatttccaaagcag

SEQ ID NO: 60858 - DNA, 4328 bp, Bovine  19866880944056
  misc_feature (1)..(1): n is a, c, g, or t
natggggcacgtatgcctagagcctatgcttttcagcaaaagaagccaccacaatgagaagcccatccatcccaactagagaaaagcctgtgcaccagtgaagacccagtacagtcaaaaataaatgaattttaaaaattaaaaaaaaaatgagagggagagatcataactaattggatttctcaagttctacttgcctttttacctgcattcaccacccatagcctttctctatgtactgggaggagaagaaatctaagaaatattctataagactataattgctcatctaaaaacattgaagtcaaatgtgtttaaaaagacagaatttgtttcagtttttatcaaggtaataggatgcatataccatatgatacatgcatccagttgcatcagagccatgggccttaactaaacacgttatttctgcagtgagctatgtgaatattctcacgaaatggaataaacaaagagtgcaggacaagatggcagagtagaaggatgagctcacctcctcttgtgaaaacactaaaatcacaactaactgctaaacaaccatcaacagaaaacgctggcacctaccaaaacagatattctgcatccaaagacaaagaagacacagtgagagagcaggaggggtgctttcatgatataagcaaatcccatacctgctgggtgggctacccacaaacaggaaaatatattgcagtactcccacaggagaattctgagtcccacaccaggcttcccagcctggggatctgtaataggaaggaggagctactggagcatttggctctgaaggccagcagggtttgagtgtaggagttccacagggctaggagaaacagactccagttttagagggtgcacacaaagtttcatgagcactgggacctaggccaaagcaatgacaccatagaaacctgagctagacctacctgcaggtcttggagggtatcctggctctctgtagggatatgaacactggtggtagaagctccagggaatattcaacaatgtaagctcccactccagtgttcttgcctggagaatcccagggatgggggagcctggtgggctgctgtctatggggttgcacagagttggccacgactgaagcgacttagcagcagtagcagatgtttatctatttcaactcaacagattctagatgagcgttctctaattattgaccaaaattgtttataattttctatctttaagtttggacatgtatatttctacttctgttcttcattcctaatctctttaattcatgctttctctcttttctgtaaccagacttacagaagcatctctatatttattacccgtttcaaagaaaatgcttttctcttgatgttcctttgtttcaatgtctggactgaggtgcactccaggattggaactgagtttggggagggacttggaccattagactgtggagagagggaattctttcaagaccaaactaaagaagatcactttcagaaacacagtacatattaaaagcaatgccgtagaaagaaagacaacaacaaaacttccaacactaatatagattgaattattgtgtgctgaggactaggttaggtgctttacgcacattgactcatttaatgtttaaaattaacctatgatatttctattattaaccttattttcagatgagtaaacaggctctgtgtcaataaataatttgctcaaaatcattgagcttatcagtggtatatgacttcaaaatctgtatttttttcctgttattccattaaccatgaacagaggggaaactgggtgtattgctgggaatcttgaaagtttggaccattaagacatgaaaggccaatgggacggacaaaatttagcttttcacctacttgattgggcattctgggccaaaccaataaggcagacccagttccattctaaatgacttgatctttatgttattctgggaactctagggagaggaaacataacctggtggaaagatccacacggaaacaaattatttttttcaataccagggagaagtattcctttagaaatgaatctttagtatgaaaaatgtgggtaaatggaattaaagaaatgcaatattaatgtttgccataaaaaatgagctaccatgagtaaccaaaaagctttcattgtctccgctttctgcagcaaaaatacaaagaacactacaccaaaatgagtgtgagaccaccaatcacacttttgttcaaagtgttgttctcagtctgtttaaaaagccatgacaaccataaaaataattacgcatggcacatgtactattactacctcttaacggaggagtattgacgtgtgtagtcctggaggcgcacgtcaagtcattaacgggtttgccgtgtttgagcgcgccttcagccaacactgagagatgcacccagtagttaagtctccaattaaaaacaaaacaagcccttttatttctttttaagcctcctttccttctccctttcttggtatttagtcttgtgctgtccgctaacacttcctgggaggatggaaatgttttctctttttggctgtgctgagccttcatggtggtacacaggcctctctgtttgtggtgcgggttctgtagttgcggcaggtgggatctttattccttgaccaggaatcgaactcacgtcccctgcattggcaggtggattcttaaccactagctccatcacagagaagttcctgaaaatgttttacgtctaggcccaagtccagagctcggcatagacttgagcactggacatgtgtgcttagcatgaccgaggagctgaattttaaattttatttcattttaattagctgaaagttaaataactacatgtgtctagggatactcaactggacagtacacgtttagtctctcaatccatcccaaggtgttcatttctgatggaaagacatcatttgtgatttatagtggcttgaatcatctatttgatctccctgactctcacatttcccacatcaaaatgatcagtggctgaaagaggctggcagtgtcaccttttaaacaaacttcattttgttgtttgggagctgctgccctagtcatggtttattctgggtgagggttctgtggttgagtgtggatgagttgtggctttctactgtactgctggtgttcacacactagatgctgagggaaatcagatgtaacctaggaggcagggtgtttgcttatctttcagcttgtttgaagaccaaaccacagccatgctgggataaagtagctgggtgaaacagaaccagcaaactccagggaggttccatctccgctcaccacaaaacctcaatgttgactcgccgttctcttctctctgggcctaatgacagactttcctgggtttcagttgctgtgaagaggtcgcctgaagtggagagtagtctttttactgcagggaattatttctgtagttgccctagcgctttaaataaaccgagagcaacacgttctacaagagcttccgatggcttggcaattcctcgtaggttgcctgtcctggttcccagtggcatggtttccagtcttcctctggacccctgatggatccagagccaggtgtctttcgagatacggctacatgcaccggctcaaatgacagaaactccaggtctggtgcagaaaaaggcccatctaatggagatggcccagaagatgtcctttccatcgtttctgttcacgtttcctaaaagaaacttcattggtccctccatccctgccccccaggaccctgctgagaagcagacgtggtttctgctccctgggacattttgccttgtgcatcttgtccaaatccatggctggcaccatccacaggctcggcagagccagtccatgtacagatgttgttggcaagagccttttcttctccaatcttctgaagagtgaggaaaagcatctttctcccctctttgaccgtcttgatgtttacctgcccgtggttgaagggtgaagggtgcttgtctattgagcagtgagtcttcctccctagggggtcaagtccagggtgacatgtgccgtcccttcctgttcttgttgccatgggtatccatcccactgtcaacttgacccaggaagacggactgcctttcctgttgttgttgtgttgctaagttgtgtctaaatctttgtgacccgatggactgtaacccgccaggctcctctgttcatggggtttcccaggcaggagtactagagtgggctgtcatttcaaactccaggaggtcttcctgacccagggattgaacccacgtcttctgcattggcaggtggatcctttaccactgagcca

SEQ ID NO: 60859 - DNA, 1040 bp, Bovine  19866880945056
  misc_feature (1)..(1): n is a, c, g, or t
ntcaatttgttattcataatcctgaagtcataaatcactttgatggtaattcctaacgcagattggacctttctgcttggcagaaaggatccctttaaatgaagtgtgtgggggaggttagtgaactggagccaaggttaaaggaacctggaatcaaattctacttctgccatttttctgtggtgtggcaaacctgagtttccttgactcaaaaatggggctggtactgctacctaattcaagagatggttgtatttttaaaaaataaacaaaatcacttactgcagtgcctggcatattctaagtacttcagtaaattgtacctagtctgtctacaaatttctacttgttttcaaatgctataaatcaaaggcaaacattttccctgtagggatagatggtaaacatttcaggttctgtgggccctgtggcctctgtcacaaccagtcagcttgaccactgcagcatgatataaccacagtcagcaggaaaccaatgtgtgaaactgtgttccaataaaactttatttataaacactgaaatttaaatttcatataatttttgtatgctatgaaatcttcttcttctggctcccccccaccccatccactgaaacatataaaaactagtcttagttcaggggccatacaaaacacttgtatggatttggaactcatggtttgccagtccctgctataaaccataaggatatgttagaaaaattgtagccagtagttcttttgtgaataacacattttcttgtcaaataagactaaagattaaaaataggcagtttgaaaggaaggttttaaaaacactgcctcgaatgtatggcaagaagaattgtgggattgttggaggtctagaatttctgaggctcccttcttaacccatggaatagtggactgaggcccatcaggctatgtgatgtcctccaggtcacactacaagcttgaggactgttccagagtcctggcttggtgtcctttccacggcaccgagtatcatgatgttataatgtgtacttcattgtgagctag

SEQ ID NO: 60860 - DNA, 1099 bp, Bovine  19866881020920
  misc_feature (1)..(1): n is a, c, g, or t
natttgaaatcgctcaactggaattccatcacctccactagctttgttcgtagtgatgctttctaaggcccacttgacttcacattccaggatgtctggctctaggtgagtgatcacacgatcgtgattatcttggtcgtgaaaatcttttttgtacaattcttctgtgtattctttccacctcttcttaatatcttttgcttctgttaggtccataccatttctgtcctctattgagaccatatttgcatgaaatcttccctttagatgtagcttacttttgaaaaacattagaaataacacgttgtcacttataataataaaacacataaaaccctatgagcaaccccctcccaaaatacattcccttccttccctaatgtcctctttcaaaaggtcaggcctgtcccaattgggtatcatccttctcgtgcttgcccttctatggactgatttgtgttgtattttaggcagagtggtgaatgtatccagctttgtcagtgtcaactctctaaagaaatgcagccgtgaactgcagcagaagtttcgaagtgagaccatcacagaggaggagctggtggggctcatgaacaagtttgtggaagacacaaagaacggggtgcacaggaaggagggctggcccgataccgcatatggagtgacgaaaattggagtcacagtcctgtccagaatccacgccaggaaactgagtgagcagagaggaggggacaagatcctcctgaacgcctgctgcccagggtgggtgagaaccgacatggggggacccaaagcctccaaaagcccagaagaaggagcagagacccccgtgtacttggcccttctgccctcagatgctgaggggcctcacggagagttcatttctgagaaaagagttgtgcaatggtgagctcattcacagctacaccatggatccatttatattgctgtcccagattcaccaaacagacactgacaaaattatcgctgtgcagaaaaaaagaaaaaggaatcaaaatatccagatcaagttctcactgggagagggctgctaatcttgtaaagagttttctgacttcttctgtgatcccaggggaagaaa

SEQ ID NO: 60861 - DNA, 729 bp, Bovine  19866881021063
  misc_feature (1)..(1): n is a, c, g, or t
nccaactacttaatcatccacttgttaaaaagatatttatatatgtagtgccttctgtgtactggagtgcggcaaaatagatggtgcacattctttggcacctccccatcaagaggcaggcatattgcttctccacttgatgacgaggtggcctgaagcttctttgaccaatgcgacttggcaaaagtgatgctaaggcagtcctggacctagcctttacgagcagtgacacctgctgccttggcctctagggtcagccaccacgctgaagccatgtatagacccagtgaacagccctacacgtgctcccagatgacagccagcatcaactgtgagctttgtgagtgtgccatcctggactcccagcccacgcaagccttcagatatgaagattgcatcaccatttcttcagctccttgtttagagccaaaaagttctttttctaaaaaaacttttgttaacactagctgtcaggagtgtttacttacactacatggtgtctttaagatgaatctttaaaaatttcataccatcattggcatgaataaatgacatatgtttttccaggttatgaatgttttccttttaatgacttcatgtccaagtaataatcattgccttcctagaatcctttcccatttgcaccacagtgactctattcaagagatctttgccagtttctatgagtatgacccttgtattcagtatctagttactggctactggcta

SEQ ID NO: 60862 - DNA, 1823 bp, Bovine  19866881056661
  misc_feature (1)..(1): n is a, c, g, or t
ntagctcatgaaatttccaagccaaaggaaaaagacaaagattgttgggtgagaggccagaattgggagccaggagagctagatggtgtgataaggcagaagcaaggggtgggggatggccctggcggccaaagggtcaacagaacgttcaggagccagaggtcaacgacctgtgggaatcaatgggggaaggggtttccttttgtccacagttcagaggacttgctgcttggaaacacagcttacgactttcataagcactctgaccaaatccctaaaccacagcctaagcaaagcctgcaatgtatcattggacgtaattaaaggttcataccccattggtggcagagggtgaaccaaggtgacttactaaaagtaagtcttttcccgtcccacaagtctcagaattctcttagatttggcgaggttccacgaacagaagacagacgcacatttaccacgactccctccatcttgcgagaaacggcattttcctgaggaactcagtgtgcttctccagacatcacatgtcctcccacccagaatctaaagaagactctgggaggagaagggcggagaggctttaaaaatgcctagacacacactgagtcactgagggctcttccagtgtgggtaagggccaccactgggcagaaggggacccgatttcagactggagccctggagacaacaggggaagagggggaagaaggggcggggggagctcaagtagcaggctgctcttggcaggggcggctgctaattttctttggctggctctgactacctgtctgaaagcgcagcaatgcaggaaggaaatttttcaagagattaaactattattgtttcctgtgtggctgtcttcgctggtgtatgaaaaaaagctttaagggcacttgaaaagagatttgtctgaatagcagggctgttatgattcatctccccctccagtcgggatctggccaatttcctcaggaaagtggttgattaggacccatggatttatccatggcctaaatataagatgtcataaaggtgattaatggtgagctcaccatcagggggagttaagagtttgtaaaagctatttttaatggttcagagggaggaaaaaacctcatttgtcaccttgccaatgtgtttcaagagttaaaaaacttctttgtggcccccgatcattcgtgctaccaactgttaaaggtcgttgtattttccgattttacaagtttgtttgaaaaaaaattgattcaatgtgttttgctgtttatagaaaagtacacgaggaaaggaaaatgaaatgtatttccaccatgattagtgactgttgcttctggtagcacttaagtacaataaacttggctctttttttccaccctgctttgctgtttatgcccctgccatacaaatagcaattaatggagggtatatggagacagttttcagagcccaggcgaaactggctggggttcccatataaggggaaatcagagtagttcagaaagcagacgatggccctcatgggcactgatggtgtccagtgtagctcagtgatgtcacattatccagagatgccctaaaatatgaactcattgtcctgacaactccacaaggcaagatgctttccccagacacaaggcaactagctttgtttaaagggacttagaggatcagccttcctgtaaagcagctactgaattatctaaaattggcaatcaaccactggccaaatcaagcagaagagcaccaaaaaatattcactgggggaaaaaaaaggggccagtgtggctaaatatttgggcattttgggataggaaacataaggc

SEQ ID NO: 60863 - DNA, 739 bp, Bovine  19866881061774
  misc_feature (1)..(1): n is a, c, g, or t
ncttaaatacatggaaccaatatctggttgaatttttttttctatgtaatgagatataactatttcttgaacccttattactcagaaaaaagtgttcaggcaaatgcagtttgctaaataattccacttgtcctgttaccagtttgagcctcgatcgtggttgtttggtatggcaggaagactgtgtcctgactgtatgttattaaactgtttgttttttaaagtgattttttaaaaagacaaatgatcatcaagactgctgaccttttattaatcttaagaaagttcttgggattattccttaatgttacagatttttatggaacaactttccgtctttggctttgatgggatcaaaagtagttgtgttcatttctagtttgcaagatgacagaaaagaagaggcaaagaggtactatttttcttgttggattgacaatgaaaatgagaatcagatggaggctttttttttgtaaatgtaaaaaatgttcagtcatttgtataaatggtttaaaagccttgagattttaggaatgtgtatttgcaattattctcttttaataattaatttctaatatgttttaatcactgagaacattgttttgatcattaagaatttacaatgtaaagattatttcaaggtcagatttcaaatgttaatcattgtaacctaatgcatgtaaatctctactgaattgagcttaaaaataaaagtaagtcattaattcgagctagcata

SEQ ID NO: 60864 - DNA, 939 bp, Bovine  19866881070364
  misc_feature (1)..(1): n is a, c, g, or t
naattaataaaacatctaagtcctgcgtgcctgggggctcactgtaatgtttgtaataagtagaatgaatgctgctgcttgttggaactcaggcctttgagcccagggtccttggcatcctctacgtctgaaagtgttcttgaacttcagtactgtttcacttgcaccaacagaacttgtctgggaaaatatctaataagccatggtaagaaacatctcactacagctgtaccgcctgccttctctcggccccaagttatccgatcttgctcttgtcagtgaggtgtgtcgatgaagtcaaacccaagtgtgtgctttgctttcgagccccaactgatgacagccgtgcccagttgatttaatgagctgggggcagataaaggcgaggatttgcaatgttcgaagtgtcttcccaggtgagaagacaaagattgctgacatgcctctttctcacagcccgggtgcccaacccgggcctggaagcacatcaaaggccacacttcccttctttttatgctctgggtctgatctctccctctctgattgcatgcctgcgctcctcacgagttgaacaatggaggtattatgctcttgggagaagaaggagccttacctcaaaggccaggtgccaggggtaagtttcctcgtgtccaatgactgtggtaaatggttcaggctttgtttttctttctcttctattttttcagtctttgctgtcaggctgccagacactggccctgagcccatatcagcacggggcatctagttgtgttacaaacttgagttccattgtctttcactctctcccaacctagtatctgattgtatttctgtctccttatcagtgctaaagagcaagggcaaatcagcttcagtaaaaattgaactgcagtcccaaagttcccatttcatcacctgaatccacattgttttctatcg

SEQ ID NO: 60865 - DNA, 1450 bp, Bovine  19866881075772
  misc_feature (1)..(1): n is a, c, g, or t
nactttagaccttctgaaaaccctgtgttcttggctgtgtgttagttccctggtttcattgcacagctgcctctcatgctcctggcttcaacctaagggaaggcagaaaagtgaaagtgaagtcattcagtcctgtccgactcttagcgaccccatggactgcagcccaccaggctgctccgtccataggattttccaggcaagagtgctggagtggggtgccattgccttctccatccctttgcatgacctacagataatccacggagttgagtttgcttttctgaaataaaggccttcatttttactctgccctttacagatgaggtgaggagcccacaaagacttaagattctgatacaacctgaggttatctgatgaatttattccctacaaaactgcttacattctgatgacatgtgtaaagtaagacatatttttatccaactgggcagagaaacccactagatccagactttagagtggattctaattctcttagagagtataattcttcagcagaaacagacacagcattgtaaaaaaacaactgtagtaccataataataataataaagtggaattcttaagaaaactataaggccacagcgttcactttgtcctgagctggcattattgccatgggtgctaagagcactctaagtttgtacagaagcctgaaactgatgctgaattcttggtttctcagactggcctattataaataaaaggggtgaagaacaaaagggaaggcagaaacccccagttatttttaagagatgccacctctgtatgtgtttttcactcagtgtcaactctccactctttgaccctttctacatatcatgagaaatacccttggaatctccctccctcttcatttctgtgtttttttttttttcccttcctctggtatcgctttgtcatccctactatgacaagctaaggagatgcagtcaaattttttgttaacaatttcattgcagccttcttatccttgacatcatccttggttatctggcaccagaaatgcagtggaaattacttaacgaaaatgacacttagttgatgtcactgaaagggagtgctaagtgcaatgagaaacaacagctcatgctcttctgagagataaacagctctgctgattggccccaaatgtggcaaagtaattcagccagggagttggaggaaattccaactgagagctaaagtataaagtaatctaaatggggagctcgagagtaagcccaagggatacctgcatgccgaagcttaaaacatagcatagttcagcattaagacaacatcactgcattgccaacactctgcgtgatttgtattacctgaaagtaatgttgtcttacaaaatgttcttgtctaagagtcaaggccagcaggaaactgtcaacatttcaaccaagcagtttgccctgtgcctgaatcagttcaa

SEQ ID NO: 60866 - DNA, 1646 bp, Bovine  19866881080462
  misc_feature (1)..(1): n is a, c, g, or t
nctaggatggggcagacggctggggagaaactcagctggacgaatttaggacctggtaatgacaataagcgggcaggcttacttcccacgtatgggcagggtgccctccagtttcctggtgcgtggatgacaggattagttaccaagaggttttggggaaaggacaagtctttggggggaaggggactaatgaactggtggtggtgcaggcgccactagcctgagtaagagggggacaggagaaagaggtctgggaaggactcctgagggaactgcccctgtgatgggcacagagcagctcaagggcctcttggaggaggaaacctctgagctaagatgggaaagagaagaaagagccagatgtgcaaaaagcaggtggacagacagcaccaaggacctgggcagtgtgtggagggacctcagggtgcaggacacccagctgggtggagacacggtggagggcagggaagctgagcaggagtggcaggggcctgtagatgagaccagagccaggtgggcccagatcttgccagaagcactgctgtcggctccaatcagactcacctttgcggttttattagaggcaggagctccgtgcacacatctctggtgccaaagaagtttgttttcatagtcacctctgcttgaatgtgaaatggtgtggtgtcagcagctttcaagagaaaagcaaagtggagtcaagaaacagttctcgcgcggtaacattccctaagaaggtatcgctcatgaattttgtgtgcaactagtgaaggtaaaaatcggttgaattttgtgcacaatacaatcagtattggacccgtgtgaatttctcaggttgataatgaaccatagttctgcaagaacgcaccactggcacggcgctgtacaaagggtacatgggacctctgtgcatcagaaaggggctgtgcatcaacctggaaaaggtgcccgggattctgagccagagaaactaaaagttctctccggctagagagcagccaattcctcgcaattcctctagccgcacctcttcccctttcccttctccttctctagggagtcattctggaccccacaggcgggagaagcccctctacagcgattccccgacagatttggtccatcttggaccgagatgctcagagcgggtgacagcctctcctggagcacccagccgcttcttactcttgaaggcgatgcccgcgttgttgaccagcacatcgaggcccccgtactccttgcgcaggaagtcacgcagggcgcggatgctctgccggtcgtcgatgtccagctggtggaaaagggggctcaggccctcagcctgcagctgctgcacggccgcccgaccccgcgcctcgtcccgcgccgtgagcaccacgtcgcccgagaaccgccggcacaggtcacgcacgatgacgaagccgatgcccttgttggccccggtgaccagcgccacgcagttggaggacgacatggccggtgtgcagggcgttgagttgccttcaatagggagcggcgagtcccagcgtttgagcgagacagcagtgcgcggagcgatcactggcttgaatcacccaggggcgcctgggctgagcgcgcaggcgcagacgcaggctccgcccctcggggctcggctccctggggac

SEQ ID NO: 60867 - DNA, 1139 bp, Bovine  19866881127641
  misc_feature (1)..(1): n is a, c, g, or t
ngtttcatggtaaacaaacttatttagtatcatcattccacttaattgaaccatcatgttttaataaaattattgatgtcttaaagtttctgaaaaaagtttgaaaaatatcgttattgcagaaaaaagagcatagggataaaccaggctagctaagcacatgcagctacaataagttattatcatcaagtctggggtcaatgttgtagtcaggagatatggtattggggagagtgggagggaggctcaggagagcggggatatgtgtattcttatggctgattcacattttcatatggcagaaaaaccaacaaacattgtgaagcaattatcctccaattaaaaataaataacaatctttttacaatatgaactgttttagatacaaatattaaattaatatttctgattatatatatattatatgtggttaaactattctgcatttctttggttaaataattggaactgtcttggtttagcaactatgaattttgtggttaaattatgttgtctagttttattttaacagctatgtatatatatatgtgtgtgtgtgtgtgtgtgtgtacatttgtaggtgattttcacacaagttataggtcattgtaactaagccacagaaatctatgaaactagcctatatatgagaatcatataaatcactttcacttcaggtttaaattttgtcctgtaagtcttagccattagtaggaacttgaaattgctcccaaggcttataaacagagcaaattcttcatattactttttagagatacaattaccataatggaactgtattatgtaattgtcaaatgtaactctcatcctttatataaagtgtaaaatgtacttcttctgtttgaaaatgtaattctgatgttttagttcacccataggaacaaatttttctaggaaactgacaaccgcaatttcattatcttgaacattttttccaaatctcaatcttttttatcagattttaaattactgtttatattgttcttatgctctctgatggtatgtttctgagtttttatttacatgaaagtgtaaatttgttctctccaagaacaaataaaaccatacaaaagccatgtttttatatcagaaaaagcaggttaatataactagtatgt

SEQ ID NO: 60868 - DNA, 2574 bp, Bovine  19866881153510
  misc_feature (1)..(1): n is a, c, g, or t
ntcctttgattctccccctcgacctcctgccttgggagccgccagcactgagaactttcctccatggtgtgcgggtgtccccaggcttccttcaggattccaaagagttcacggaacttcttctcccagctacattccttttttctaaggcttggttcctatcataccctccttttaaaaggaggtcaggggttctattttatgtttaaaataaaatttaaaatcatcatttaacatatatcttagaagtccttctaagagtctccagccccattagccatggaatctgcctattcccttgttcttttttgcccagcttgcagctcatttaagtatcactggatcactgaagataacctggacttccctggtggttcagatggcaaagaatccgcatgcaatgccagagacccgtgttcgacccctgggctgggagatgactcacgctctagttcttaaaatcaaacttcctctgccaaattcaagaccctgaatttatccaaatgatagaaacatgcttttcccaaccatccaccaaaatacctcccattcagaccaacaatagccttaatgggtggattcagtcccctccagttctaaggatagtcttcctgcttcaccattgggccagcagccttcaatattcttcacaccggctcagaagatgccactcacccttttcaaagagtgaggtccaggtttgaaaatggattgatttctaattacattaaattaatgatgttaacacatacacagaaatgtgtccccatcaggtatgaatctattttattaggcagaactctaatgttgttccaccctcaagcctttgaaaagcacttatggtggggagtggaggctgagagaagggacccttcctgtatttccaccctggcttcctggtgatgcatttttcagaaaagtttaccttgaacttctccgcacctcctaccacctccctgcaaatttacacacagagcacctttgtgagcctgagacagggacagagcacagagaaggtgtgtcaagccaaacaagttgattcatgtgcaaaaatcccccaactgcgtttacagattgaattggaaaaactctccgctgcttctgggtgaaattccactgaaacccttcactggctgcctatgccttcagtacatatagttgccaatgcttgcaccacagttcacatgtgcaaacgcacatgatcagaggtatgtgagagcgtgtggctcccagatgtctgtgtcatccgaaggccaacggtttgctgcatatctgctgtgcatacacatcgctgtctctaattgtgctgtagcccacaacgtttaacatggtttgcttggtgcggtgcttggattttgaacttaacaacactagatgcttgaatgtattgagcaatggggcgggacttctttggttggcagtcatacgtttatgaagagctccaatgactgggaaggaacagttatggatctgcaactgtactgtatgacagccactagccacttgtggcttttgacacttgaaatgtggctggttcaaattaagatgtgctgtagctataaaatgcacactaaatctcaaagattaggtaccaaaaaagagtccaataactcattgataacgtttttggtatttttttttattgaagtatagttgatttacaatgttatgctagtttcagctgcatagcaaagtgattcagtgattatatatatatatatatatatatatatatatatatatatatatacatgttctttctctgattctttccccttacaggttttcacaagacatgtaaacttccctgcttggagtatactcctgtagtacattagcatagttccctgtgctatacaatatatcgttgatggttatctgttttatatatggctgttgtttagtcactaaagcatgtccaactcttgcaaccccatagattatagcccaccaggcttctctgtccatgggatttcccaggcaagaatactagagtgggttgccatttccttctctaggggatcttcctgaccctgggatggaacccgtgtctccagcgtctcctgcattggcagacagattcttcaccactgagccacctgagaagcccattttatatatatagtagtgtgggtgtttaatcccaatctcctaatttatctattcctcattaataactttttagaatgataatatatgatataatgataaattggctatactagattaagtaaaatgttactaaaatgtcacttgtccttttttactttttgtatgtgatcactagaaaaatttagcttgcacatatggctcacattatatagtgactgtacagtgctgactcagagtacttattaaaaccagagtctcatagaagtggcccaggaatctgcatgcttaataagcacccaggtgattgagatcattgccatttggggacccctgatatagcaggcactgacatggaccccaaggcagaacacctggattctaaatttgtttcaaattctttctcatcaacataatgcagggcttggattagacctaaaaagttgtatggtttaaggcttccag

SEQ ID NO: 60869 - DNA, 1078 bp, Bovine  19866881157284
  misc_feature (1)..(1): n is a, c, g, or t
nacattaaagtggagtcttaaaggaaaccttcttggtcaatttctttttttctgaaggaacagaaactcacttgaattataaaaaattcaggcaatatcattggaagtatatggaagtatctcaagaatcccagggaacagttttagccaggatttatgagaggcagaaacatgagctgtaaagctaactatgcaagttactccttccctctctccagtggtccttggaaccctatttctggttctttctgaggctctccattcagtttttcctgcctacagactggctttctctgcttctgcctacatctaagcaagagctgccacatcagataccctagagatcctctcaaagaagatgattggtataggctgggccgaatttatgtcctagtccaatcagctgtggctaatgggtggggcaacttcaaacaacactgattctttttcatagaatggagggaacacccaaaggtgtccattggaatattggtgagattagacagactttcatttaactctgggataagtgttggtggatccaacacttcacagtttgttttgctgttgtttagttgctaagtcctgtccaactcttttgtgatcccatggactatagcccaccaggctcctctgtccatgggacttcccaggcaataatactggagagggttgccctttccttttccagaagatcttccccatgcagagaagaaagaaaagcagagcaagttcagctcatttgttcatcccttccaggagccccgagatctgggtgcacctaaggaggaaagtggttccctaagggtgcagttgtggcagcagaggcaggactggcgtggggggcatctttagaccaagggctatgtttcctgtgcccagatgcagttaggggcaaacacgtatggcacagtattggggaaggggtgaggggccaaaagaagccaagtcattagcaagagcagcaccaccacagcaccatttttcattgcatctcctgcattggcaggcagattctttaccactgagccaaaagggaagcccattttgttattagtcccttatttttacaacttac

SEQ ID NO: 60870 - DNA, 1308 bp, Bovine  19866881174648
  misc_feature (1)..(1): n is a, c, g, or t
naatagaattccatgacactgataaagcaatgacacatgtcagacataaaatgttctctggttttaaagttctaccatatattagactatgaattcttacattactgtaaatgtggtagtcatcagtgccggtttccaaatattctaattcttcctccttctcagcaattccagcttctggaggattgcccatcctggctcctctgtggtgggatatgactagctctggccaatatgctgtgaatatatgtgtgtatcactttctggctggagaaattcctcaacctagtgagaccctgctgctaaatcacttcagttgcgtccgactctatgcaaccccatagacggcagcccaccaggctcccccgtccctgggattctccaggcaagaacactggagtgggttgccattttatagagctcttgttttcttcttccacagtgaccataaatgttctggtgtgtcccaaagtaaaaatgatgacaacatggaacagagcccttacaccagcctcaggggatgaaagtgcatagtcagccagtcagctatgtctgattctttgcaaccctatggaccgtagaccaccaggcaagaatactgcagtggattgccatttcctcctccagtggatgaacatcttgggtgataaattaactttgctttaaatcactgatttgtgggattatttgttactgcagcataatccagactatgctgactgatacattaaggaaggaaaaaaaaaagtatatatttatctacagtcccatttcatggataaaattaaaaatgactcaaattcttgtccagaaaaatccttctaaatgttaagaatgtcctatttatttctcctggccttttactttgtatggtttatacaaactattcaatacagaagatatttgaaaaatgtttgacatgactggatagatgaccaaattaatccctttgaatgagtccatatacaagaagacaagaaggcaagatattatgatcttattgatttggaattagataaatatgaactcaagccctgattttatcactagtgtgcaaccctgagcaagtttctgaatttccctaactctctgcttcctgaacagtaaaatgagaaaaataatatcaacctcttggggttattccaagaattaaatgagataacatatgttacctcattagtgtagtttctggaattaagactcaaaaatggaagctatcattattattacccttcaaacaccatcaaaaaaaaagaaagaaaaatataggaagcaatgtagataagaatgtcaatattttagaagtta

SEQ ID NO: 60871 - DNA, 1476 bp, Bovine  19866881175511
  misc_feature (1)..(1): n is a, c, g, or t
ncctcaggggagttacagcagaaaaaaaacatgaaggtgagactggccattcatgcttgggggcatcacacagactgacttggttggtgaagcaagaccatggtagagagtgatggaagaggaagtcggagcaataggaccagctgtgtctttgaatatgacactatggcattgagaggactcacaaagaacgatatctgcacatacgtgccagcctagcaaaaagtagagacaacggactgtctcatgcatccgaggtactctgcctaaattatctttgatctattggcacatcttttatgatctactaaaaaattaaatttttcattcatctattgtattcaacaagcgcaagtcgcaagcctgggttattaatgatgtcagatcttgtattactgaaacaaatgcataaaggttccatttctgatgacaaaaagagagtcatttgtttcaatcatggaagacaatcttattaaacattgccaacttactgccaagctggctggtcaccaaggcacggccacagaacaaatggaatcgagaagactgtcaatcttccgacagtgtcactgtccccaaaatagtaaacttagggagagatcaatctatgatgacatggacacttttacttcttaattctggagcctttcaagttcagtgttttcataatcctttcaggtagcaagtaagctgtttggcaaatactagtgatgctgggttaaacggtccgatctgcgtagaaactgcatatatattcatatgaactgacttaacctttcagaaacgtcatttaggaaaatagataaaaagccttaaaaatgtttctaccctttgacccaatgattttacttctcagtctaaggaaataatctggaatgcaaaaaaggcaccatgaccaaggatgtccattactctgttgctcttacggctgaaaacaaaggagccaaccaattttctaacaggaggagcatgatgtagtaaagtacatttcagccacagaaaaaaatgcttttgatgtgatcagttcagtgcagttcagtcactcagtcatgtctgactctttgtgactccacggactgcagcacaccaggcttccctgtccatcatcaactcccacaacttgctcacactcatgtccattgagtcggtgatgccatccaaccatctcatcctctgttgtccccttcttatcctgccttcaatctttcccagcatcagggtcttttccaatgagtcagttctttgcatcaggtggcccaagtattggggcttcagctttagtatctgtctttccaatgaatattcaggactgatttcccttaggaatgactggtttgaccttatagcagtccaagggacccttaagagtcttctccaacaccacaattcaaaagcatcagttcttcagcactcagctacagtccaactctcacattcatacatgactacggaaaaatcatagctttgactatacgg

SEQ ID NO: 60872 - DNA, 1318 bp, Bovine  19866881199753
  misc_feature (1)..(1): n is a, c, g, or t
nattagaagcaacagatcacagctcgtttcaagtatttgcagtggctggtgtcaggatgctgacaattaatcccccatctaaggacgtggccaaatctgggatttttctaaatcaaaaggaagcatgttctcatctaaggtcttgttaaggttttattttattttacttcattatcaaggactttttcttttttttttcctttttggatccctccttggtttgggaggtaaattcctatttaggataaaggttcattttttttttgttttttaccccctaaacttggaggagttactcgggcagagaataacctttgaagttaagagaaactgtgctatcaagccaggatacaaaacagaatcagaaaaggggctcctaatgcattatggaatacaatgcagaatctgccctaaggtgatgctaatttctgctctggtcaatgaaaaccagacttcaggacgacttgctctgtatttatctgagtcctcgagactctgagttgccacatggtgctacgggaaagcctgtgggcctggtgggcaaggggggagccccgtgatggggcaagagctggctcctttattttctttggcatggcttatggaaaagttagagaaaatgaatttcaaatgatgggtcaaaactcaagatttgaaacacacttcctccatcctgtaggtctcctgcatccatggaaatgatttttataactttaatttcattgtcagttgcaggtatttgttcatagagttctagatacccccctccccagtctcttcatttcagtcatttaccatgcaatgactctttctcaagcccgtaaaatcatggaaaaaagttcaaataggctgtaaatgattacacgaatttcctgttttcttttcatttcttttctcctttgccttttaaaatcgtccctttctcctgtggcatattttacatcaaaattgtggaggggacagaagacctacattaaggcagcagctgggatgggccttcgcacaggcaacttgcttcctcactctgtaatttttgtccacatcgtaaaaatgtttcaaatgctcaacaaaggttggcgtgctaaatgaaaatgtggaaataacaaaatgccgtttggtgaggaattttaagagattagacagaagcatgaaagcgctggtgagcaaaggagaggtgattgttttctaaagacaccctgaacttccccaaaagtgggagaggccgatgctagaagcagaaggaagaatatagtcagcagcacctcttcttgctgctccttttggttaatttggttcagcttctgaaaagggtcacacg

SEQ ID NO: 60873 - DNA, 1420 bp, Bovine  19866881261470
  misc_feature (1)..(1): n is a, c, g, or t
nccataggtatacctatgtcccttccctcttgccagttctatttctctttgtatatatgtatgaaatatatggcatatatgcacatgtgatatatctattttatgaaacatataaaattatcatatattttgcatatcttgtacccatattatatatagatatagagagagagagagaaagagagaagaaaacaaaccgatgaagttttaccttgtaatctgtgtacatagttttattttctcttcgggcatatttttaattgttattccctgatctgcatcttttaaagtattctgctgctgctgctcgctgctaagtcgcttcagtcatgtccgactctgtgcaaccccatagacagcagcccactaggctcccccgtccctgggattctccaggcaagaacactggagtgggttgcatgaaagtgcaatttctccaatgcatgaaagtgaaaagtgaaagtgatgtcgctcagtcgtgtcggactcttagcgaccccgtggactacagcctaccgagctcctgcgtccatgggattttccaggcaagagtactggagtggggtgccattgccttctccttaaagtattctaacttggggttaatcatttagcatcaaataatacctattaaagacacagtacactatactatttatcataaccgagtagacactcactaggtctttttttggtgttatcagattattgagaactccgagttctgttttaatgtgtataaggacatttgttgatagataaaagatagatagataggtaatagacagacggacatacacatacatacactggcacacacataaacacaaatactaaatgcattaaagtgaccccactctaaggggtatttattacaagataccagtagatttatatcatttcagaagctgaaattagatttgtgcagctcctttggtcatgttttattacgttatttccacataaaatgagaccagaatctcctgcatggaaatcagcttggcatttgtcacgtctgtatcaagtgtctgaactcatttttttagcagtccttttccccattacacttcctgtgtttggtcatgcaaacaagcagaacattgtgtcattgtgctggggacacttcttacgaaagccagggaggaacaaaagctggaaccagagttaatgagacttattaataaaagggggaaaaatatgtttgcgtaccactccctgaactggaggacctgctggtctccaggtgtgaagtaattcagactccagggcacgcagctccttcccaggcatctgctgtttcaaggatgccctgaacttggtgtcacagtttgttttatacgcaatcagattactctctttgtgaactgacttgcgaaatgtttggaatatgctgggaggagttctcctgcccaagatgcaa

SEQ ID NO: 60874 - DNA, 1989 bp, Bovine  19866881265386
  misc_feature (1)..(1): n is a, c, g, or t
naattgagatgatcctaagacatgcttccagtcccacagggctgtgctatttcccacttaacaggctcttaggatatgggcttgggtgtttcaaaccaaagcatgagaggttttctaagccctgctttgtggggggccctgaacttctgttattctcacgctcaccatgtgaggttggcaaaagatcagcacattttgtattttcaagttctgagctccctctttcagaatgccactcacttttagaataaaaatgatcccaaatgctgggatcatctctcagtatttctgtctccttttggatcttggccttggatttcttcattgcattgacaactctccaaagatttcagttactccaattagacggtgtgcatgtgtgtatgtgcgggggtgggtttgttttatctaactttctctttgtcttcagcagttgtttttgtttaatcagtaagtcttgtctgacttttttgtgacagcatggactgcagcctgccaggttcctctgtccatggaattttccaggcaagaatactggaattgccatttccttctctaggggatcttcttgatccagggattgaacccacatcttctccattacagccagattctttaccactgaaccacctgggattgtcttcagcagagagctgatccaaattatttggatcacctagtctactatgtcaagaagtagaagtccaaagtttcttttttcaaaagtgtgaccttctgaattattattatgaaaagagacccagaaaaagatatttaattcagaattccctaacttattttactactgatgcctttgtttttgtgaagcagcccatagaacaaatgtcccacggcatctcaacttacaaaaggcttagatttcaaaaggctgtccctaagaactttgccttgtaagttcaaagtgatgttcaacaaggagccattgtattcacgtttatgcaaagttaagttacaagagaagaattccgtttgatgattttgttgtgactcatcccactccacgtaacaactgtcattctttcaccactttcttttgttttaattatttctagttttattttcattgtaattgtacacgcagagaaaaaggcactttgggacaggtatgtaaagacatttttaaacatattttatttgaaataatacattcatccatgcatgtgtgctcagtaatgtcagactctttgtgactccatggactgtatagcccaccaggctcctctgtccatgggattttccaggcaagcagactggagtgggtagccatttctgcctccaggggatcttcctgaaacagggatcgaacctttatctcctgtgtctcctgcattggcaggcagatttttttttttttttttttttaaccactgagccacctgggaagccctaccttcatctagctctccccagtgatgacatttcatacaactaacataaaataccaagacccagaagttgacaccaagtactaacattgatacagtactatcaagtgacctgcaaatcttaattagtttcaccactttttaacatgcattcatttgtgtgtgtatgtaaatatgtaactctatacaatgctctctagtgtagagattcatgtaactgccaaacacaaggaagatacaaaactgttttatcatcccaaagaaactccctattgctactcttttacagccatacccacgatccttgtctactggaaacaacctatctattctcaatttctataatgttgttctttcaagaacggtgaattgtacacaaaagatcttaatgacccaaataatcatgatggtgtaatcattcacctagagccagacatcctggaatgcgaactcaagtgggccttaggaagcatcactatgaacaaagctagtagaggtgatggaatttcagttgaactatttcaaatcctaaaagatgatgctgcgaaagtgctgcactcaaatatgccagcaaatttgggaa

SEQ ID NO: 60875 - DNA, 1670 bp, Bovine  19866881267998
  misc_feature (1)..(1): n is a, c, g, or t
nctcttggttttatttctttagacttctcccaactgcaaattgcatttgtgtaacgaacttgatcacaagcacttaggcattttatggtgaagtctgagcattatctggagacttttacacactggagaaaacggatacatggaaaatgtaatccgaatacaacttgtcctctctgagcacaggataactaaagagaggaatgttgttatcttcagtcagtcaagggctgcaagcttcgagtgctgagcctacaaaccttctgatggttctatgatgacatgaaactgctgtcgtagaaactctaaaactaacaagggtattagcttcattgattttctgaaaatgggaaagggaaaaaaaaaaagtgctcggctaagtccaggaaagagatttaatacaactgtcttttaataatattaagtttcctagaatcaatattttcaccccctcatattataccatggcttgctacccaccagttgctatgtaggagaatgggaatcaatagaaggcttaccttctttggagactgtctcaaaggcttgcataatggagcacagatgaggaagaatgaaattgaattttaagtacactgacattatgctatcatcttcaaccaggggaatacagattgttctggggcccatgggacccatgaggctcagggcaaagaggtaccaggtacagattggttcacaaactccagtgtctgtggcttcctccaggactgctttacaaaatgataaatccaggacttaggggggagcactcctaaaaatatcttcaaacacttccaagcagtacttgatgagtactgtttatgatgtgttaagtttaacttgagtggctttaaaattataccagatccagtctgtgttaactcagactctgatgctgaaacccgtttctacttagctttattttatttttctttatttcagaaattcaaatgggtatttcttagctgataaaaaataactcttgatagaatcacaaaaaattatttacagtgtgagagttggactgtgaagaaacctgtgtgccaaagaattgatgcttttgaactgtggtgttggagaagactcttttttttttaattttattttatttttaaactttacataattgtattagttttgccaaatatcaaaatgaatccgccacaggtatacatgtgttccccaacctgaaccctcctccctgctccctccccataggagaagactcttgagaatccctcggaccacaaggagatccaaccagtccattctgaaggagatcagccctggaatttctttggaaggaatgatgctaaagctgaaactccagtactttggccacctcatgcgaagagttgactcattggaaaagactctgatgctgggagggattgggggcaggagaagaaggggacgacagaggatgagatggctggatggcatcactgactctatggacgtgagtctgagtgaactccgggagttggtgatggacagggaggcctgacctgctgtgattcatggggttgcaaagagtcggacacaactgagcaactgaaatgaactgaagatgacattttaaattttatctacggaaaatactcaaaaacagtacaaaatacccaaacctcaaattttgagagagggtagagcacattagtttttgagtg

SEQ ID NO: 60876 - DNA, 1326 bp, Bovine  19866881268913
  misc_feature (1)..(1): n is a, c, g, or t
nattcacgggctttgggaagccagttctagcagcgctaagagcttgcaagggtaattattataatagatgactctaagcaaaccagctaacaaatcttattaaaaaagttgtctttgggggaagtcaggtgccccacacagcataaatccatgtcgaatccagccagcaccactcagggcacagtgcccaaggtgaaggtcatgctgctcagcatgacggccagggaggactgtccgctggctgtgggctgcgtggcccgtgtgtcacccagcaggagtgaagcccacccttgcatcccttgggatgctcttcttttttaatttttgcttttgcaattccacctatccttccagacttcagatatattctccctcttggtgaatgtatcctttatttcttggaaatgctactgcacagattatcaggactgttcgcatctgcagtgctcagcaagctgcttcaatttctgagtttgatcttccgtctgcttcaagaacacctggatggtgtgaatgacccttaaacacctcctggtcccctacttcaggggtaacacctggtccagcatctttgatgtgagcactcaaggatatctgctgaaggaacgaatgatcaattgtagctgtcttggctgcttatgcgtctttctttgccattaacatctgatttttatttgcatgagcccacttattggactatcctttcctaaccaactctatggagagaatacgagactattcttttaagcatagtatctgtccctggtgggctacatttggcagcaacgatggtctgaaacctccaaaggcttggtaagagctgtggggaagcatgaaacgtgttcaattaactcctgttactcaaagtaaatggaggtgcttaagccaacagtcatatattctcagttgctcctgtgactaggctgtaaatgccctaaacacactatccatctcagcacaggcaatgcaacacgtgcctgacacatagtaggctctctagacacctaggccaagggcacaaataatgaaaggaacactgagccttgggctcacttggaagggacaagctccccagtggcatctcgtcaggctagttaggaagcccactgagaaacagctacaccatccttgtgaagggcacactacattttcaccgtccaccctggtccaatttagatgttaaaagacagcagcaaacaggtgaaaatgtaatgataagtaggatcaactatttcccttctttcctatcacctgccaccacttaagagtcgcatcattttctaccaccttcatccatcctgtcctatacccttcattctttttttt

SEQ ID NO: 60877 - DNA, 847 bp, Bovine  19866881304850
  misc_feature (1)..(1): n is a, c, g, or t
ntctcggctcatgaaaagatggagcaggcctgtaatcacatatgaaagtattggttgtcattagcagaaagattgatctgaaaagacagcagacccagagtgaaaggacttaaaattttccactgggcagcccaacaactttcaccttccagataattgaatacagataacagattaccatattagaggaaagaattggattggagatattcagtagatacccgctttagcaaagcaataccaaatttctcaataatgatttttgtttgatgcaaaaacattaatgcagactgacagtacaaaggcacggtccaatgtgcattgaagacaaagttgttggatcagatttttatacagttacctgtggcatcagaggttctaacaaatgcatgtgttcagttgactgtaaaaaaccgagttaaggaacatattcaggcaaatgtcatggctttattccatgaacagagcttctttcagctttcttcagtgagttattgatataaccctgagtggtaattgtataaaactctcaagaactgaactcatgggcaggcatgcaaacggttttcttcactgcataactctcctttccagaaacccactaacggtgcagtaaaaaatgttagctataaaacaagctggaatttttataggaccttggaagggcacggtgaatttggaaattcagagttgtagtccaagaacactaaactgaaggtcaaggttttctatatcttcatccttgtcctacaaatataccatattgacaacctgaagatgttgctcccaagctccagaatttatgcataaaatgagaggctgagaccatgaataagagagatgctat

SEQ ID NO: 60878 - DNA, 1176 bp, Bovine  19866881353882
  misc_feature (1)..(1): n is a, c, g, or t
nccaaacacttagatggcactccccgtgttccaagcacaggcggatgactgactgtggattcatttaatggtataataacccccatgagatgggtactattattattcaattttaccgatgaagaaactggagtctagagggatgaagcagcgtgcccaaggccatcagtccagcaaatgatggacacagattgaaccctattttcacaaagctctgctccctttcccttcgtgacaacagacaaactcatttcaagccaccatcaggttttcaggatccttctatttctaaccattctaaattctctcagataaccctgcaccctataccacaccattacagcttctgatgagacttttgcacaaagcattttatagttcatatcatcgtgtgaacatatctgtaacaaggcaacctgttttccccatcaccaaaaatgaacaatagactataacacccgaatagccatcttccaatattctaaagtgctttaattgttaagaacagtacaagtaagacacattaaattaataaagtgtagaaactattatatggttcaaaaatgagcttttaccttttagggacagaggaaaacaaacaaacaaaatctctaacgatttctctcaaatgggaaacacagattataaatgaccagggccaatgactagagtaaaatgcacataacattcgtagaaaaggaaagaattcaagcatgtgttcaaagagcaataaaataaaattgagaaaaaaatgtaaaagaagagaaagccacaaaaatgtccttctttcgatgtttatttttgtgttaagtaacacaatgataataccatcaacggattgtgatttgcagaacataacagagtattttaaagcagaaaaagaaaaccttcaaagacccagcctttagttcccatgcaatgttctaaaaccagtggaacaagtggactgctggttttctgtttatgttttacagaaataaaacctggcagggaacaaaatggttcccctcttccagcatctactcatctttttctccccccagctgttattgagatcaagtttaagaagacacccttttaagtctcctggaagtctctgaaaaataaaaataggcagaaaagatgattatggaggattgtgggtgggaaaatcatgtacccaatttgttcctgaag

SEQ ID NO: 60879 - DNA, 780 bp, Bovine  19866881752321
  misc_feature (1)..(1): n is a, c, g, or t
nttttaaaagatattatgaatgcttaatatcctataagcagtaatataatgcctgcctgaaaggtcccttttgttccgtgtatggatttattaatatctccacttgactggaacagacaggaatttttgaaactgtgctgtgacttatgtcacaaaggttgttgtggcttcagtttggttaccccaccccacctcagaaataccaagtctgtttaatagagggactttcatacttaaccctgtgcaggctctaaggagagagaattttgttcacattgttctttcccagttttaaacagttctcattaaacttggacatagctgatttcctttccacaatttggataaaacaggcaaatccaaacttgagaaaaactgacactagaaatagaatcagaataggagtttctgtgatcaatttatttaacacaaaaattatgttctaatttttagcacatgttctaactaggtagaattaaggggattcaatttagtgccattagattagtaaaaaggaaattatattttgccaatgttttaagaggagaagatcacctcttaaaaaggctctgtaaacagtaaaaaggacaaggaaaactaaatgaaaagctgcacttcagacatatcttgagattcttactgttcaaaatatctatataaacatacaatgcattcattattcacaattgtgtctgttctatgccagtgccatccaattagatttccttcctgacaggaggtgggttccatctaataaattcattaaattctgtcaacacg

SEQ ID NO: 60880 - DNA, 1305 bp, Bovine  19866881775844
  misc_feature (1)..(1): n is a, c, g, or t
naaatgaatggtagaaggaaagcttcatggtatttagccggctccgatccctttaatgcctgtagcttttggatacagccctgcacccctctcccctgacctctctcccctagtttacactgcactcccctgtccactgactgctgcaaagtctgataaaagggctgaaattagaccttgtctcccagcacagccagcagggcccggctctgccaaaatggcagtggttgatagcaggcaaaaggcagaaaactgatttcccatctctcttctccattttctaggatccaagtgagtcctagttcagagaagaatgactgtctcccggctgggagcagcaggtacgagctcctgcctacgctgtgtcacgtgggctgtgagacctccattccttctcgactcctgcctgcccactgaggtgagctctttggggtttctctgactggtgggcaccggcctacagtcatttcttcgggaaggaggctctccctggaaaagctgatctgcaattcggctgggatcgatgccgtggagactgcataaattggtaagtcgtaagcagctagttttgtctcagctgacaatcatggattagggtgcccggagcaagaatgagcaaatggtctggagaaaaatcagcactgaaactcgacattttttccttttttctttttttttttggaaacatctaaatctgcaaagaaaaaatgctataaaagaaaggcatataggagaatatggggaagtctccaggcagtttaatgtatagatattccctctacttctttcattccacgcctgaacttctaggaggccacaccggatgttctctatccctccttctccttgccctgtgctcactgcgtcttgattctactgatgtttccaggcccattcctgcttttcccctactcctcaacgatctctactctgcatttcagaagtcctttgtcaaggcatattaagaatggccaaaacctagttttcttcagaatattaatcacgtcaggttttgttatcactgaagatccatgattagcaatctttcagaattttgattcttcccatgggctaagtaaaaatacaaaactaaaaagactctgggagttaccgtaactctgatctcttagttttcctgggtttgccctctcttatatggactgctccaccattcctttctgtaattctgtctcattaccctcccagatttttttcatgcactagtcactattaaaaatggaaaccaaaataagcaagaacacaaagaaatattatcccagaagccttgagcaatgccagatgcat

SEQ ID NO: 60881 - DNA, 2060 bp, Bovine  19866881831833
  misc_feature (1)..(1): n is a, c, g, or t
ntgtttgtagtgatgcttcctaaggcccacttgacttcacactcccaggatgtctggctctaggtgagtgatcacccccattgtgcttatctaggtcattaagatcttttctgtatagctcttctgtgtattcttgccacctcttcttaatatcttctgcttctgttaggtccatactgtttctgtcctttattgtgcccatctttgcatgaaatgttcccttggtatctctaattttcttgaagagatctctagtcttttccattctattgtttccctctatttctttgcattgattgctgaggaaggctttcttatctctccttgccattctttggaaccctgcattcaaatgggtatatctttccttttctcctttgctttttgcttctcttcttttcacagctatttgtaaggcctcctcagacaaccatttttcccttttgcaattatttttcttggggatggtcttgatcactgtcttctgtacaatgtcaagaacctctgtccatagttcttcaggcactctatcagatctaatcccttgaatctatttgtcacttccactgtataatcatgaaggatttgatttaggtcatacctgaatgatctaatgattttccctattttctttcatttaagtctgagttttgtaataaggagttcatgatctaaactgcggttagctcccagtcttgtttttgctgactgtatgccccttgctgctgctgctgctgctaagtcacttcagtcgtgtgcgactctgtgcgaccccatagacggcagcccaccaggctcccccgtccctgggactcgctccttactgactaccaaacatatgcctgctcttcaggaagcagtcaaggccttcaaccacatgctccatctctcctgtcccagtgtgtgctatttctccccctggacacatgccgtgtcaagctttgcctgaacatgccccatccttcctcagtttcccacctttgcttacgttgtttttggcaccctgaatcaattcccatcatttcctcctaagcatgcctcttctttgttggctcatctcatatgctgcctcctctcctgatttctcccaactagaatgtacctttcccttctattgtacagcctcatcctactattatcttacctgtcttatgacatataatatgatttttgagggataatgttcttagactattagcaaaccctgagtatccatggagggtggagatccttaagatcttatccaccatccttaagatgaccagtccaagttagatgcgtaagacaaggatcttatccacctccgaggctctagcaatgcctagcactgtgcttggggtacagcgggctgctcagtgactcctaagggtgttgaactgcctccctgcccccacctcatcatccttatactgcaagggggtgggctgcatgtgcaggtgccagtgggaggtcgggggcgggggagcggtctgtgttgctttccaaacattaatgtccacagacagctctaagtgctgtctacctttggctcagagtcagatataataaaacaaaatcagccgttacgactaatgctttttaacttttgttgtaagactcacaaaagacgcttgctatccctgactggtgtcagatgcaataaatataattaatctctggaaacacatagatggaattacttaagtcatggcttaattcgtttacaatcttctgaatctcccaggcctagagcagaccacgtggccctctgctgcgggaggcccctcaaacaagctctgtgcccaggtgtggaggtatggatggtgactctttctgggccttttcaacttgaaagtggaagacactgggctctccatatccatctcttggggaatcactgaaaaaaaagttatctttcattgaaaggtgacttctcttttcatctccgactgtgatttcacattgaatagagtcaagagtggactttgcacccacttccctgagtgcaaagtcagtgagaccacagttctagaagtgagtggcactgagctctttctcccaacttagtgtcaccaaagaac

SEQ ID NO: 60882 - DNA, 1416 bp, Bovine  19866881871561
  misc_feature (1)..(1): n is a, c, g, or t
naaaaaaggctaagggcaaactgaacagtcaccccaaaccagacctgcgtaggggaatttcccaaacgtgggaggaaggcttcagggacagttattaaagaatcaaaccaggattctcaattgcttttccacctccactctatcctgttgagtttttttttttcctttcttaacaataaaatacacatttttaattacactaaaattagtagagaacatttctacttccaaaaccttcaattattttttagttttaattattttacctccacacacagtaaaatgacttcttaagtttcaagtgactttttaaaaaggtgcttatggttgaacttgagactgacttttcatttggggaaatgtcaataatctttgtttttgttgaacttaacagctccccacacatactcaaatgcatatttttagaaaaaaaatccttccaagaatggtcatgaagaacaatcatgatcaaggatgaaggtggtaaactgaccctttttcaaggcatgaaaatgctggacattgcatgctcgtcattcctcatgcaaaattgcccagggaatgttcatgcagcttttctggcttccttgataatgacaaaatcagctgtcctggtgctttcgcttctttctacgagacaagagaagaaaaccaaatggaagagacgcatggaagtcaaagtacgtcaatggagtttagctgattggtgaaggatgtttttagtttcttaatacatggtgttgcattgttgattaagacaggatatatatgccttatatctgctgcacttttgatagccttggtgtcctaagaggacgtcgcatcctgggaaggtggggagactgactgtagcagcagacagcccatcccattagaggcaacactctgtagcagtggcctttgcagcagctggcgtccttatgggatgaagtggttcctaattgtgctattgatttttcccctctttaatggattcttctcccaacacactccgagttgagccactaccgcatcccacagacctgttgccagggatgtgtatcaagctgtgcattagaggcgagaggatgctttgcttggtgggttacttaacagtaacccaggtagaataacccggaaggagggattccaacagccttgcaggaaacatgtgctgacttcaagtgtgggcactgggtaggcgcttcccaagtcatttcatttaattcagccttggcaacacccttgttattactactctaaccatttttgtagagaaacaacagaagctcagaaaggtgaagaaacacggccagggtcacacagccactaagacatagaaccaagatttcaccccaggagagtcccaatccttttatatcagaacaggaaacccaaaagcaagtgtgccaaccaaaggactaacggactgcctgc

SEQ ID NO: 60883 - DNA, 1029 bp, Bovine  19866881928489
  misc_feature (1)..(1): n is a, c, g, or t
nagagggtggatgggggctggagggtggattgaggggcagctgtcagaatgaatgaataatactctgcctttagtttattcttggaaaaagcagccatgagaaacactctttccctaagcatcctagcttgatttttctagaaagaactttctgctgcagagggttaaaaaggcagaggagaaaggaataaaggacaggacacaggcgttttcacacaattcaacaaattgtgtttacaacagattgagtgtcttccttatctcaattccttcacaataataaagtataataaaatgtcactttgctctgtaaaatggtatgtgatgaggatgtgtaaaagcttttgtgcattttgttaatgccattggctcaataattttttaaacatagagatagcttaaaatggtaacatttactgtctctttctgaacatttgaggtttaattttgacttatgctcagagatacttgtgaatcttctggtaccagagtgatcctcttctatctgaactgagctaattctacagaagcttttgactcaactactcacaacccattccaggaaacgcattaggaaggagcccacagataacaaatctctaacttaggaagaattgcttctggaaactgcagagcaccagataaggtttattccatgggagctgactttatccaaccccacacttgagtgatatagtgggctctgagtaagctgtgtacacaaaactgataaactctgcactaaattaattaagaattctattgctttaatagcttgtcttcaaagaccaatgactaataccaagatttattatgtgaacaatgaaacactggctatgtaaattttataatgggagttctagggtcatattaaatcatctccagttttgttgattttttttgttgatatttctggtatccaagctatactctatagaattactggctcacagagatccaaggattctttcagaagtagaatggcaaatcttgccactgagcttagagtctgtatgtgttttaaccaaa

SEQ ID NO: 60884 - DNA, 1189 bp, Bovine  19866880547824
  misc_feature (1)..(1): n is a, c, g, or t
ngggctccgggttccttgccactttgttccgacaccagaagcatgtgcaacatctaaactcacgtgcaccgcttctctctgcaaccaaatgccccctccacctttccagatccaaagcattggccccttctcaggaggcacccctcaccatttttctgtttctgaaaggagctactggtttgcactgcggttttggtggccttgactcccttgtagaatgagcacagaggctgtgaaacaccctaacatctattcccctccgttcaaggtgtgcacagagcccgtctttcccactctgcccctgctggcctgtgccagtgctggcccctggccctccttgtccagccctaccatgccctaaaactaaaaccccaggctctccttcaatctgctggtcttggtgggatcccaatcactgtctcccctgtgctcttgtagaatgacgttagtaccaatgacaagactccggcaaggctgggccttgccccgccccagccgcccaaggagcagcagcagctttgactaaacaatgtggcagaggaccaagaggttaggaatagccccaaacttcagctccctgaggaagtgctatcctctcctctgggtgggcctggtttaaatgctttgctggacctaaaccaagatggaaaaaataaattaggatctgattaatgctctggattgaaaggagaacttgggggagtgggcttagcgacatagtaggacagagcagctgcagatctttcaggggatgctgccctctgactaaggaagtacatatgcagcttgctaagaacagtgtgggctgttttaaggttcccccagagagaccagcatgctacgaagaactgctactggagacgagagcagcgttaacgagaagggccaaggacgactagggtacacctctccgtaggacatgatggaggtccagcctctgggttaaatgcagcctccttcaggatacctttagaccttaagtcctcaggtaattaaagtgggatcagtggcttccagaacatggatctacataaaagtgaggggaacaagaatacacaaatagttaagggttttaaaccctcacaactgaagaaaggacacaaactgtaaaggtaccccagagacttcagggagtataaatcatagccaacctccaaatcgcccctaaaatttctcccaccaaactgcc

SEQ ID NO: 60885 - DNA, 1121 bp, Bovine  19866880561617
  misc_feature (1)..(1): n is a, c, g, or t
ncttgatctcaagcgggcggctggctctgcaaggggcagaaaatagggaacaggctgtctgaactaggacgctcagtgcctggcaagacctcactgaggggggggcgcaagacggttccgggcctcacccaaacctttgtggagaaaggaactgacagtgccagccagaagcagggcccttcaaaacgggcagcgggcagcttgtggtgaaagagtctgaagccttggatagacccagctggagtggcagctcccacaaggcctgcacagaggtgacattgagcgctttggaggggaagccgagggcagcaggggctgcagaggaaacgagatgagctggttggcagctctgtttgcccgaggccaggggctctacagggctggagaagctgtcgctcatgctgcccatggtggaagcatggatggaggccgagtcctggctggcacgctctgctgagtaggcccgcacatgaatggaatagaccgtggcaggctccaggttggagaagacgtgctcaagaggtgcctttgcccacagcctcttggagctctggaccagctggctttgagaagcagagaagcttggcaaccagcatccctctgccttactataaacatcccccatcaccacaaagtgggcacagagcctcagctaggtctccaaggagagaagggagggggctgcaggagccaggatgagaaaggctgaggataagaagggggctgaagagcaaaaggaagtaccagaggtccaggcaggtctgggtatcactaagagtaagagaaacttgaccagggactcctgtccatccacccacatccacctcccaccggccggatgtgcaacacaaagctgatgatggatactcaaatggcagaggtggagagagccatcgcctgcaggcccatgggaacgggatagctctggataccatcacagccaggcaggcactggcctggttggagcctacactgttctctgccatgtattggtagatggcctcgtcctctgcggtatccgcaccagggaaaagcaaaagcagcccctggggctccttccctccgactcccctgccctggtggagtggcaagcccagaagcagaaggacacaccacccatg

SEQ ID NO: 60886 - DNA, 1616 bp, Bovine  19866881290999
  misc_feature (1)..(1): n is a, c, g, or t
ntttgaatgactgagtcacaaacttattttattagaagttaagtacttacgggtagagattgctttcatttagcacttatctttattgggcacctggtagagtgagaggaagttgtccccaccttagccagttaatagtccaagatagataacgacagcacgagtgagcaattaaggaaccagaaacttactcccagtgctaatcatcagccatttcccaggcactggagccaagtgtgggggtaaattgggtgggtctagatggagcgcaggtgcccatgtcttcagtgtcttccctccctgtagggaatgggtactgaagagcagcatcctcattgccatggctgtttacacatacctccgcctcatcgtcgaccaccacgggactgcccagctccaggccctgaggcagaaggaggtggacttctgcatctcactgcttcgggagcgggtgaggacaaaaaacccgtaggaaagtgagacccagaaagggatacctctcgtcagttctctggtgacctggggccagagatggtggtggagactgaaggtggttcaaggtctgctgttttttcatcactgtaagacagatgaggctagcagggtggagaaatcagtgtggagcagccctagttcctgtgatggcagaagatgagatggtggttgggtggcatcactgattcaatggacacgcacttgggtgaaccgtgggagatggtgagggacaggaaggcctggtttgctgcagtgcgtggagtcacaaagagctggacacaacttagggactaaacaacaacaaagccccagttactggaacgctgttggttacactggcatcctggggacttccctggtcagcttcacgggcgctgtcacacagcacgtcccagacagaagctgtcttgtgtttccactgctacgttatccccacccgccccctgcctgccggggtaactgccgtggtcacgtgggatagtgaattgtccactgtcagctctcccaggagaggcagatcctagagttaaagctgtctaacgcagtagccactagccacgtgtcacaatataagctaaaataaattgacattagggactccctggcagtccagcggtttggactctctgctcccggtgcaggagtcatgggttcagtccctggttggggaacttgggccacacatgctgcacagtgtggccaggaacaaaaaagcacacacacacattgtaattagataaaattttaaattcagttccttagttgaattagacacgtttcaagtgctcatttgccacatctggcaaatgggtatccttctgacagcacaactagaggtgctgtcattaccacagagagttctgttggaccaagcaagtcctgggtaaggtgtctggagctcaacttaccagccctagccttttggaatgtttgtgttccttgacctggactgaaaccattctaggaggagagggccacagattaacatgacagcagtttccagcaacctctcctcctcgatttcggtccccaacttcagctctcttgcccttgaacagcttggagccaatccctggttccagaaaaaattgtgtatccattcgacccctttcctcccctcc

SEQ ID NO: 60887 - DNA, 625 bp, Bovine  19866881319528
  misc_feature (1)..(1): n is a, c, g, or t
nacctcattgtagttttgatttgcatttctcaaaaaattagtgatgttgagcatcttttctgtgcctcttggccagctgtgtatcttctgtgaagaaatgtctttgtaggttttctgctcattttttttattgggttttttgctttttgagttgcatgagttgctttttttattttggaaattataccctcatggatcacattgtttgcaaatattttctcccagttcataagttcccttttcattttatgctttccttcactgtgcaaattcttttttcaccaggtattttgaccagcgtgacttggccgatgagccatcttgatgtagctgatctctgagggatagaagatacttgtgatgaagacagcctgagtgtgaggaagtgcagtgccagttcaagtgcagattgcctcacattttcagcactgtgtgaagagtcttcaacttaacctgtgcaactcacgttgatcttcagaagatagcttgtattattttgaacatctgaggtatctttgaaagatcttacccagtttttaatgaataagcagttttctgtaatcacgtgcttttaaagcaaaagtgaaagattgattgatgaaacatcctacacggaaactgtatg

SEQ ID NO: 60888 - DNA, 2012 bp, Bovine  19866880216587
  misc_feature (1)..(1): n is a, c, g, or t
naagcccaagaatactggagtgggagcctatcccttctccagcagatcttcccaacccaggaatcgaactggggtctcctgcattgcagatgcattctttaccaactgagctatgagggaagccatcttctcttttggattagtaatgtacaaatataaaggtttaaaattttggtgcagattaagtgcctacccaaatcaactactgctgaagtatctgtggaagtcccggttgctgttttggaagattcaactaaataagagaatatcataaagagtcactaatttaaaacattagaatgaataatttcagtgaggaaggaatataagagaccaagtgctgaaaaactgccctttaagcaaaactttaattataataaagtaatatttcttgcctttataaaaggcatggtttcctttgttggacaaaaaggtttcacagccataatattatctgaaaaattgtatgagtaaaaccatatcaaagtaatgtgacaaaatgatgttttattataaaccacacctgttctcctccattcctctttacattaagaaaccgcaggggtgcactactttctccaacctgcatccttacccttccattctgtaaatgacatcctttaatcttattaagggaaaaatggagagaatcttcagagcttattgaatcaccttgtctacatgccataaaaccttcttaaattctaaatcagtggtatccaagtatgtcaaatttttaattaatcccagtagggaataaatttctttgaaaaccaatacgaggaatgatttctttgcatatgatttaggttataccttgttttttgggcttccctggtaaaagtccacctgtaatgcaggagacctgggttcgatccctgtgttgggaagatcccctggagaagggaatggctatccactccagcattcttgcctggagaattccatggctagaggagcctggtgagttatacagtccaggggtctcaaagagttggacatgactgaatgactaacattttaacttttcactttagcaaatatttaataatacagtcatggagagagtagtgtggtactatcagagctaacagtggaatgagtgaaatgcttattattaaaatattttaaatctttttaatgggcaaaatttatacttttttaatataaaaattaaactctatcattttcatttatattaaatatgccagacatttatttcataattttaaattgggagtagagatccagcttccagaaagttaaatgctttatttaaggtcacacagatatttagtgtcattgactggctcagctttctcattaaaaatgtatatatgcatcctttagccatataggtaaacactggtcaatttattaggctattttaaaatgtaacaaatttaattagttgtatctggtagtataaaaagctgatgtgtgtgtgtgtgtgtgtgtgtgtgtgtgtgtgtgtgtgtgttttatcaaaggaaataggtgttttcaactaagcaggcaaatctagaaacatgaagaaagtccacttgtccagccaggcagacagcagcctcttcatttagcaagcttttcggcttgattcaaatattcagcaggctattgtttagtatctgttcaaagggctgttaatttcctccatcaacctttgttctccatcttcccaatcatcactgaatcattttaagtaaagttgaagagacagaacttttatgaagcaaattgatacagtaatttaggtaccataattatttctccacctgcttgtgttttaaggcttttttaagtcaatttaaactccaactaccatattttatatgtactaaaggtaatgtaaaaaggtagaaaaggtgttctgagggcaaatgtgattcattaaaatagataagtgcagaatttttgtcgaattagaaggagagatataatcaagggcttattggtgaagcgctcatttcgttttgagataggcatatttcttcagtaattcaacaggctta

SEQ ID NO: 60889 - DNA, 1019 bp, Bovine  19866880479717
  misc_feature (1)..(1): n is a, c, g, or t
ntctgtggtcactgtttatatttccagtgcaactcatttttatcttattaccctttggcaggtggtccattttcacctcatttttgaaactaattgaattgtgttcactgaattagtaagaggacaccatattacaatcaaaacatacaaaatcattttatccagttaaactatcaatagattattataattatacaaacactcctgctgatctaaatttttgtttcatagctggaagtatttaacccaatatcagtgcatcactttaactgggcaaattcttatactcagtaatctgttttgaccattctcattcctattcttctttcatcccttctaccatgtttcatttgactagggctaaattaacatgatttattgctattcaagtagaaattttacatcacctctgtagacagagcagctgaggtcctgcatataaaacagacaactggcttacatgtaaggttaaagtaatgaaatatggatcacaagtagtaatagctatatatgtgtgagaatgtggcttataattccaagagcatatgtaattgaatgtattgcttgttcaagcattttgagatactggatataaacctttccaacaatctattcgtatttgattacataatagatactgtcctttttctattactctatttactataatatttatttaatatgttgttgcagtgactcaagtacagagcttacaaaacagaatatcatctattttatgcaggattttatccagaaaaatctacagtaactctcatatttctacttctcttatacaacatccataacactggcccttaaataccgcactatctttaggtaacttaagtatcatgaagaaaaggttaacatatcgaacagaatgaatagtggagtaaaattctctcaaagtttataagtcacatagagtgtgtaaggcaagttaattttcctttaacaagacccttaaaagatcagaaaacctactttttacctcatttatcaacggttttccggaatcc

SEQ ID NO: 60890 - DNA, 2099 bp, Bovine  19866880500952
  misc_feature (1)..(1): n is a, c, g, or t
ntcaaggctatggtttttccctgtggtcatgtatggatgtgagatttggactgtgaagaaggctgagcgccgaagaattgatgcttttgacctgtggtgttggagaagactcctgagagtcccttggactgcaaggagatccaaccagtccattctgaaggagatcagccctgggatttctttggaaagaatgatgctaaagctgaaactccagtactttggccacctcatgtgaagagttgactcattgaaaaagaccctgatgctgggagggattgagggcaggagaagaaggggaagacagaggatgagatggctggatggcatcactgactcaatggacatgaggctgagtgaactctgggagtgggtgacggagagggaggcctggtgtgctgcaattcatggggtctcaaagagtcagacatgactgagcgactgaactgaactgaagatcaagaactcaattttttagaattttatcagaattctaaatcagaattctaaatcaactgtgcttggtgattttcttggttcttcaacaaattatatctagcctatactaaaatttaaaaaatgactctttttcaatttctcaactgtatacctccagttatttttttcagtcatcaacatacaatttgtcgtggatcaacagacaggtttagacttgccaactaacagccaatgattgtaatggctagtgaatgtggtaatgcatgtgaaaacattaaacaatctaaaaagtagctttttgtataagtgttgctaatgtatttatttgcattgtatttatttgtttcaaaccactcatatatttatatattctgatttattaagtaccttttgtatatggcagatgtggactggcattgaagagttttggaatattgccaatgaccttcattgattggtgattaggtggaagtatgaacccatgaacagatgattaaataaaagtgataaacatgataataagaatgagttgtctgataggaacacaaaagaaggcatgttttcttggaaatgattggaaagtttccagagaaattacggcaaataaactgggacttgaagtataagtgtagtaagtatattgagtggcaagaggaagaaaagcattctgcacaggaaaaaaaaaattcacttgaaaagaagagcaacctgaagaacctgaagaaaacaaattggctagactgatgcataagactggaagaagctaggtcatgatggtctcatagtacttgtactgtggtggtcagggggtaaaattaagaaggacctttaaccctatgttccagatatggacctttatgtatgtaaaacaatggaatgattttaaagtcaataatatggagaactttaatttaaatggtatcttgccctgcctttctgtatatctcttcttccccccttttctcctttttttcttattctgttctttttattcagtgctccagtccattttgtctttacgcatgaattgccagcaagtttccagctattgcttaaaatatttctttcttgggagtcttgatatctatactgacatgatttatagggcagtactgtatattttataacatgatattttaaagaagttctctttaaaaattcatagcagtaactttaaaacctaattcaattgacaatgaaaataaagcttgtgtagtcttgggaaatagtatttaaacttactaaatatttaaggaaacacctgatgctacaaactaaaagaattgtttgttattgtccttgtgtaatatacttaatattagttattatcacaaattaaatttaagaacattcagtaataacattatagtaaataaaaaattattatgtcaccaagttacagttatttttattattattaatagtaataagcagattttttaccatttgtgtaaaaactgaattgagaatttaaattagaagacccaaaatttatatttggaactcttatgtaatttttctgactttatgctgaagctatttaaataagcacatccatacatttaagtacttggaatttttcaactcaatttgtagataaagatggattaaaaatagtgcagtgtaaatgcatgtatatagtg

SEQ ID NO: 60891 - DNA, 1698 bp, Bovine  19866880544357
  misc_feature (1)..(1): n is a, c, g, or t
nagttggactatgaagaaagctgaacactgaagaattgatgcttttgaatgtggtattggagaagactcttgagagtcccttgaactgcaaggagatccaaccagcccatcctaaaggagatcagtcctgggtgttcactggaaggactgatgctaaagctgaaactcccatactttggccacctcatgcaaagagttgactcattggaaaagactttgatgctgggagggattgggggtaggaggagaaggggacgacaaaggatgagatggctgggtggtatcactgactcgatagacatgagtttgagtgaattctggaaattggtgatggacaaggaggcctggtgtgctgtgatttatggggttgcaaagagtcggacatgactgagcgactgaactgactgataatctttcatttagtgacactgttgaaaagattttactatagaatacagaaggttggagaatagagggacaattagatgaccaaatagtatggcaaaaagtactctgtggaaaagcaggggaaaaaatagaattgagaaagttagaaatcccaggaaaataggttcacttctctctatctcccccctttaactaaggaccattggtttgcaagaagcctgttaagtgtctgtggacttgataaggtccagagggtttctaaaggcaggaaagtcacaagattaccttgcagcagcttcctggaatcaacttgacataactactgctcacttctgccttgcacatatatacctgtccacaacccagtgcaatggaatcctcatttttgattatgagtgggcatgggacaaggttcaagacaattattgtcatcaatactgtatagctaagtcaagtaagttgatcaagtcctttcccaggagctttactatcataagaaattgataggaaaatttcctttcctttggctagctgtatggaaatgacttgagagctgtgtttggttcttttcagcttcgatgattgtctattcagtaagagaaacaaagcccaactgcagagaaatagaaaaacacgatttaaacagaaagagaggaacaatgataaaacacaagtcctattaatagattccaaactctcaagttcccaacttcttcaggtccatttagtttcccatctgatgtgtcaataaatagatacacaagctaggaggtattaactgtgccaagatttaactgttcatagggttgaagtaggaaccacaattataaggaagtttaagaaagattgaatattttggtattataaaacacagaaggtaaaaataagcttgtatttaacaagcaagaaggaacatataaaaatggtcaagtatcattcttctggatctgtccctgatgtctcatagtatattcattatgtgaatattcaggtttaacattaccaagtcagtgcaagtaaactgatagtttaacattctacttacgttctacatggttacatttatagcactagccatcctttataaaaatatattgtgcactggtaatggctctacttggaaaatttctttttaatcctagtgtaaaaaagagcttttgtttatagccacatataaaatctaaaaatattcttttacattttgatttagaaaatacaagagaccaagaagtacaaattattgctaagaaccgctgtgaaggattcaacaaagagattgtcatcagccat

SEQ ID NO: 60892 - DNA, 1884 bp, Bovine  19866880612189
  misc_feature (1)..(1): n is a, c, g, or t
ntaatgctgattgatcaggattacatgtggtgaacaaaaggggataagtggtcaggcatgagtgataatgcctgaaaagaagacagagttaagtagatggttacaagccatggccaagtatgatcagctctaacaaatggagtatagtaacagaagctgaaagttgtaatgaatgtgtgaagaggcgggtcaaaagattcacaggacatttaatacttaaaggcattaacattatgggcataattggaaaaaacaagaggcagcatccattacaggactgttagaggcaaggacaaaagaaacactgaaaggataaaatgaaatttcattttcactgatggtgcttaatcaaaactttggaagcagataaacaactggagaggtttacttaacaatgcttctattctccagtggattaatatgcctctttagttctcaatagtagacaaatggatgctgaaatagctaaagtaaattacatgaatttactatgtccaatgacaatttcttctattctgtgacaatatgtctctttccataattggttcggtgttataattgtaaatgcattatgcaatgtgagatttatgttcactgattattgtatataagttggcaataaaatgatgcatgttacagaggcttgagggtcactattcttcgcaattgtcagtttaaagtttggttcaaatttagctaaataaagttcacagagttaagagaagacaatccactatattgaaatagaatatttacacagacttttccttttttccatttttaaacttattttcttttttcatttagtcttccaagtcctttttcattttagagcagaggttaggttctggaacttcttaagagcagatgcactgctcactgtatgctgtagttgaactggttcttgcttgtcttatagatattaaatacatatctccttttatatttgttaaaacccaacatacagtctcaggcactctatttcttaccaaaatgtatttatgtatttagtatataattagttacatctaacattgtgtgtgtttacgtttgtatgtatatatgtgtgtgtgtgtgtatactggaggagggcatggcaacccacttcagtattcttttctggagaatcccatggacagaggagcctggagggctacacaccatggggtcgaaaagagtcagacacaactgaagtgaccaagtgtgtgtgtgtatatatcgacagatgaatgtttatggaaggtttacattactcatgatcctgcccacctctgttctctattctgtcatgggaagttttaatcatcagccattattatttgatcttttagtctagggcaggacgaaggggaaagaaacagtgacaacccacaaagtatcagacaagtacaacagctcttcaaaagtcatctcatttgatactcacaaccaccttggaagatatatatggtattctccttccttttcagatatggataatatactatttaatacgtaattatggagagtgaaatagctttccttcagtgaggaagccagtaagaagcactaccgaaattctttttctgggcagaatccttcctgacagattttgatcaaaagataagcacccagccaagagaaaccaaaaagtgtggatagtagatgttttgttttgctttccaaataaaggaagactttttagacttggaaacagaggtatgtggaggaaataattatgtcttcaaatttctgctgtttttttaatatgcaaaggaatatcttccgaggacaaggccacagtctccaaatgtaaagttcacaccaagagttttggattattataaaaatgttctaaaaatctagccacacacacttcaactttcttagaaagtaggagcctcc

SEQ ID NO: 60893 - DNA, 933 bp, Bovine  19866880663707
  misc_feature (1)..(1): n is a, c, g, or t
ntctctttgtgaaacttgctttgcaaatgcttctggatttcttcatcttcaaagctacggaacttgcacacggaacaagcaaactgaatcctggagaaggaagacaaaacgaaaagcagtgttggagataaccagcttatctctgcatcagagtaacagttactccaagcttctccatattaagaatcagagtacaaagaagaaaaaaaaaaagaatcagagtacaaccttgcaagtatttcaggaaaatgattactgtagcactttactaccataccactttttttggcccaaagaggtggagacttttcagaactgtggattccctaagtctctagcccattgctctgaggacctagaacccaactccatagcttctcagatgtttctttctgcagccacttggaagatacaagacaactgaccccatttagtaccacagaattcctgatgatctcataaaattcaaaactcacatgatctcagttcgccaatgggactcaacggaaggacacatgatacctaaggatgaaaactgaggtttcttcgttgtgtgctttcaaaatctcaccagatacatacatgccgtatgacaaggggagagcaccctacagacagactcccaaacacccagagctgggtgttgcctccctcagctctgctcctcatgggtctaagagcagaggccctgtgccactcaggagtcctcctcggccaaatccgagttctgctggacaagtgccacagacacccttgcctttgcagatacccccgaaagaggagtgaagaggaaaatctcctgggtcctgtgtgcacaactgtcaggaagccaccaaataaatacagggttcccggttctctgctgcatcttgacctcccctgtgacagcttctccaatttttttgaggatcattagtcactaaggcagtctaa

SEQ ID NO: 60894 - DNA, 2153 bp, Bovine  19866880703874
  misc_feature (1)..(1): n is a, c, g, or t
ntttttttttaagaacttatatttttaaaaaagggaaaaaaaaaccctccctctaaaaatggtctggctatctaagattcaaatatggatttcaaaatgtatttcaaatatcagaatgtcttataagggtcagtgatgatgaagaaaagcaagtatatagggatggtaggtcttaggaatttatcaggcttagggaaactcaggatatcataaaattaggtcagtagctctgggaagtagtggttattgtacaacttatctcagcagttaggaaaatgctttcaaaatgaatacacagttaagcccacacactagaacttaactgacaagttggcacatataaatggacaccttgcacccacatttagtacatgtttagttccctgaatatattggttcataaactttatattcaagattttattggaccaagcctcaggcatagtctccattcctacttggcattcttgaatgtttgacaagctcatggacagaaaacctctgtgtaagtatttttgacagagatgtagccaaatgaattaggaaacactagagataagatgagaaatagcatcttaaaattatttcattattttcttaaattgaatagccttattttaggcagtggaggagattacagaagagtccaatcattcttgatacacacaggacaaaatgtgttgaaattaattcccagtgattttgtctttttttcaaaaattctgcatattaattcctgtagtaattcttatcttatactttgtggtgcaaagtgtgataagaactttgaatgaaaagtccttggcagtgaagagagggaggagagcacactttttttttctgttaattttagatataagtgaggacagagagaacaagttatgcatgtgatttttatttgtatatatatgcattcctgtatacattcatatatatgaacatgtttatggagaaagatgtaaagacagagaaaaagagaattaattcaggattttgaccatagctctgtcttttcacaaaagaatcatatttgttcttttggcatattataatcttcagatgagtcctaaaagaacaggactgcccatagtatcttagatagccagaccatttttagagggaggtttgtttgtgtgtgttttttttttttcctttttttttaaatataagtttaaaaaaaaaaatacagaatatgaactcaaatgatttgaaaacttatggtcagtgtttttcttctcaggaacctggggaagtgatcacagtgatactatgtgatttttcaagcctctttcatttggtgctagaaagatatcagttcagccgtgtctgactctgtgacccactggactcctctgtctgtgggatttcccatgcaagaattctggagtgggttgccatttccttctccaggggatcttccctacccaggaattgagctcatgtctcttgtgtctcttgaattggcaggcagattctttacaactagcacctcctggaaagcctagatcttagcagatagagactgtataaatattttattctctctgtgtagtgcatttgtgtgtatatatatttaagaaacaaaatataggtaattttaaaggaacaaatgaaccatgatatactgtctctttatgggtcttaagccgcaaaagagttgtcacttctgaactcttgatttgttttagtagagtgtattttaaaatttatcttttaatctctttgctttgactcttgtgtaagagccaaaatataaaaccttcattaaatatctatacaagatcataaaacgtgatatgaatattagtgatattctagtgaatactaggaaattagtcatttcctagtgaatactaggaaaacatatagatttccatttgttttcctagtgtactttaagcatttctttaaacatcttcagatatttttgtaatgaagagacagtgtaaatatattagaatgctataaaggaactatttataatagagttctaacgcaatgctgatcaacttgatattgcaaaacaaaagaaaaaaacagcaaattttggattgaaaacttggctcggtccattattagttataagaccataggcaaatcacttcatctgtctgtccttcactttctttctataaaatcagagataaaaagca

SEQ ID NO: 60895 - DNA, 1127 bp, Bovine  19866880752582
  misc_feature (1)..(1): n is a, c, g, or t
ntccctcttaaatttgaagatacatgtttctttcctttgtccaatcctcagtgaaaaccttgccctgcattttcactttgaccttctaacttttgtcaaaataacaatttgtctaggcatttagactaaaacttgcagctcacagtgaatgaatcatcaggctctgtcaacttttttaaatgcaacctaactatcagtgtttatttatctctgtttcagctgccactacttaggtaattgttttataattgttttattggcttcattaaaaagtgatctttttgattcttgtttttttctttatttataaaatgttatgaaagattgttacctaataaatctgaaaacacctctttgtgtataatcagctatacccccaaccatctatgtccaatacaaacaagggaaaattctaccctataattaatttttattacttgaaatccaaaatagaaataataagatgtgttttaaaattcaagagactgtcctttattagctagactactaaaatgatctttattccatcctaacttcttgaaatctatattttcattgtagtcagttcaatttgatctctataccacctttcctgaagtcttaaatcacagtggttattacatcaccatccatggtgtaagtacagaaactctttacaatcaggttttaagtccttacaatataaagggcagactttgatcaaagtttctaagaagccaatataaagaagaaaacatagataaaatttccttatactttatgagctaaatttagtaaatgttcagagtgagcagtcatcttataatctgggagcacatgaaatcaacatcaaggaaaataatgctctaactttcatacaggaaactaacagctttctctcatattttaaaaagcaatatttaaaaagcttttaaacattataaaatgtataactacaaaacacacaaaacattttcagaaataaaagttttttttaaaaaatagaaattaatattttctcttttaagaaatactaatgccaaccactaatactgaagaagctgaagtttaaatatgtcttttgcatcccaggggactggaatgcaaaaggaggaagtaaagagatacatggagtaacaggcaagttt

SEQ ID NO: 60896 - DNA, 1008 bp, Bovine  19866880755128
  misc_feature (1)..(1): n is a, c, g, or t
ncccactccagtgttcttgcctggagaatcccatggacagagcagctgggtgggctacagtccacgggtcgcaaagagtcggacatgactgagcaacttcactttcactatggcaataacttagtttcaaatatctacctcttagcatttagttcaagacagtgtacctctcagtggcaattcagctgtgtagcccgatgattaaatatttatgtatatttagttttgttattggtagtacttatcaaagaatatggcttaagaaaaaaaaatagccagactacttgcaaaagataaagccttaaaaatgtcttttaggatttaactgaaaataataatagatgctatacataacatattgcatttatatacatatattcagactcactatgtttaaaaaagtcaatttgttcccattttcacaatttatcctgttttgcattctgattctaatctaaattcagggcaaattccagcatcaaattagattcaaattaatgataatcatagagtcttaattaatggaaaaccactagtatttgcaggttattctaaaaattatattatgtacgtgaagaaactagagtaaaaatgacatttcatattagagacttataacctgttcacagtatagaacaagcagctatgcaactgactggggcataaaaggaaaaatattactgctgaggcattaatttaaagtgtaattagattgttataaattggaaaggaaaataaagtatgaaatagaaatctttattttgctgcactcaaatagggattacaaggcaatttcagataagaggatttcctgtttttatcctacttgaggtcattttatatactttgtgcttctttctttccttttattcttctgtatttactcaggcaaggtcaacagtctgtctggagtgtcctgaagctacccatttattttaaagaaccaatctctgtaatgttaaaatactccctataccatttgggagatatattcctgtctttctcctt

SEQ ID NO: 60897 - DNA, 818 bp, Bovine  19866880865493
  misc_feature (1)..(1): n is a, c, g, or t
naatttctgataaagttaaatacattaaatgttaattttgctgaatatacattttattctctctaaggctgcaaaaattttgcaaccagttcttcctgcactaagacagtcttaaacagtcatctcttttaggtcatcatcaatcttacttttgtcatagtcatgtagaacattatttggctcagaaaaaaaattaatcagaacaaatgatatattctctgtatttattttaccagaagtcttatctcaatttatctacttattcaacagatacttaatgttagccagctagatgacagactccagttgaggcactaaaaacagcagggggatgagattctttctatgatagaacttagtttgtaatatctggcttcttttctagtattttaatgtgtcatggtcaggttgggctaatctgagactgggttgtttatatagaacatatacaatgggacaaacagatgtttatatagaaggagaaattgatctgtagctgttgtacatactgaaaaagaaggtgggtttagaagcagttaagagcattccagtgtcataaagataaaatcttacaaaatcaagacatgggaagagagattcagcagcagtggcacaagctgctgctgctgctaagtcacttcagtcgtctctgactttgtgcgaccccataaacgttagcccaccaggctcccccctccctgggattctccaggcaagaacattggagtgggttgccatttccttctccaatgcatgaaagtgaaaagtcaaagttaagtcgctcagttgtgtccatagcaaccccatggactgcagcc

SEQ ID NO: 60898 - DNA, 796 bp, Bovine  19866880920176
  misc_feature (1)..(1): n is a, c, g, or t
nacatcattcattctacttctgaataagtttgaaaattcccatgattacagtcatgaaaatatcaaaatataaaatataggaattgtattgtgtgtcttagcacacatcagtaacaacgccttatacagtgttaggtacaccattcactacagctctccactttgctcctccaaaatacccaactaatagattttctttcactttgggatagcctgctctttctgtagttttccacatcctggagaactatgaagtggaactccggggatatgaagtaataatagtaatgccaaactgatgttgcatcgccatctagaggtcgagattataactgtaaagtcttaatttcaatgagcctctcacatataagctttcaaatctggacatatgtagccactgtggaaagaggtcatttgtttgctattgttttctctccagttgagtttccagatcatactacaaagtaggagccacctgtgtttatagatggcaaggggaagtatatatcatagcaacatgtatcaacagcactatagcatgtttgtaccaaagatgagcctcccacatatcagacaaaccacctacagaaggactgtgacactgacagtgggttttttagcacattcctgataatgaaattcatgttgaactcaacatgagtagcttttcttttttcttggcagtcaacagcctacaccaacctgcatttgactgcttggtttttctctctggctagaataaagggaatagagcagaggatattcttaggatttatgatactatcaatgtattttt

SEQ ID NO: 60899 - DNA, 1899 bp, Bovine  19866880928504
  misc_feature (1)..(1): n is a, c, g, or t
naaaatcatactcatgggcatcttgcatacctaagagagctcattctctccagtaagggaaagaggatcctctaatcacattatcatcttctactaatattttgtacttttctaaatttagatttttgctaaatgtttcattaacttagtaatctttctatttaatgaaaatactgctcactcatatcttattaagcttaaaaagaaaatcaacaggatttaaaaatgcctcatgtatttgccacaaggaaagatatatgcttaacttccttatctaattgtcatattagtccactgctgggaactaggagcaatctgtaatcttgaagtcatgctatttgtcaataattcagagagattttaagaatgtgcatcacaattatttattgctttatctaaagccttccagaatttatctgtagtctatattttatgattctttaagtatgcaaaaagtaagagaggagtccaattccagttcaaattaagctattgcccttggaaagaactgtattattaaagtttggtcatatattttgctatcatgtttggataatatttgtttggctaatgtactttcctccacccatgcactgatcagtctgtagtgattatttaaaaccattctattggtgtttgctggtatgaaaatatttgattcagaacacttaagatttcaacagatgtgtcttccaccttacctttgagagagtcaattcctaggcaggttgataagaagtctgggggtccccaaggagagaggggtctggagttctcaaggaggagatagggttctggaattctcaaggaggaggaaaggacatacattttttttttctcctctatattacttagtcttagtcacataaaacatttttatctttaagccttgaactgatgattacacaacaaacaactcagtttaaactctgcactaaggaatatataacaataatgtatcctgcttgaggacagtttctgaaaaaaaaaccttctggctaatcctgttatcttaaaatgtaaattatgggagtgggtctagtaagatctttataacctccagagattcttttgactcattgtaataactaattagaaagtatataactccattgctaacactagcaagggggcactctttctgtccctttctgatgtctatgtcagaagctttctctatctcttttatgctttaataaaactatattacacaaaagctctgaacaatcaagcctcctctctggctctaaattgaattcttctcctctggaggccaagaatcccagcatctttcatggttcagcaacaacttttcaccattgtcttacttaactgttggctgttgttgttggagcacttaacagtctttgataagaaaataatggttacttatttaagtttccaacatctctgaattgctcttaacacattcaatttacaaaaatctatttgtatccagagaggtcaaaatctgtgttcctgacacacatttaattcactaaaaggtatgataagtgctattcaacaacacttgataagttattttccagtttactgaagtgaggaattttaaaatgcttttatcattttaagaggttttaaaagtatatttatattgttatttatgataaatttggctcagcacatggttgaaaacatctcaaacagcaaaatattcattaatttaataaataggagtctcagatgttcatgatcaaaacaatgttttaaggtgttctggagccaagggaaaaataaatcattgttctgcttgattagttccatttgcttacttcttcagttcactagagtattagtttatgaaatgtctgtggcctgcaattaacagatgccatcattctattttacatgataaaataagtcctatgatatttatgg

SEQ ID NO: 60900 - DNA, 874 bp, Bovine  19866881002630
  misc_feature (1)..(1): n is a, c, g, or t
nttttctactgttgtgttaaatataattttcttataataagtaaagattcttaatatttattcattagacattaaaatctagcatctactctatgatgtgatagtatgaagtctggagttctataaattggtgaaacaaagaaggacactggttctagagctgtatttggtctcagaagggtacccccaagcttatatctgtcataattccttagtgataattcctttgtggaattctgtatcattgtattatgggtaagccatctgaaaaggtatgttcttctctgagtattagaattgcaaattaaaggaaaacatctgcacacaaattgtgccaatcatcagagcatttctgagaaaagacaattttcctatgggcttgctcatcaaatcttcctgagtatgtttgacagtgacatcaggcatttttcatttctactgaattgaaacagaatactgatggataacatttcaattgctcaccccacagaagaaagacatttattacaagttaagataggaagatttcaaagaattctcatgatgtgtgatattctctctgtttcttaaccatttattaaaattttaagtagccgcctatttatatttagagagaatgtcaagttgaatagccgcttacttgttactgggtctcaaatgaaagtagtaggtaaaccactacttttgtgagttcaaatgctagtgggatttatcaaacaaagcaaacaaagcactgacaccagaaacgaagtcctaaaagcttcacaagagcaaaatgtattactgtctcttgaaaagaaatacagctatttttttctaagctgttaagaaaatataaattacatgaaggatgtagcatataaaagccatgtgt

SEQ ID NO: 60901 - DNA, 1343 bp, Bovine  19866881067799
  misc_feature (1)..(1): n is a, c, g, or t
nactaatggtatataatgtcattcagaagctctatctagaaggagtagaatttagccagttaaaatccttgattaaggagactagtgagcttatgtttcagatgcaatatagaaagaatagacattcgactagttgagtttacacttcatcaggtttttattttagaattgtatgtttgggtgcatcaataatatctattttctaacaatgattgatttattaaaatacttaaattatattcttaatctagagtattttttaatatatactaatactattactttaatattgaaaacaaattcataattgtcactcattttctcagaatcttagtttaattttactgacagttaccaaaaacaattttttcaatgaagataacatatagggccctattatcatttattttttaggagagcttttagctttatcagtaacttcctatgaagataaaaatgtacttagaaataaaatttcccaaatatgtactacactattcacaatctattgcatttttgaggctgaatcaggcaaagagacatgacccttgctttagagagtaagtcattatttagaagcaaattttttccatttgtttcagcattaggaatagttagcatataaagtgttaacatcttaaataccaatattcttttctgcacagtaaattgcacatgatatatacatgtatattaaagttcacaatcaacagccacaccattctcttgtaatgttgtattctcagcctctgatacactgaaagacagtatgtgcgcaagaagtcttaatttaatgagtaaataaatttaagcatctattttttgacatatgtaaatttagttcatgtatatttttatttgggtatttttaaactatatgattattttgcagaatattgatattttctgaaaattttatggtggaaagattattcctcttattttcatcatgaacataatggtggatatactgaattactttcaacctttttaagcaaattcattgttaacaatataaaattattataagtattaatttgtgtatataaacatcaagtatgtaatactactcagggaaaagagacagaaggacatgtgcccaaaatttaattttccctattattctgtatatatttcccatgtatcttatacttaatatttatggcttcataaaaaaaatccatgttctcataactgccattaaacaaccagtattaagtagttgaaaagtattttttgtaagagaagtgtgtgaagtcattagtagtaccatacactgaattgcttacctagactgttagttaataacggactttttattattagcttcacattataagatt

SEQ ID NO: 60902 - DNA, 1934 bp, Bovine  19866881101876
  misc_feature (1)..(1): n is a, c, g, or t
ncaattgtggagaattaggatgtaaaggtcaacatggactctttgggcctaagtgctatgtctttttcagtgctactctacatgatcaactaaagacaatgaccagcattactaagattcatatggctgacaacatatattcacagatcatctataataagaggaacaaagatttttgatcccataaaaagacattgaggctgacttatagagtggaagttgtatttctgatgaagacaactggcataatttgtagtttaagaatatttgatcaattgttgaggactgtgtctaataaatacaacatgacctgtatcttatattattattttttaaagctttagtattcagagatatttatactctaaagttaaaaataccttctttctttttctctcagagtataatgatttatatattatatgtatatatataatgattcacacatatctcagagtataataattcacatatttgttcttctagactcttaactttttaagtatacttttaaagtaggcaatatacacacaaatacacttctctcacttataatactattaattgtacttaataatcacagtctgtttcagtcatgtacagtaatgtaatcattatagcttaaaccacccactgagtaaaagtagatagtaccatatctatttgacatactgtattcaacattaatctctctgtttcttagcttagcataaatttgtataccagctgccttcttgtaattaacacgttgggatttaggagcagtagattttgcttgtaacaaactttccatcaagtcgacatctgtgatttatacctccgactcactttcaatatatttacataatcagttcaatttaagccccgattatacattcttcttacatttttataagcagtatccccaaaagatagttaaagagtaaatcaaagtgaagtttaagtttttctcctcttttcctaatcaaaacacttatcataaacatataatcaaattcactgattacttgcatttattttaaagaaaaaatacggacttttattttcataaatgctacataagaccattacaaagatactctgctctaattactatcatcatgataaaattacttgtatgtgtagagacatatttttaatatatttttaagatttagtagaatttggctttacactaatcttttgaaacatgtttacatgtcagtactcccatttaaccactaatgaaactgaggttcaaaaaggttaaatgactgcattagcagggtggaactttcaagatcatcagttttatggtttgtttttgaaagtacttcagagtagactccaggtctttccttccaattaaggaatttttccattctaacacattgtcactaaagataggtaattgtaaaacttgaaaatattttcaaattattacacaaatatgtcatttaaaatatttttcagataaatctggtgttttctaagattctttaatcacagtataattaacatctgttttatatattacatattagaatcataatatttcttctgaaagattctagcttaggcaaattatagcttataaggtatcattatgaaaaattctagaagacatatttgacattgctagtatgcttatttggttgtcatatatcactggaaataagatgtacataattacaaagactgtcttaaacaaagaatattgctcatgttttcaagttttacttcaatgtaaatagctgataaattgtcaactaaattttacttatgtgagaaatatggtatgttaaattgcttttgcctaattcttgtctgcccttcattttttgtagactataatgacacttcattagcaaattttaatatgaatatgatgaattaacaattaaaatattttataaatattagaataaattttagaagaataaaattattaaaaa

SEQ ID NO: 60903 - DNA, 873 bp, Bovine  19866881101935
  misc_feature (1)..(1): n is a, c, g, or t
ngatatcaatgacaattgaacaggcagttatgttctttgtaagcaatacttttactgaaagtgctattataatttcacttagaaaatcatagttagcatgatgtgttcaactatttcaaagtattaattgcttatttattctatgaaatatgtatcatatgacttttcatcatagtctcaggtcatctgtaggatataaaaggatatatatttgttatctttaacgatactctgctacatacagggttctacaacatatgactaatgtatcctagaagaaaattggcccagtatttatagaaatctatgtttgtctcagctagattatgatagaatcacattatatttttcactatgtttagggtagtatgtttttcaataaagtggaaaatgtcaaaccatatattagaaaatacataattatacatgacatttctgtttgggctgtcaggtgcgttgtgttaatcttctaagaagttttcattgataaattgtttcatttttgttattaattaataagaaaaaggaggataagagtttcccaatatactgataatcaaaaaaaaattgtgcaataaactgtcaagtagtcttacagaacatgtctggagtctaaaagattatgccttgggcttagacaagtcaatatagaatcacctagaaatcagagcacttataaaagtagagccctgataagaggggcaaaggcaaatgctctaaaaccattgttcaattaaagaaacagcaaacatattcaatgttttaagcattgaatttcaatcattctactagccttatccacatggccagtgaattttcaacagaggctctacagtttgaactagtttgaaatggactttttttcttttgatg

SEQ ID NO: 60904 - DNA, 1010 bp, Bovine  19866881152108
  misc_feature (1)..(1): n is a, c, g, or t
nttaaatttagataaaataatgcaccaaggaagaagttattatactatgatgaaaatgtcgtatccatattgaaaattgaagaaataaagggctgacatttagaatatattaatttcagagtattataattcagcattatatatacgtatcacatgcatgagccaaagagaaattttacactttaaactgtatagtaagatgttgtgtattgccaacttcaaggcaacataggggctatatggattgccccagaagagtgagttttagaatttttatctgcttgttattgtttttgactcttacttttaccttatctaagttgcatcatttaagaaaacaactgattttacacaaaaatctggattactaaaatcttctttcaaaatatcaaaagatttagcaattctgggcccaccttcaagtaaagttcagctgtggctaagcaactactgcatgttatttttagtttactgtagtatcttccatgacctattactttaaactctcttttgcttctgtctctggtttgtttgccagactgtttaactcactttatttgatctacatagatatttaagctgcaaactttatcaagtgaaatttttacttaaaggtactcctaggagagaatgcaaaactgttgtattttaatagtatactctgcaaggtttcatattatcactgaaaaagataaactaattcaaatctaatttcaaatgacaacataaaatctaattaactgattaaattaggaagataacattggcaagaatagccccctccaaattatttttttgttgatatttttgtctctacttcacaaagtactgtttatagcctaacttttttttgcattagtgtttctatacagctcaaaatgtgaagttttgttgccagtctcaccagggaaataaacccattgtgtgtggaattacattttctaaactatgctttagcaaactaataaggatctctgttcagaaaatagaatgtgcttgtcctatgaatc

SEQ ID NO: 60905 - DNA, 928 bp, Bovine  19866881152330
  misc_feature (1)..(1): n is a, c, g, or t
ntgagtttttctagcctacaaattgattgctgatgtgtatttttatattgctgcaaaaattcaataataatcatccttctttgctgtattgatgcctatgccatttccgaattcacatatatttttatcgtaagtgtatagaaacaggaaaagcccagcagcaatactaaatttttaacagctatttcactactcatttacaaacgtattacatttcttgtgttctacatgattaaaaattatgactatatccttgaataaacaaagtaaataagtaaagaggatgtgtcacctgtcagtgacacgaaacaaagtcaagggcacactcatgatgcatgtagaagtcaatatgatctgatggtctcccagtgagatgcatgtgaagtccatactaattaacctataaatcagactgatgcttgagtttatttgggccagaaagactacctactgtcaagcaatcaagcaatacctctttaattgcaatttattccaacaaccacactttattgatcctagcatacacttatgccacagcagtatcattattcaactttattttaacagcttcgaaaggttagaaagttagaaaccacagtgaaagagaccattaacatgttgagttgctaacattgcttcatgctctatgttgagcaatgtcaactatatttatgaaattgtatgataagacaaggaaaagggactaatatttaataggcacctaaaatacctattgtttttttataataaatattactttttagtcaccaaaaaaagcaaacacaacaaaaagcacataaaatcagggaggatcaatattgttatttgcattttacagataagttgcagtttagaaagtgtgttagtcactcagtcatgatcgatgttttgtgaccccatggtctgtccatggaattctctaggcaag

SEQ ID NO: 60906 - DNA, 1511 bp, Bovine  19866881238767
  misc_feature (1)..(1): n is a, c, g, or t
ntccaggtcacttaatcaactgtgatcacttctcaatttggatatcaatattttagcccttcttccattcagtcattgaaatgttacatgtttttctttttttctgttttgtgccctttttattgaattataattagtatacaattttatattaatttcaggtattcaacatagtaattcaatatttttatacattatgaaattatctacacaataagtccagctaccatctgtcaccatacaaagttatattattgcctatattccctctgccgtgtattacatctccatgacttatattatagctcaaagtttgtgcctcttaatcccagcctagtttgtcagtcctccagaaatggtgcagctactgtggaaaacagtatggtgtttcctgaaaaaattaaaaatagattttccaactctgtagcccgccaggctcctctgtccaaggattttccagggaagaattctggagtggtttgctttgccctcctgcagggaatcttcccaacctagggatcaaacctgcatctcaggtctcatgcattggcagatgggttctttaccagcggtcccacctggaaagcaccactgttaccatatgatctaccaattccacttctggatatttacttgaagaaaattaaaatgcttaattcaaacaaacatgtggttaccaaaggggaaagtggaatagagtgatacattgagtgtttggaattaacacatattactgtatataaaatagataaccagaaagaacctactgtataacacagggaactagattcaatattttataaaaacctataggggaaagaaatctgaaaaagaatggatttatagcctgtatatatatagctgaatcactatgctgtaaacctgaaacttctacaacatggtaaataaactatacttcaattaaaaaaagaaccaatataagtttttttaaaaaaaaaaagctatatgtattcctatgttcttttcaacactatttacaatagccaatgtatggaggcaacctaaccattcatggatggacgagtggacatagaagatgtagtatcttttaataccttaacctagattttcagctctttctctttctcttcttcaaacctccaaaggctacataaaactttttaaactaatttaacacttccaagatgcaaaaaacaccttgaaactgaaactgacaaagtgaatcacattcttctcccaattaagatccacagaggcagagacactcacacatatgatatatatacacaaacacagctgggctgatttacctacattctaacttcacttttcaaatttctcttagtcccgaacgtgcatggcctttggtgttctgtgaatatcgaaaagtacttctgttacacattctcttgctaaagaacttaaattcacaacacaaatttttatttaattctaacttaagaaatgaagatgatattccttgaagaagcaaacaataacttaatataaccccacagtttacatgtcta

SEQ ID NO: 60907 - DNA, 1146 bp, Bovine  19866881258649
  misc_feature (1)..(1): n is a, c, g, or t
naggagcctggcagtctatagtccaggggaccacaaaagagtcagacaggatttagcaactaaacaaaagtataatgatcattaaaaaggatgtaataggaacacacagaactttcctggttctctatgttttgtttgtttgtttacatttcagcttctgtggaatacttctaagttgctcctcatggaataaacctgcccaaacagattagctctgaagtgaaataaaaaacatgaaggcaaggtattataaaagtacaaacataaaatttcttccctgcttggtaaaatccctttagggtattgcaatgttagtattatttttcctccctttttcttttatcaactggaaaggtagtttcactttctgctattatagcatcatgccctctagtcacatggacactagaataacaaaaacagaaagtgtattctttcttttgtctccatcctttgacaaagtttgccaataagcataccttctaactaaaagaaaacagaagaaaaaactctccatttgttcatttctgctttttctgagatatcacagcagcatgggcaaaattgactatactgctgaacaatgtatggcacaaaagttttactctttagtatgaaaaacatatgaatattttttccaaatatatgacaagaaacaaaaaattttgcatcgatgtaactagctctacacaaaaaaactcttgttatcgtaacaacttcattattcacttgatttaatagtcaaggcaattgatttttttgaggtacaattcctgtatttatactttgagggatgtaaataaaaaaataagtaaaatgtgtgaaagactgtgatgtaaatactaaaaattataaatatcaagcagcacacatagaaatcaatacataaaattgattgaaaaataataagaaaatagcagtatttgttatgatggagtagtgacagattagatttttgcacataagctcctaattgttaataactataaaatgcacaaatgcatgtttttgaagacatcagaggtacaccaaaacatccacagtttaaggggtgagaatcacaaaaagaagagaagaatattgaaacagatgcaaacaattcaatgcttttccccaccaaacatttactatttttgaaagtagcaa

SEQ ID NO: 60908 - DNA, 862 bp, Bovine  19866881279544
  misc_feature (1)..(1): n is a, c, g, or t
nttagattcttgagagaaataaggatatttccagtagttgtttgatgtgctctagttgtttaaactatggctatatacatatatccattgtaattaaagttcaaagtctaagtgaatgaaaccaagatgcagcttaatggcaaagctgaagcttgcttgcatgggccagtctaaatttttctactaatctccactctgtcaaggtttttatagccattttctcagatgaagttttatccctgttttctttctttttttttcctctcgcatgcggcatagagatgggagataaattttgtgtcatcttttgatgctttaaattatgcacagagcctgagaaacatgggagctagaggtaactgagaatgtaaataggaatgaaaaggctagaatgatctggaagagatatttaggttgctacaaccagaggagaatacaaaaaggggacaaagttcattggtcagtgcattattccctcattgattttccctgccagttcctttcagctcattgatttccattgctgattgagtcatgttcatctgctgttaggaggtcacctcatttctcttttgcttattttttctgcctactcagcactcctgcacatgtgtgtgtcactatcactaatctcaattgtctgctgtcagaagagtgatatactttttgcacaatgggccatgagattcagggtgggtgtttcaggcagccattgcataaacttaaccagagtatactcacagattcccttgtacactgcattcattatggggttttactcctttatatcagatttaaaggcgtgcaatgtgtatggttcacagttgtcatacacagtacacccgaagactggtaggaggaa

SEQ ID NO: 60909 - DNA, 1733 bp, Bovine  19866881337698
  misc_feature (1)..(1): n is a, c, g, or t
naacaaaagcttgtagagagctgcctataggaccattactagcaccaaccaaaccaatgcccaagcacttactgtgagccagggagtgtgctaataagtaaaagttgtacttcttttaatacaacaacattcattttaatacattataatccacatctgtaagatgtggatagctagtctcatagttattgagtaatgtattcaaaatcacgcaacttataattggcagagccagagacagaaacatagagatcccagcttaaaataccatgtgtaagtataccctgtcatgcacatttctgtagaagatgttagttctgaatggtttgatgaaccagatgggaaaagatagctttcactggaaatgttgggtgtgtaacaaattcataaacacttgaaggtgaatggtaatatagtgaacattttcagtattctatgtggaagttggctagaaatctgtttcctgtagtgcttaaaagtagatctaaattcaattgacattttcataagctctcttgtagagttatgttttatgtatatattctttctctgcaagaactatctggcctaattaagggcacaggtcattcatttccctttgctttgtaccatgtagctccttgatttacactcttgctacaggaggttatagaaattagttcatgccatgctctacaatatagaatgtgagagagaaaatgaatgtcaagtacttatgctctgcaggcttcaaaatcatatcggaattcaaggtacaatgatgtaggcaacattcatatatacagatcctattataatgcttttgatcaaaatctgattgaacagagaaatactgatcctgagctttatgatctagggtactagaaaatgtagtcttaaatatcctaattgatttttttaaaagaacgtactgtattttttttattttaccagcacctgcacatcacataatgactcttgtttttataattgaatttgctattgttttgcttctttatacacttaagcacagaaggtggatgagtattaatgagatatttttgaagtagctttatatatttcatggaataaatagtatgagagacaggatgttagtaccaaacacatgtaatgatttgtgattcaactgaaattttcaaagtttatttcatcaactcttctaatatgtattaactttaatcaatttccattgttgtgaaatttgaaaggatgaaaataataatacctaattgttgtagttgttgttcagtcactaagtcatgttgcaaccccatgtactgcagcacaccaggcttccctgtgcttcactatctcccagagttgctaaaacccatgtccattcagttcagttcagttcagtcgctcagtcgtgtctgaccctttgcgaccccatggactgcagcacaccaggcctccctgtccatcaccaactcccagagtttattcaaactcatgtccattgagtcggtgatgccatccaatcatctcatcctctgttgtccccttttcctgccttcgatcttcccagcatccagctcttttctaatgacaactctttcctccaggtggccaaatagtggagcttcagcttcaacatcagtccttccaatgaatattcagaactgatttcctttaggattggctgggtttgatctccttgctgtccaagggactctcaagagtcttctccaacaccccagttcaaaagcatcaattctttggcgcacaacttt

SEQ ID NO: 60910 - DNA, 983 bp, Bovine  19866881623951
  misc_feature (1)..(1): n is a, c, g, or t
ntaagtcatctgatttgagtattcccatgaagcaaattaatgatattcactggaatttagagaatattcccattattttaaacatgttctcatttggtttgcacaccagtgattctattaacccacaaaaatttcatttgtgatatttaattaaacaggattaagacatgtgatttagatatataaaaaatatgaattttagatcctttttaaatggcttgagattagtactctttccttgcctaaaaattggcaatccagtaaataaatcaagaattcatatattttagcaactttgcctttatagtaatattagatagtttttaaattatgctcctcgctcttttcccctttcttacaaaatgttttcattgccaactactgttacaatagcctattaagattagcttggctatgctattagtacaaatatttaatttgatgtattctttgcagactaggcaaggaatgggtgtattaaaagactatacttaaaggcatatttatacacacacacacacacacacacatatatatatacatatatatgtatatgtctccttttaatacttgtggagaaatactatagctcccagtcctactagtgtattgatttttgtgtattcaatttaaaaaaaaatcatgtgtgacctagctgcaaaaatgcagtccactttggttcagattactttcctgcatgactcacgtcctatggacttggaagggaatgactacacagagataaagagtattggaaatgtgccaattgactattctctgtgtagtcttaggggaaatgatggcaacagcaggctgtagaggacattatttgtcttaaactttattgtattggctggtgattagagctctggtgtcagactttctgggttgtgaatactgactgtattgtttcttaggtatgtgacttcaagaaagtgaatttccatctctgtattcagtttctgcacggaagaatttacatc

SEQ ID NO: 60911 - DNA, 655 bp, Bovine  19866881790473
  misc_feature (1)..(1): n is a, c, g, or t
nctcctttgtagctctgtcacacttaaaattaaatctggggactgactttctgcagagtgccctgtactcagagatattaagagtctgcataaatgaagccatggaggccctctggctttcacagagtgcctcaagttggcaactggctgttctaagcctatcattttctctttcaaaacttccaatatcattaacaaaagccagcccaatccacagtccctataattatcattgtccccatatcgtataagcaatacagccactgcacatcctaaagtcttatcttccacctgcaccttatcccaattaaccacaagggaaagtcttagtaatcgtgatgtcatggcattcctgagctaatcaccatccctctcagcactagcaatgggatttttattgctgtgagaatggtcagtaatgcagttttcaatttatttccctaagggtccactttctggggccatttctgataccaactgttttagactaagttttttagaaacagagcctgaaacaaagtcttacgtgttaagactgtattcaagagtatgatcctagggagcaaaggtgagagcaaagggaagtaagacagagaaacagggaaagctgataagtggtgcactcccaggctgaccactacatgatattgtgtga

SEQ ID NO: 60912 - DNA, 601 bp, Bovine  19866881833049
  misc_feature (1)..(1): n is a, c, g, or t
ntctttgcatgaggtggccaaagtactggagtttagctttagcatcagtccttccaaagaacacccagggctgatctcctttagaatggactggttggatctccttgcagtctgaggggctctcaagagtcttctccaacacgacagttcaaaggcatcaattcttcagtgctcagctttcttcacactccaactctcacatccatgcatgagcactggaaaaaacatagccttgactagatggacctttgttggcaaagtaatgtctctgcttttgaattcttagtcaaattagaatacattttcaacaacaaacagaatattctatacatcataattttaaaaattactcaaaattttttttcagttctaaatctacacaaaatggcaaggttatttcatctttatagattcagaatcagtcataaatatgaatcacaatgctttttcatgacttttgggagaaaccattttaagttataaaaatagaatctgagtaaaaatgtcattcatgtcaacatttggcttataggctcacactctgtcttctcaacatttctgtttttattggcaataaaagaagagagtttaaatataaaag

SEQ ID NO: 60913 - DNA, 1399 bp, Bovine  19866880404317
  misc_feature (1)..(1): n is a, c, g, or t
ngtaactaaaacagatttaagatataaagggtattattacctgtaagatgagaaggaccaggaaatagaaattggccgctctcttaaactgctcaaacaaattcattggtagaaaggtcaacgcattgtacttgtatgttttaattgcgttattctgttggaaaaaatgagaaaatcattctaaacggtcccacatttaccacaatacacgatgtatgaagtgaaagtgaaaggcgcccagtcgtgtctgactctttgtgaccccatggactatacagtccatggaattctccaggccagaatactggagtgggttgccacactctcccccaggggatcttagcaacccagggatcgaacccaggtctcctgcattgcaggcggattctttaccagttgagccaccagggaagtccaagaatactggagtgggtagcttatcccttctccaggggatctttccgacccaggaatctaaccggggtctcctgcactgcaggcggattctttaccagctgagctaccagcgaagcccagacaaaaatcagccctgtggcctacaggcacacaaggctataatttgtttgaaagatactgagattttctttaagtttttacttctaactgggcctcaaaatgacgccttggaggcttatgtcagagtcacaagacacagagatttcacctcaaaggtctctgtggcaactctcactgtgaccaaacagatcctgctgttgggttccttgatccttagagcctcttagaaaacagggcaaagatgaggagaaaatgagacgtgtcaacatgggtgggaaaggaacattcttgtaagaacaatggagggtgtataagagtaaaagacacaggtgttggttgaactgtgtgccccccaaagatacagtcaaattctgaccctgtgacctgcgatggtcagcttactggcttggccaataagttcgtttgggtttccccatcagatgggacagaaaaatccaaacaaacttcttggccaaccaaatattagaaatatggtctttgccaaggtgatcaagttacagtgaggtcatgctggattaaggtggattaaggcctaatccagtgattaggcctgctggcctttgtagaggaaaattgggcacagagaaacatacagggagacagagactggagtggtgtgtggctaaggatcaccaaggtctgttagccagaaaccaaggagaaatctgcagcagtccctcccgcggatcccccagaaggaatcagcccactgacaccttgattttagactttgggccttttcaaattgtaagagaataaatttctgttgtcttacaccacccagtgggtggtattctgtggagtagtcccaggaatctaacagacaacatttcagcccaga

SEQ ID NO: 60914 - DNA, 1731 bp, Bovine  19866880457945
  misc_feature (1)..(1): n is a, c, g, or t
nccccccagagttcccgaggaggacgccgcagcgggccggcccggcttccacgggagccggcgccccggtaagtgagcctgcgatacccgtatgtccccacgaggaaggggccgattctagcccagcaggcgtattctgcagcggaattaaaataaacaacatcctcctcccttcagggactttccctgctttgggccagagtaacttcgtgtgtttggccgggttctgggtccacgatttgtggtcccgcctttggtagaagtccatgaaactagttagccgattttagaaaatatcgtagccttaggtcttcaaagtctcataactctgttttgaaaaatccagacaaccctttcccccgtttccctcccttctcaataaaagactttttaagatgtcattactttttgagttaatgtgcagtgccccagcgtgttgacgttggaaatgcgttaaaaagctgcttgcagatacaagctgtgaggacactcgcgtttaaaaaataatcctttctaatccaggtgagagaatctcgggttaaatgtgtctggttgcttcataattaagcatatgtcaagttggacccattcttcctcatggccttttagctgtacagggccggccctggttgtataacgtattgtctttgtgggtttgttgggttttttttttttttgtcccattaagttatagtgaacaaaggtagccacagttgtgggccgggaggaaatgtgtctttgaagcagattggcctgtgaggccaaggtgaggggaaactgctgggggcttgttaatggtcagaccgtgcacccctgcaattgaacactgcccactcgagtgtctaagctgggctgctgtacatagaatagttaagtgcccagcctccagctgtggaaacggaagcccagcaacagattttggccttcattgctcctgtgttcttgctctctccctttcagtgaaatggagtacagacagacagctgctaactccaccaggcaaatgatgactctgcagctttcatagtaggtcatgggatgcaaagtttcaccagttagctttcttttactactaatcactagccacgtgctttatttttttccaaaggacgagctccttgtattctgagttggggttgttttccttgaatttcctccgacggctggatttcaggatatggcagtgaaatgtctgggagactttgtgtttggtttcagttgggaattacgacttttcaaagtggatgactgagtttggctgtggaaccatatcatcttttattattttgtgtcgagaaatacttttggccgtatgagtaagttttatcactgatccattgttgtctttcagtattttgaaggcatataatcaggtgctaaatgtcaatatatttttcttgttaatataactttataactgttaatgtaaccgtttcttcttcttttcccttttatacacccttttcttttattatctctagccctttcattagaaaatgctgtatttttggtctgaaccaataccgtttttatacagtggtacatatttcaacaaaattctgataatagcatctaaccttcatcccaagaaagtaccatcacgacaggtgtagacttctttgggcagcatattttcatgctgaatttggaccacctgccacgtgaatattgacaacatggatatcctgagttttgacaacttatcagacttttaaatcattttgcagttag

SEQ ID NO: 60915 - DNA, 1967 bp, Bovine  19866880468627
  misc_feature (1)..(1): n is a, c, g, or t
nccctcgccctgttgtttttctgattaaggagacagaattgagtagtctaaatttagtctgtacagcctggaggtgccagtcatggcaaataatgaattaggggatctccttccgcccccttctgcgttgaagcattgagctgaaaccaacaaattcattttatttaggaccacaggctgaactcttgagtgttggctgtgacaagagaatgctttcttcactaattaagtcacctgagctcagacaagccctctctccatgtgatgggggtgctgcttatctgagttgcccagagactgtgccttctgtttgttaaggaaagtggttattattttgctacagatatttaaaccagaaaaatgcatttatatatacatacatacatgtatatatacatagaaatatatacataatatataaaaatctcatatagttttttaagttcatttagccttttaaagattttctggattccttagtaaacccatatttagaattcacagtttctgatgtaagggttgtattttccaatcagttttgaaaaggacaaatacaaagcatattttatctgctttcatttcaaaagaacataaaaatttgctcactgaaaagctgttatatttgatgtttataagaaataagccatagattagaaataacaaatgtcatgaagttgtctttggggaaaaataatcaagttctgtttccatttgtaacctatgagtcttaatatgtgtatcgggggggtttatacatgaacataattttgaatgagtttttttaaaagtcagtaaaaataaaaatataagatgtgaggaaaatgtatgaaatggtgcattcattttttaaaaaatgttattatgttgatacacttaataaagcatgttttgctagctcctttcttatttctggcaagacacaaattgaactcgccccagtgttgattatgtgagatttggcacctttatgccttgtcactaatcattggcatttccctgggaggggccagaaggccctccttatcttcactgagcaggtggggcccagtaccagggatggagaagtgacttatccagagcctcccagaagtagctgaactgttaaaaacccttgaacttttctagctctctggccttgttcatactttctctagcacagcatttcaaaatgtagagactttttgtgtagttgatttaaaagcaataggtttagactttaggtagaagtctttaggttgacttctctggtggcttagacggtaaagcatctgtctacaatgtgggagacctggatttgagccctgggttgggaagatcccctggagaagcaaatggcaatccactccagtactattgcctggaaaatcccatggacagaggagcctggtaggctacagtctatggggtcgcaaagagtcagacacgactgagcgaattcacttcacttcactttaggtagaagagtatattatctacaaaaaccaccttaataaaattaaaaaaaaaaagaataaatttaagaaaaaaaagtctttaaaaatatttacttatttattaatacttggctgtgctgggtcttagttgtggaatgcaatcagtcttcattggagcatgcgggatctttagttgaagcgtgtgggatctaagtccttgaccagggatcaaacccaggctctctgtattgggaaagtggagtctcagccactggaccaccaaggaagtccaagatcacctctttaaagggcaaactaaagtgtgttagtcattcagtcatgtccgactctttgctatcccatggactgtagccctccagactcctctgtccatggaattctccaggcaagaatactgcagtgagttatcatttccttctccaaaaggccaaactaaactcatgtaatttttgtcctaagaaggaaagttagccaagcatataggaaagcagtgtccacttctcaggaacatct

SEQ ID NO: 60916 - DNA, 2867 bp, Bovine  19866880598829
  misc_feature (1)..(1): n is a, c, g, or t
ntatttccttaggataattctaagactggaatagttgtccagaaaatctctaaagatggagttctgttgccaccgcttgtatcaggaactagtagtaacatgtcagcatttacattttcatatactttttccatttcttgaccttttggctaagatcaagtgtggtatgggggctttccaggcggcacaatggtaaagaacccgcctgccaatgcaggagacgcaggagatgcaggctcaatccccgggtcaggaagagtccctggagaaggaaaatggcaacccactccagtattcttgcctgaaaaatcccatggagagaggaacctggtgagctatagtccatagggctgcaaagagtcagactctactgagtgactgagcacaaacacacatgcctgtttttttttcttttttaatcaaatttagacaaacattttcaaggagcaactggaataaactctattgattttatttctttcaatttagcaatttattatataataggtactcaatgtataacttttaattgatctaagaaatatatttaaagaatttaaaagctctttctctgacgctatcctagttaactttctctttcaagtactcaagtatcaaaaacaaaaaataacaagtgttggtatgagggagagatggattgaaagtttgggattagcggatgcaaactattatatatagaatggataaacaagatcccaccatatagcacagggaactatattcaatatcctgtgagaagtcataatggaaaagaatatgaaaaataatatacatatatattgaatatattagaacgtatattcaatatacattgaatatattagaacgtatattcaatatacattgaatatattagaatgcatatatagaatgtacttttttttataaaaagtactcagttcttcatatcctctggcaaaaggagaagaaatttaaattggtttcaggtaaaaatctccttacaggataagcagcccaaagcataaccaaagtaccatgtttggaggtgtttcttgaacatctactcctccaagccatgtagtgtgctaagggacacagtgtcgaataggaagtcatgaaccttcatgaagtgtatggtttagctcagtggttcggtaacttgaagtggcatcgggctcccctggagggcttactaggcccagtgtttggagtttttgatttaggagatctaggctgggagctgagaacatgcacttctagccaatgcctgggtgatgctcatatggttggtccagggacctcactttgcaaagctttagtgtaagtgggggcttcccaggaggtggtagtggtaaagaacccacataccaatgcaggaaacgtgacagacttgtgttcgatccctgggtcaggaggattcactggaggaaggcatggcaacccactccagtattgttgcctggagaatccccatggacagaggagtctggtgggctacagtccatggggtcgcaaagcatcggacacgactgaagggacttagcacgcacacacagtataaagggagagacgtacaggaaaatcagtgacttcaatcaagggtgctaggtggtatgacggggatccacttagcatgcataccaggagggacacctacctgtccgaggagggctccagaaagcttttcccagaggagatgctatgggaactgacatccaatctgaaacccacaggacaggggggagtgaatcaggtgaaggggagggaaagcgcattccaggcagagggcacagtgtctgcaaagatctagcggtaaggatgcacacagcccgatggtggaacggaagtctatccatgtgatgagaaatcaccagatgacggggaaagtgatgagcaagaaagtgagaggtgagcagataataaaagtcattaggagcctagagcttatcctcagagcagtgcggagccttaggagggctttcagtattaaagctcagaggactaagggtagaaaagcacttcccaaggaggcttacttccagcagagacactgcccaaggggttgcctctgatttttggttcatcccacccctaagggaactcgagttcctcagaaagccggctgctgcctgagttacaggccgtttctgataggaactgtccaagcccagggcgagatcccacatggacatgtgagggtatttacacgctattaactcaaaccgaattaaaagccagttcctcagtcagttgcacgagccacatttcaatgcccagtagctatgtgtgtctagtgactagataaaggacattttcatcaccacaggaagctcgatgagacacactagtctgggagattaggcaggacgggatccagagcttgccagaaacttggatttattgtaggaaaccagtacacaactggtttgagccttcattcatgaaaacacacacacatacagctctaaattgattttttttttaaatcacagagtaaaaacttagacaatcggcagttcttagtaatatatattcaagctataaatacccatatcacttccataagaagagacaaggaaacttttttcctgagtcactaagaagaatcctagaatcacacgtattccccaaatccgttttgaaatcctcagagtcattggccaagggaactgaagggctgataacatgccctagattaaaattctaaaaggctgtttttactgcttatgtgtcaaaaaaatcaagctttcacagctttttctctattgtgtattttacctaattcaattcacccgattcttaatattacattgctaatccttactctaagttctaaaaataaaaggcaagaggcattgcctgccaagttggtaaaaaatcccaag

SEQ ID NO: 60917 - DNA, 1466 bp, Bovine  19866880721910
  misc_feature (1)..(1): n is a, c, g, or t
ntcctattgttgacttccttgtccttttatggcgcgccttgagaggagggatggggaaaggttattttaatcatctcaaaacggccagtataaatgccactagaaaataacgcttgcagcggtgaggaggcggttgcatgagcagtccttaccacatcatccacaaggtctttgacggccgtgacgcccagcaccacaagtaagggcaccagcgtggtgtaccatgccagggtcgagatttgggggattgcctgaaagagattgaaaaatggcagacatgggtgcccaggaggacacggcagagctacaggcaaccgctaaggttaagtctaatcgccaccatcatccagctggcatcctgtgtagcaggcatggaaaggtgccaaagcacccagctaacccttctcctgcctctctctctagcttctggcttcctggaacagagcctagagacagagacacgttacagaaaaacccacacgaacttttcggccaacccaatactaatctcgcagactacaagaattacgtgaaggaacagtgcaaggaaagggctaaggctgttaccagtacccgcacctggatcgctgtgccttcaggaaagataatcaaggtgtggggagatgggggggaggaagttcatgttccacgttactgtgactataaggcagaacgccccttttccttctggaaggaaggaagggaaagtggcccactcgtcatgcagcagcactgtaaacttggcagtgtttctctctacacgagcctgtctctaaggccctgctcgataagaccacgccttatgatcaagtcagcaggtctcagattcctctaaacctgttgagggtctagctctccctcctgagtcttccctccacccatgcgtctgccatctccactcagacacacaggttacagtttcccaaaactatactgggcgaatcccagcaggtgagactattctccaaatcaaacgcttgacataaagaatctgatgaaaccaagtggagatgccatcctttgtaaccagcacttcaagtgctaaaggtggaaactctgagtggcaactagaggctatatagtttctttgatcgtaaaacagttcctagacagataaaagtaatgctctctagattaagtggacttcttgccccaagtaggaggaaaaaaaggcctttccagtgtaaaaccagatcagaaaaataattatgagaattgtgagcaaaatcctaataaaaatcaataaccttttggcaactaaataaaaaataaaagccaagcataaaaaatagatttaattttaaggtacaactgtttcacaaagtgaacatttgaacctgactcactttaggaaaaccagttttaacaatgacatcaatatgttttaactgacatcagtatgaaactgaactttttaaaatacagaattaaaataacatccgcatttgctcaggttcataacactg

SEQ ID NO: 60918 - DNA, 914 bp, Bovine  19866880741827
  misc_feature (1)..(1): n is a, c, g, or t
nttgtggtgggattggttcctgggaaagaaaacaaagatgacatattaagcagcagagggagcccatggggtcctcccaagagactagaaacactggtaaaagagactcccagagtccctgtaaggaacctgtactagtgaatatctggttcggggtgactggacttgcctggtaagtaatgcgattgcacagtggagcggctgtcttggtgtttcttgctgccagtgttgggcaccgagatggctatatattccacattgtgtggcttctacatacaaggctttcgatgggggtattagggagggttggaatttctactatctatacgttccagagagaaacgtcttttagtaaaaccttggtgtttaaggaagttttcgatgtgggtgttacgttacttttgaattattgggcagaggttggaaagatctactaaaatgttgacagtagttagtggttactccaggtcatgggattatagtttattttctagcttgtgcttttctgttttttaaacagtgtgtgtgtgtgagtgaattactctgaaagaaatattaaatctgtcaatatgaaattcaattactgggtctttgtgtttagaagggtaggctggtaaagatagcttcttagaaatataagcttactgaaaatgttgccacgagtgaggccccctcgccctgtacactttctgtctccttctccctccctctcttcctccccgccctgtttaaaactaggctccggggggccacgagctgagctgcgacttctgggagctgatcgggttggcccccgccggaggtgctgacaacttgatcaacgaggagtccgacgtggacgtccagctcaacaacagacacatgatgatccgcggggagaacatgtccaaaatcctaaggcgcgctccgtcatc

SEQ ID NO: 60919 - DNA, 3254 bp, Bovine  19866880774770
  misc_feature (1)..(1): n is a, c, g, or t
ncttagcacacatgcgtgccactctaatcagtggtctgaaccttttctaccggctccttaccttcatgagtagcatgttgccatcataacatgcagtgattctcttgagggatcatatgaaaaccggcagccaaagcagggagaggaggcttccaagaaggttgcgtgcaggcagctgtgatacgccatcccaggggacaccacccccatcccctcagacggggcttaagagcctgcacccacctgcagagaaatgctggggaaatcgcctctgctgtagcatccctttaaatgttaaatccaggaattatgctctgagggtctcttcaaaagaaattactttccagctagatttcatgctgccactttaattttgtcacagtgctgtacggcggctcaagggcctgtcagccacggaggtgccagtcaggtgcggccacagcggcggccgccacggaaaccgcccagcgtgccagaagccccaagcctcaggctcagccggggaacaggtatgagtctgactttacatactaatcaggatttccttttttctgacgtaaacaccagtggataccagctacctaggaggagaggtattgggaaaacccagtatgtaagaagtggtatgttattttcttggcttcctttcaaaagctgttaaactatagatttcacctccaattaaggctttacaagttgttttgaattttgatagattttttccattttttaaaaattaaacttttttgcccagcttcattgagatctgcttgacaaataaaaatcccacagggcttttgttaaaggacacagagttgtgtgcagtctgcaaatcaggcgggaacttagttctggaacacgtcatgtaacagagattatgtgtatgctggaaatgtgtttatgaacctaacataattatacttatgaaatacatgtcctgtgcagggaaaagaataactaatctaccacaaatttctgtagtaaactgtcaaacccattgaacataattataaacaacatgataggatttacagtttatcaaagaacaaagcacgtcccctccctcgcctctgctgtttgcagcttggacgtcagcaggcctggcgttgctgccgagtatccttttcaatatcagaagccacagctgttttcaagtctccctctggtacagaggcattagaagactataacgggcactttttagacaagtacacagatggaagtagcacacttgaacactgggcaagagagaaagaaagtagctgtgagccattaactccctgacctttctggtagaccagttgttctgccggagttctatagctttgaaaataaaacagttttattttgtgtttgttactttttgtcgcgtgtgaccctgggcatgatgattgagcatctgcagggaactgagatttgttggggatcgggcaccagggtggggcccaagtcaactccttttgactcttgggcgtcctaaaagagcacccatggggaggaagaccggaagcacagatgctgtctgtgtcctggggcaggcccagcaggaagccatttctccccccgtcctgcccctcttttctcatcccagccatagtacagagtgctttaaatatttagggtttggtgtaacctgaagaactgattggatgtggaaccctgggagaaaaattatttttttactatgttatcctagtggccaaagtcaacaacataaatagccttaagattaaatgattaaaattgaattaaaaaaaataaaaaaactcccaaattctagtaagtaactttatgtcatatttatagaaaagaaatcagttcattttagaaagtacagacaggagaaaaaaatctgataatctcaccacccagtatcttgtctctatacttgtatctattaatatttacttgtatacctattaatatttactcagtatatatttatcaaaatgtgataatggttgcataaattatttttataacttcctgtttttgtttaataatatgactgtcacgtaactataaaaagtttatattattttaatagcctaaaagtatttcctggtagctcagctggtaaagaaactgcctgcaatgcaggacaccctggtttgattcctgggttgggacaatctgctggagaagggataggctacccactccagtattcttgggcttctctggtggcttagctggtaaagaatctgcccgcaatgcaagagacctgggttcgatccctgggatgggaatatcctctagagaaggggaaagctacccactccaggattctggcctggagaattccaaggactgtatagtccatggggttgcaaagagtcagacacgactgagcgactttcactttcacttgaaacttctcgagactgtatcaaaacaaacagaaaaaaggctgctaacactctgtctttccctctaagttatcctcttctatttgaattatttgaattatttttcttttccagttcttcatcttcctactgctcccctttctccagcaaaggagaattaaaaaaaaaaaaaatcagaagtaactatagttcccttcaggagctgcacacccaggacctgagcagaacttagtcctggctaacgaatttcccaacccgagtcaggacctattgagatttgctgaggaattcgagttaaccatctggtcctattagtctgggttttcagatctgtgtcaattaatacagctgttagtttctgaaaaggaagaaaagaaatgaataaagaaagcagggtggaaacatcccttaatggatcttggatctcaggcttacattgaatgcaaggatttacctcaaaaagtgctcaaacttaacctagagttttcccccaaaaccttagactgaacaataattcaacattcaaaggattgaatgagtccattctgggctattatgaaaggtttgaaaaaaaagttttgagagaataagttctaattcaggtgattcagtggtaaaaaatctgcctgccaacctggaggtttgagttcaatccctgggtcaggaagatcccctggagaaggaaatgacaacccactccagtattcttgccttgaacttgcaaagaattggatgcaacttagcaactaaaggacaaaaataggagaacctgagtttcactccttataccttaagaccagaactctcatgaacacttttagaccatctctaaacttaggaaaaaaaaaaaaaaaacaggaattgaagctagatatcttgttgtgt

SEQ ID NO: 60920 - DNA, 2915 bp, Bovine  19866880823892
  misc_feature (1)..(1): n is a, c, g, or t
natttgttaagatccgaagcaatgaacgctgtcttggagggattccagaactgctttttactgatttgattaaaaattttgatggaagtaagctggagttgctgatgttcaaccttaacaatgtggacatgaatgactgaagatagtatttatttacaagatgggctactccccagacccaccctatcattcagtggttttggaaggctgttctgctgatggatgctgagaagcatatccagttactgcagtttgtcacaggaacatcctgagtacctatgaatggatttgcctaactttatggttccagtggtcctcaggtattcacaatagaaccatgatggagtcctgaaaaactgcccagagcgcacacatgccttgaattacctccaaatgaaccctttggaaattttcgagagaaatttctcagggctgtggaggatcctccgggattcgaaggtggattaagcgccccctgccttgggatggttggttgtctgtggagtgagtcctgctcgcacgtttgtatttgcctaacagacttaacagtggcggtggcagaagagcagtctcagggagtgagtgactcttggagcagagctttcgcttgtgcacttgcccaagttcagatatgggatctcagtcccaggtcacattctcgcattttctaccacaaattatcaacagggtaatatccactgaatacactaattatgtttcaggaggatttattctactgatgttatgccgctgtaggcaaggcccttaatattttatatactttaaaaaaaaaaaaaaccctctcagtgaccatgactctcaaaaactgaacctctatcaattagtcaattatagttcagttttctctaccttggcactgattctgcagaaattgtagttcatggatttttgttctagtaaatcatgactccctgtactcacctggctccccagtttaggggacagcagtttgccctgtgatctcacttctcttatccttcttagaaaagttgctgacttttcagtttgtttagcttgatatttgttaaaatggaatggtaacttcaagccactcacatgccagaaccacccacttcttttctcatttaatattatatgtatattccatctgcctcagtacatattctgtaacctaagcatttgttctgatgaaatttagatcctctactctcttcttttggctatgcaaaatatgtaagtacaaacaagtaaaaatcctgcttgtcttggtcaaccacaaattgacacctgccatgggtgcttgccatctacctctataagaattaagttacatgctgcggcagctgctgacctccaacaccccgaaggagtttagggtggagagcaaaaatgaggcattctactccaggaaactggcaggacaggtctttagatagatattctcaggagctgattttatgagcccaattcttgtatctcctcatatctaaaaagctcaaaagttcttcacagtgacgatagtttctcatgactagcagaaacttcaggagaccagcagaaactttctacaaaaaatatgtgcttgagtgtatgtactctccttttgccagcatcgcatatatactgtcttttcccctacctctttggaacagtttctcagagctatctgaggtgctgttccctgggctgcagttctcacattgccccaaataaaacttaacttgtaaccctcgcattgtgcatttttttaagtcgacattttaaagcatgattataatttatgttagtcacctttgattcctcttacttgcaatagacagcatgaaagttttcattttatttttagaaaatgatcctgttcacaccataccactcatccggtcttcttttaaagcctgatgaatattaccaagcatagctaatttgctgtcacaacttacttgctagccaaactcagtgaataaatcctcctccattcacttgagaaatagaggtctaacatcattatcagagaataacttaggtcttttgttagatctgcaacaatggtgttgcttttcaatcaaatgtttaaaagaataaaacttgcttagagtttggcaacttataaatcttgatttatgtaatggatcatttaaatgttttaattgtctaacttttaataacagttttttcttttgccttagagttctgaaggggtgcaaagtggaattctgtgttaatttagaagctttagtatgctagccaaggaaagctgacccctgtatgctggaggtttttgctttccgttttaaagctccttggatgttgtccttcattgtcatttagtcactcagttgtgtcccactcttttgcaatcccatggaccctagccctccagattcctctgtccatgggattgcccaggcaagcattactggagtgggttgctatttccttctgcaggtggtctttctgacccagggatcaaagctgcatctccttcattcacaggcagattctttaccactggaccaccagggaagcagatactatcctttattaaagccagaatttcctacagaggtttatgcatttttttatcatccctggtaaaggaatttgattttgcaaatgttgacaactaatgggtaaacatgaaaaaaactaatggtttagagggaggaagaaggctctgagccttagaattgcacattggtatatgtgcagtatacacaatgtactataactctgatcagaagcacatgatgataacaacttctgaaacatacagttttaaatgccaggaaatgtaacccagcaggaccgtatagggcctttctggaacagacccctccctcgtatcctctgctgaagtacccagataatagtatctgatgcacgtttcctgagtcgtttcacagatgccaagtggagaagactcgagagttcct

SEQ ID NO: 60921 - DNA, 1189 bp, Bovine  19866880851358
  misc_feature (1)..(1): n is a, c, g, or t
ntggtgagacacgtaatgcaattaaagtacttgcagagatcaaaaaaagacgagaaaatggtcatgaggagtcatgttaatggtctgagaattaaaggcagtgagtggatttatagataagaagggtttctactggctggcatggaccaagacgtctacatggaaaaacccaacacacaggagggagccaataagtatttgctcaaagaataagcaagcgtatgaaaacggagctggctaaaggaatcttttcatatttatttcactattacattctatgtaggcttaccagttgttgagagcaacatttttctaggtccattgcttattttaaactaattaggaatgattagcactgtaaccgttcagaagattaactgtatagttttcttaaggaatcaaacattaacttggttattggcttttccttctctctcttactttttactagtaagaaccccagaaggcaatatcaggctttactgtaagggcgccgacactgtgatttacgaacggttacatcaaacgagccctatgaaacaagaaacgcaggacgccctggatgtaagtctcacttccactctttatgccacggattgcaaacttcctttctggtgctatctctgaagctggagtgaaagctttgtgctacctgttgacccttctgctgtcttggcgtagttgagtggaaagagcacccaagtaggaatatggcaggctggttctgattctgccacagaggctgacttcctaggaaacgagctcagtgcatctaggttggcaggacctgcaggactgacccaggagaaaggctggtctttcttccggggaccttaagcaagttacataaccatcctgtgctctcgtctcagtatctgtgtggcctccaagaattccagtgtcctgtgtacagtgaagttgagagaacattcctataggatgggacatgagaaagcagtccactggataatcaatgtctttgttagagaatcagtttggtctttgttacttcaaactcgctattttaggggatggtgtgggcgcaagagagtcggacacgggtgaggaactaagcacgcacacgtgcttggttcagggatactgccgtttttcagaacgcttctggaaatctgagaattgtatgcccaccctcatattgttttgtttttatataatgatggcagtgaag

SEQ ID NO: 60922 - DNA, 767 bp, Bovine  19866880857668
  misc_feature (1)..(1): n is a, c, g, or t
ntatttgcttgcagaattcctcctgctcatatgagcagtcaggttattgcagaacattctgtctgcgtgaaaaggccaaatctgatcattttataaccaagtcctaaaatagacatcctccaaagagctggccccctgcaagcgtgaggaagtcacctaccttgggaccacctgcaaacgtgaggaagccacctaccttggactgccaaacaagtcggtaggggttggagtaacccagcttgtccatgactctctggacagtggcgcctacctcttgaggataggggtcccctctgttgaccacctgcagcagagacacaagagttcagtcgccaacactgtgcagggttctgagagcctggggctgggcggggaggcggcctgagccctgggctggaggctgcccctcgtcctccgcactaatgcccacgccagctgagctcagggcccaacttacttggatggatttcatcggccaaaggcacacagggtaccagatcagctctcgggttcctaggaatgcatcagattctacatccacgccacccagaggagactgacaacacacaccacaggaggatgggtttctccagccccccggctggaacagggacgacacagagacgctggcacgggatgggccttcacttttggtacttacctgaagggctgattttaatttttgactgtgctctgcagcttgcagggtctcagttccccaaacagggactgaacctgggccatggcagtgaaaccccaggatctta

SEQ ID NO: 60923 - DNA, 2823 bp, Bovine  19866880891871
  misc_feature (1)..(1): n is a, c, g, or t
ngttggcttaaagctaacattcgaaaacgaagatcatggcatccagtcccatcacttcatgggaaatagatggggaaacagtggaaacagtgtcagactttattttttggcgctccaaaatcactgcagatggtgactgcagccatgaaattaaaagacgtttactccttagaagaaaagttatgaccaacctagatagcatattgaaaagcagagacattactttgccaacaaaggtccatttagtcaaggctatggtttttcctgtggtcatgtatggatatgagagttggactgtgaagaatgctgagtgctgaagaactgtgatgctgaattgtggtgttggagaagactcttgagagtcccttggactgcaaggagatccaaccagtccattctaaaggagatcagccctgggtgtttattggaaggaatgatgctaaagctgaaactccagtacttcgggccacctcatgcaaagagttgactcattggaaaagaccctgatgctgggagggattgtgggcaggaggagaagaggacaacagaggatgagatggctggatggcatcactgactcgatggatgtgagtctgagtgaactccaggagttggtgatggatagggaggcctggcatgctgcgattcatggggttgcgaagagtcggacacaactgagcgactgaacagaacaatcatttttaagagcaatagggacagcgtaaaggaataatgtgtgtaattaaatagttaataaagggacaaagtatgctattaaatagttcatcccactaggggtctgtaagtaaaaaaatatgggagacccctgtaaacgaatggttactcaagagagcagctttgcttaaccataagcccaagcaggcttgcttataaacaaaaccatgccacagaagcacaggacatgcccctggacaataaaacaatggagacacgagaaacgcatcctgccagcgagctcagcaagttagggatccctaggacgtgctctctgaacacataaaacacagtaatttgtggacctggcttgggcacgtagggatagtaaaactcccctgctcaacctggaggaggagctggtgatggacgcaggatgtccactcaagaaagaggaaggcattcttctcttcctccccacttctccttcgattataaaactgtatccccatgagtgatcttggggcctggcaccctcctgcccacctgcctgtgagcctcagaagcatcctattctaacaaatcacttcccatctctcactttgcctcttgctgaattcttttctgcgctgagacataaaggactgtggtactggaggctcttcagagcccccgaaacgacacccagatggtttgcagaggcgcaactggagtgaggaaccctttatacatctcaaaggtggtatcaggtgctaagtgctcttcctccagaaagtcagatgacttgtatttttaaaaacagctacttttttttccctaggctccagagaagctggatcgaaattcgacttttttgatctaccaaggtgcttccacgtgagctatggacaggacacaacctctgacgtgaaggcgctgcggtctgggctcatcttcaacggcccaaggaccaccccctgcttccctctctgtgctcagtgtcactgtgatcccccttcgctcccccagctcccttcacaggacctctgcgggcaggagagcaggtttcttctgcccgcgcgctcttcaccctcgcagctcacccgtcagacccggccacactcagccactgagagggcttcccctggccacccttcttcacacaggcctccccaccactctgtctcagcctcctgtttacctcctttggcatatttacataaatgctcacttcatttagttgtatctttttaccatctagcataactagagtaactggaacacgagcctcccaagagcatggccgcgtctctcttacggaacacttgcacctccagagccgcatctaggaggtaaaagggattcagaagggtcacggatcctccctgaccttcgggttcataaaggaagcaacaacaagcaaaccacaaactgctctggagttcattaattttttttgttaaagggaggaagttgcattaaataatattaatttcctgccagctttaccactgaattatagcttattccacagctgttacctagagacttgggtttagtaaacagatactatttaatcagttaaatttccaataaatttaacactgcaaaatcttaatacaaataaagatttgtctggggtaaaaaactatccctgatcttatattacattttaagtatcttaaaggcatataagaaaagtctaatatatggaaaaatcagaagtaataaagtctatatttttcatacactggaatttatcgtctataccagggatgatgtccaatctataacaaactgcagtcctatgtttgaagttgtaatttgctgacaatctcatttcaagcacatccaaaattagcaactaattctttacacatactttattaatagactcctgaaattcagagataagagagaagcacactcagtgtgaagtagggaaaacatacaaaaagaaaaataaaggctcactttaatacaattattatcagataaacataatcaatgaggttaactcaattcctacatttttatcctattcaacagcaaaagacacaatatgtgcaattacataactgttgataaaattacttgatataatcaactgtacatcatggtttataatttggttttcatactttacagacctaaaggggacttttaaat

SEQ ID NO: 60924 - DNA, 1264 bp, Bovine  19866880912147
  misc_feature (1)..(1): n is a, c, g, or t
nacatcctcacccccacatgaaccgcactggtgaacactcgctggccaactcagcttttctggttttctctcttgcctcttctgttaggtcaactcaactaccaggcagcctctcctgacgagggcgctctcgtaagcgccgccaggaacttcggctttgtcttcctcggcaggacccagaacacgatcaccatcagtgagctgggcacagagaggacctaccatgttcttgcccttttagacttcaacagtgaccggaagcggatgtctataattggtaggtctccctcagagtatgtctgtcagtcattcactgagatgctgcctcttgcacattttacttagcaacaccaggataaaacaggcaatgaacgagccccttggctcctggaggacttctgcagacttgttgaaactagtgtttcctcgcttcattctacacgatgtccatcactcaaagggacaaacgcagtagatctgaaccttgcatcacgtcttcaacgatgtgggctgtcagctgtgaaatctgggtagcagttccatggctggtagacccacagcacgagcttttctatcgtgagttgccccatgcatttctgctggggcctttcgggatgtcaggttcaggagaacagcgaggctgtgcttatgaatgaagattctccctccagctcaggcacaacataacaggaacccaggaagaagcaatgatcacttcctgatagtgcaatgttttcagttcatagtgtgaaatcattgcaaactcacagaaaacttgcaagaacgctttaaagaatcctgtagtttcttccatgtccagttgtcagcatgcgtcaaaagttctttgtcattgttatttataggttcttgttttctgaaccatttgagagtcgattaagggcattgaggtctaatgtccctttcccccaaatacttaagtaggtttttcttaagatcaagaaacttcacttactgttatgtccagtatggtgatcagaatcagaaaactcaacagtgcagtgttattatctaatctacagagtgctttcaagttgcaccagggattttctttctgattcaggactctacccaagatgccacactgcattcagtgatcattacactggtctcctttattctgtgagagttccacaacctgatttttgatcttctgcacattgacatttttgaaaagcacagggctgtcaccttgcggagagtcccctcagtttggggtctgtctgatgttccctcatgactagat

SEQ ID NO: 60925 - DNA, 1102 bp, Bovine  19866880993872
  misc_feature (1)..(1): n is a, c, g, or t
ntttacttgtggagactgtccagttcagccaagtgccaattaacgtgcacaggcaagaactgcagtatcttacttctagcctttgactaagagtgctaagttttcaaacttgcgagtggagaagtccgtcctttgtcagggtctctagggactcgacactcttcccttcttcctaattagaaaagacagtaggcttttctctgcagatgctaaggaaggatgctaagattctcggccagttctctcaagtcctgtgatccattataatgagagaggaggcaacctggcctgttgagacgatgttctgaatgcaaacaagttcaggccacggctgtaactcactagatgagcagaaactaagaccctgggagccagccactgttacgctgacctgcccaaggttagcgagggcaacctggcaatccttagaggataccagaactgtgtgcttgaggcacacatatataccaaagaggaaaatgcaagctgcccaacagagaaggaccttctggccactacagctgtcctagatttccaaaggactcaacattttgttccaccaatggaggctgaggttgagtaaagaaaattacacacgtcaggaacgatgtttcagcacctgctgaattctccctatccgttttaactcttttcctacactttcatcatggaagagaagtcaggagagagaggcagtatcctctctttggttgtctctaattttaccccaattggcttttgacattgtgttccatcgctgtaattctcagttttagacaggacgcccaccggctcccagagttatctgctatgttactcaacaaggacccttctctcctcccactgctcctgtctggcagctccaagaagtcatgacacaagtcacactttccatcccgtaattcagcatcccatgagcccaaaccagaaaggaacccaggctgttaagaggatgtccacggcatgcacaaggtgttctggcgagggcaaaagaaagggctgtgtgtacgtactcgatgtactctctcttgttttcgttcgttaccattatttctgacccgttgggcttcagatccacttgatatgtctgcaattacaaaga

SEQ ID NO: 60926 - DNA, 850 bp, Bovine  19866881174843
  misc_feature (1)..(1): n is a, c, g, or t
ntaaatcttcgaaggtttcatacggaggtaagtcaaggcgattaaagctgcaaaagtaacaacacagcagaggtaaacgccagcatgtctgcccgtgagctgcacccgggcctccccgacttggcttaggagcacacttggtgtttgagcaggactgcagaagcctcagcacaaaaatcctaatccagtggtgactgcccacagtgcaccctgcagggggcgagaaaaggatctcgaatcgtctgtgaaacctctctactaccgtcggccgtggatcctagaaacccacgctgggaagggaaaagacaggcaaggtaactggcgcacacgctgaggcttccaaactgtggccacccgagggctttccgcagcaggacaaacggaggctggctgatgcccccccatctgccgctattctaggcagtcagtgcttctgcacgcagctcctgctctcagcgcagcccctctgagcaggtcacattccgttctgcagatgcgggtgttctgcagatgcgggcagccggtggccgtgtcccagcctcagccctgacagcaccgcagacctgagaccggagcccaggcccccgcagctctgggcccgacacggagcggccctcaacccagagtcaggcaagccactggcgtgtggcgtgaagagctgccttcacacaaagcccctacacagctggaggccttggctagggtggtacaagtcaccctggtgacagtgagacctccagacacacgtggcctctgtgagcaacgatcacacgtgttcacaggattgagttcaaatcctgtctccgccacctgcagctgtgcggcctcaggtgagacagttccccctctg

SEQ ID NO: 60927 - DNA, 2813 bp, Bovine  19866881180536
  misc_feature (1)..(1): n is a, c, g, or t
nctctgagtttctattgtggaattaactgacgtacacaattaaatcagccacattcagaataggactgctccctaactgtctggacagtgaagatgtctgtgctgactgttgcttgttaagaggtacatctttggcacctcacggccttgtgcatggtgggcggaggcagatgcatatgaggaaatagaagaaaacagagcctcatcaaaagggtggggactcttctcaggctttggcacactcagccagtggtgatgttgatctttcgttacccttcacgtaatctagaggagacagacagctttctagtcaatcagattttttaaattacttaaaaggacattctaagtatggagcaaatcattgcagtaaatctcgttcacatttacctgctgccactttttaaatgcaagagaatttttttcaagtgcgtttgaaaagttcattttataaattagaaaatttcacagtgaagactgaaaataagagcccagagtttggaatttggagctctggattctcttgggctccttctcaagctggtagtgggacaagtctgatgatgtctgtgaagaactttctatgataggcatttgcacgtgggcgtttttgtggtttttttgataaggttgtcgagggtggcggacgtcatcgtcatgtttcttccggttcacatcgcggcccatctgggtatcgggggctgtgacacacatgcccctaaagcaggacattgtgtccgatggcctgttggacaccccagggtccaggccagggcccctgaccctgactttaagacttaccatgactcccagagtctgaaagggcacatgtgagcttatccatgtaaattttcattgaggcctgtgcagtagatgtagataggaagaagtaccatgtgtccaaaattataaccagtagataatccacgaacttagattgtgaagcagtgtaattactaggttgaaagttcagggccattttttaaataagtaatgtataagatgtattagtaactggcttctatactctttgccaagactcagctctcaaggagctctttcatttatgacactttataaatattcatgaaaattggccccaacgtttctttaccgactgttctttaaactgggccagctgtgcccccaggccctctggaatcccaggtatcccttccctggctgactgcctgctccccaagtccaagagaggctctgtctccagtctgttgggtgatcaacgccctgcaggatgtctgccagctgcagatcaggtgtgtgaggccttgggctcacccatctccaaggcaacaaccatctgtggctcacctgggcctctgccttcgacccatccccaccactgtcccaggccaggccctggacctttctctatttgtaaagaaacacgttttagaacgttgacactcactcaatagatgaaaacactaattattttctctcttcttaacagacacgggacgacttcctgggacaggtggacataccccttagtcatctcccggtaagaacggttgcctgctttataatgcgtgcagtgaacagcagtttctgtctgcaattccggggtattttcagggcagtatttcctccacactgtggagaaggctgaaatgaaacacagatactgtgagcctgaccccttctagaaggtggtcctttcaggaggctaggagatcactttaattgtaaaaacaggtgtccttgaaccatctacaggtacctatcagtgtcgccagctactttcttatctcatcttcctttgtcacgtcatacaaaacagctgcctgcttctgccaaaccccttctccttgtcactggaatgtccttgctttgaagttcatccttcggctctaatcacgtgtgtgttccctttgtctggaattgtacacgctgtttctcctgcacttcatctgcacagactgtgtttccgtgactttggttatggctttctcggttggcacagagacaaaagaaaagatgctattggtcctaagtgaacttgtcagctgcaaagactctggtttcagaaacgatactgggtcagcacgtgtgctgttgctagtaagcctctgctcaaatgtgtagcaaaaggacgggggctgttgaccgtgactgagctgaagggtgactcccgcgtgttccagtacctatcgaatgggggcccaggcctccctggcgaaaggtaaatggcctcgtgctctggctctcttccccctgccacggggcatcatgaagctcagtagcacctcctcattgtgcccagtcgtgtctcactctctgagaccccatggactggagcccgccaggctcctctgtccatggaattctccaggcaagaatatgagattgggtagccattcccttctccaggggaatcttcccaacccagagatcaaacctaggtctcctgcattgcaagcagattctttaccatctgagccaccaaggaatcccccacaatagcaactaagagagactaagtcaaatgtttctgccttccaaggacattattaaaaaatgctcaatgtgagcaaatagcataaatcgtctataaactaaagtggcccaaaccacctagtatgagcctgccgctgcgttgaagctgcagctctcaccctctgttagagaccaagaaaggccgtcttacccaggaagctcttggaggtctggtgtgaaggactgtgacggcaagcactttactcctgtttactcagcggagctattggggatgaaaggtttgaagctcgttcccttcccaaagattggaaacagcagtagtgacattagaatat

SEQ ID NO: 60928 - DNA, 1088 bp, Bovine  19866881215717
  misc_feature (1)..(1): n is a, c, g, or t
ncgctcagttgtatccgactctttgcgaccccttggacccatggaattctccaggccagaatactggagtgggtagcctttcccttctccagggcatcttcccaacccagggattgaactggggtctcctgcattgcaggcagattctttaccaactgagctctcggggaagcccgcagcaaagtgagtggaagagggcttttgagggcaaaggccctgcttcaagccacaatgtccagcaaacacagagatgttgtggattagtcactcagtcgtgtccgactctttgcgaccccacagactgtagtccgccaggctcctctgcccatggggttctccaggcaagaagactggagtgggttgccattgccttctccaggggatcttcctgacccggggatggctctaacccatgtctcctgcatcttctgcactggcaggcagagtcttcacccctgagccacctgggaagccccacacaaggaacccctacctgcaaagacagcctgctccagggaagccccaggaccacactgcctctctgccccaggacagatctctctccaccttcgaaagcaagggccctacattttccagacccaggggcaacacgaacatcccttagtccaacagagatgacgggccgtagatacctggagaccggggggctgggttctctaccctcgggaactatgtgatggagcaccaggatgtgcctttttttaaaatgtttctattggataaacataagctaattgctaaaaccctttaatactatttgtgctggagagcttgggattcgtctttcgaattctagttgttcagctctcttacaaattagaggagtgcctctggcagcggggtcctctccctccgacccccagcctctccccactctggcccgcctctgtcctgtctctgtgcagcctatatttactcagaagatccttgcttgttcatcaggtgaggttatcaagggacatgccctccccatctgaaggcgtagtcaaacaaaagtcaggcctttgaaccccaggctccagttaaaaagtaacaggctgggtattgggtcaataagaggcaaatat

SEQ ID NO: 60929 - DNA, 1370 bp, Bovine  19866881264836
  misc_feature (1)..(1): n is a, c, g, or t
ntgtcctaccaggacctttgtcactagtgaatgattctttccaactgagctaagatttctgcagcctctcagcatgataggtacatccctggagtgaccagaaagaagggtttctgttctatgtccctcaggcaaagacaaagcagatgaacctggctaagtcatcaggagaggggaaaaaccagagatggttcatcacatgagcagccgcacccagcatgccagggctttgcagtagcaatcggggtcagctggaactctagagccagtctgcagtgggagtcctgggagtagtgcccaggggaagaattccccctgaagagagcagacctcacatgggctgggtgggactctgctgacgctctgcaccctgtaaaggtgatccagggtctcagacaggaaccaaaggaggtcagtccttaatggaaagatgagcacatgaacccagtaaaaaaaaaaaaaaaaaaaaacacacagaaaaaaaaaaacaaaaaacgctgatgttgtacacctaaaatgaatatgttttacatttcaaataaaactagaaaggaaaaaaagaggcagggatcaacattctgaccgtagaagctgagtggcttttatggtatgctcacaaccacacagcccaggctgaagagggccgttgcaaggcctgcctgtgaataagggccatttttactggaaaaaaaaaaaaaatgcagaagctttcattttccagttattaagaatgggttgattttatgcccaaagcaaggctctggttaacaactcagttatcccgggggaaagagtaaactggcctctacccttttccatttccagcatttgggggaaagaaaggattagataaaatgctttatttcctctcatgctccattgtgggcaggagtgcatatattaggcagaaaccattttcaacaggaaatcaagtaaaccaggaggatttattcacaggaggctcccttcggctagaaaaggagaattattaacacaatggaatagttctctctttccatgttcctcctctgcccccccccgcccccagcccccaccaccatctcccactcgctactgtgacgggaaaccactgcggtgagattcgacatctgagcccctgtaaacgcctctgtatccaacagccatactgagagtggatcacagcttgtctaaacgctaggtccccatgcagcataactgttctcagactgcaaggctgaccccagttactgatgctggactggggtagaaggtgaggaagagagtcagggaggatccattactccagtcgtgttattaccgtttatgatgttgtcttccactaagtatttgttttctaaaatcagttcccactagggattctttttctc

SEQ ID NO: 60930 - DNA, 765 bp, Bovine  19866881333621
  misc_feature (1)..(1): n is a, c, g, or t
naaaccgcttacagggtctttctgaatctcccttagtttggctttcaggcatatcacattaaaatacattagacagaagtaaccgaggggataagaaaatatggttccttttttacgaccttggcctccctgagtcagtcttcataatgaccttcctaacagcagacgagacggttgcaccactctcgttcaattcacagaggagagacgtggctgactggggggcccgtcgggtcccatctgtagaacctgggccagaaggcagctcccgctcctccacatctctgtccaccagaccagccaagccccttccgtggccggcacgtccagagtcacatcagtaggtgctgaaataccagacctgaggaggcttcctttcatctctctctctaatcatgctgtcattcaacttataaagcaaagggctacaaaggacatgaacgggtgaactgacaacactggagtatgaacgcaggttggacagatttcagtgtcaatatgaagtttactgaagttgaatactgtatcattgcaatggaaaagaatacactgtttaggtgtaaagagtggttttatatgtctgtgtgtgtgtatgtatatacatcttattctcaaaaggttcaggaaaaaattatgtatacatagacacgcatatgcacacacataaagggtatgcaaatgataaagtgggataaattttaacacaggaatctaaataaagagatgggggttccttatatactattctgggaactcttatgtatg

SEQ ID NO: 60931 - DNA, 1781 bp, Bovine  19866881793146
  misc_feature (1)..(1): n is a, c, g, or t
nctgagtaataggatcccaactttacatgtgaaaaatctcctattagactcctgggctttgacttttgtggatctttatccaagaggccttgacagtggaagttcaagttcagaaaacaccctcaatgaaaaagcgtcctcagaggtctacttatttatctgggtttctgcttttgtttggattttagcctaatattaatagttctttaatattacgtgtgtgtgctaagtcacctcagtcatgtctgactcttggcgaccccatggaccagagcctgccaggttcctccatccatgggattttccaggcaagaatactggagtgggttgccattttcctcctccaggggatcttcctgacccagggatcaaacctgtgtctcgtgtgtctcttatattgctggcgaattctttacctgctgagccatcagggaagcccaactctggttaagcacattctagaatccagtcagggctgaagattctaaccttcatatctcagtctccttttctgtcaaagagagataataacagcacctcctttgtgggttaaataaagcacttagtccggagtctaccactctggtaagagctcagtaaaatgctagttgcaaaaatttccactatcttttctttcttgctttatctctctctactttttgttactctcatgaaaacagtccacttcaagaaagcataggctgagaaaaaacagggtccagggagcatctggagaggtggagtctgtcactgtgatccttttctgctttctgaaaacacacgtgacgcagtgtttggatgaaaagcaggaaagagcttttcaccgtgcctgcgctgttacccttttcattctccagggtgttactttagcacttaactagagaaaatgtacacacatttatagaaagagcccagggctcctcgcacccccatcaggcttcaccatttgatttacatttagtgaaataaattataaacttttatgaaagtcatccgagcaaagtaatggagagttctgaggaacagaaggaaaggaatcgatttcttaggtgggaaatacttgcctcctgggcctgtgaggaataagacacaaggccttccaggtgcagctggaaatgctgtggatgttttgggtgccagcctccagacaggtcttgtaaacgtccaaatctaggttacagttgatttccatttgtgaggacctcgttcatcatcatttcaagtgttgccattactatgtattaccagctcccatgaggcttatacatcctatttcccagctcatggaagttgcaaaaatgagtttggtcctcaggtatatattgtaggccagctttcttatctcatgttctaaagcaaaaaggagaaataatgttacaaaatgagtaacacattatattgaagctagagtgtggtggttctttgagccgaaataagtggcaacaaagccaaaaaaaaaaaaaaattaatgaaaacacgttttgttcctactggaataatggccgtctaagccctgtcagcccgcagtggtaactgccaacttgctgtcaatcacagctgagaggaggggtagcacccccggtggttatttgcataagcttttaaaaaatgctcatttaaatggaggtatcatcgtattcaaactgaatgagaatgaaatgtccttaaaattaactgacagcagtgctttgaactgcacaataggctaacctgggagattttaaaatgttctgatgcctgggccctacccttgaccaaaacaaaccagtattctggagaca

SEQ ID NO: 60932 - DNA, 903 bp, Bovine  19866881877413
  misc_feature (1)..(1): n is a, c, g, or t
ntctcgggcagcctgagtttctcggcgtttatggacgggctcgcccccaagagcaagcactgccctagtttctccatcccgggatcacccaactccattctatatttgccacagagccattatttgcgtctaaagtgtcaaaacagcaaaccacattaattcctgctagtgagattaacctcacctgggaagacaatgggttctcggagattaatttctgggtttgtaacgaggtgtcacgtgagtgctcgaacagtctagaaagtgtaagtgccggttttcttctctctcaaagggaatacaagtttctatgtctggaggctgaggaacgtggggagaagacaatgaacaatgatctaatcatctggcacctcatttacaatttttaaaagttcgtaactgattatacatccatataagagcaaaaccgtgtaatctctgaacacaagtgaaaaactaaagttaggagtcatgtgactcatcctccagcacttcctgtaaaggttataaaacaaactaggaagacatttataccccaggaggtaaatctagaataaagaggtggacacctgtcccaccacgacctcactagtagcatcggctatgatttaaactgaacttcatgcacaatgaggtaaaaaaaaaaaaaaattaatagacgatctgtcctcatttcccctggggttttgtaccaaatttccaaactctgcatgacagatcccttccactgtgtctattttcaacatttcaggcacacagggatgacaaatgcagtaatttattcataaaggggccgctgggggagggaggcaccggagcagtagctgtattataatttttcagtgcacagagaagaggtttccaacaaggtgagacgggggaaacaatttttcacgtctatgt

SEQ ID NO: 60933 - DNA, 1135 bp, Bovine  19866881649203
  misc_feature (1)..(1): n is a, c, g, or t
naaatgaaaatagaataagatcttttattttcctcttcttttttacagggttgtgtttatttttattttatttattgtttttggctgttccacatggcatgtaggatctttgtttcctgaccggggttgaacccgtgtcccctgtagtgggagcttggagtcttaacccctagacctccagggaagtccctatttttcttattcttaatttatctactagacagctgagcaaagtgatagtaataacaatgtattagatgattatagcatataggtcagtgaaatccatgacagcaatgttataagggatgggaggaagaaatcagaaacgctctatgaaaagctgtctgcattttccatgaatttgtacagtattatttgaaactagacttcggacacgactgagcgacttgactttcacttttcactttcatgcttggggggaaggaaatggcaacccactccagtgttcttgcctggagaatctcagggacaggggagcctggtgggctgctgtctatggggtcgcacagagtcggacacaactgaagcgacttagcagcagcagcagcaacagacttaagttaattgcaaatatgtactgcaaattctagagcatacaccaaaaacaatttttctgaaagatgtacaattgatactctgaaaggagaggaaatggattcacttaaaatgctcaattaaaaggcaaaaaaacaggataaaattttcaaaaaataacaagtgcaacaaacaaaaaaatggtgataaacatggtagatattgatccaaatatatcaataatcaccttacatgtgaatagtctaaataacaccaattaaaagatatagactgtcagaatttaaaaacaagatccaagaaacacactttaagtataaaaacagagacaggtgaaaagtaaagagctggagaaagataaatccatgccaacactcattaaaagaaagctagggcagcatgtgaatttcagactatagaataaggaaaattatcatggataaaaagaagtattatataatgataaaggggtcacttctttaagaaagcataacagtccttaatgtatatgtgtcgacaacagagaatcaaaatacaggaggcaaaaactgccaggaga

SEQ ID NO: 60934 - DNA, 1169 bp, Bovine  19866881281702
  misc_feature (1)..(1): n is a, c, g, or t
ngtggcagaagaggagcctgtgggtcattttgaaggaacgggggcaattccactggattccaaccgatgctggcaggacagctcttgagtggaacacacacacacactcatacacacactcagatacactcacagacactccagcagacacacatacacactcccataccctcacacacaacacagattcacacactgaaacatatacacaaacatccacaacccacaaccaggcatactcagacacacacacactcaaacagatacacagacactccaacagacacacatacacactcacataccctcacatactcaaacacagattcacatactgaaacacatacactcatacacagacacccacaaacaggcatactcagacacacacacactcaaacagttacactcacagacactccagcagacacacatatacactcacataccctcacacactcaacacagattcacatactgaaacacatacactcacacacacaggcatactcagacacacacacacactcacttgctcactcaggccttagctcgtctaaacagtccctctgtgtgaattagaaagaggcgccactcaagagagacagaggccttcagcagcaggtttgaggaggggagagtagcctggacttcagcccccacgtaccctctggcagggccccctgaagggtgcactctgcacgaccacgtgggatggccccacctacacttctcctggtgcacggaggggagccccacgtgcggacctgtgggtgcagaggggcagggcagccaagagaagatgtggccttcccttgagtcacatagagcatcctgtccacaactattcagagcttgtaagacaggccccatgtcgcctgaggaggggtccctctgcatgcactgagtacctgttgggataggtgatgttacacggcactttgcccacgtaattctcattcagccagcgattcgccagcgcctgctgaatgttgggcctcttcacaggatctggttccaggagagaacgcaggaagttcacggctcctgtgaagacattgggcaagtgtcacatctgttacaggctgaaggcagaccaaggcaggtgacccaccacacctcccgggccactgctcatctattttctggatcttgggggggccacccat

SEQ ID NO: 60935 - DNA, 1109 bp, Bovine  19866881802076
  misc_feature (1)..(1): n is a, c, g, or t
nggagcttgcagtagcttctgacctcatcacaaggctgctgagtgtcaaggctcagctccaggctgggctcgtgacaaccaaccaaggcctctttcaacaacactatgaaagatttatgaaaggctgggcaacactaaaatgagcttatgcaacacttcccccaatgcaaattaagaaactgatttgaggaacagaaacttggttaaggcttgcctacctgcaaacagcaccgcagagaaagttgaatacttaaaaaagaagaaaatggtctctcaggggactgggagcattatttctgctctgaataactgagaagttgcatgtgaaagagcttctacccaaattgagaaacttcaaaatctgacgttaagtttctccagtgtcgttgtcattgttgtttagtcactaagtcatgtccgactcttagcgacccgtggactttagtcctctaatctcctctgtccttgggatttcctaggcagaaatactggagtggattgccatttctttctctaggggatcttcctgacccagggatcgtgtctcctgcattggcaggcaggttctttactgctgagccaccagggaagctcaagtttctcctgtagactacaaaataaacaatatttgtagagcttcagttcagttcagttcagtcgcttaaaacacggtcatcctaaacatcccctcatttagtctttgtgataatcctgcaaggaggtgaaaatcagtatagtcgttatgcccattctaaaactgaggagactgaggctcagagaaattaaatgacttcctaaaaccaatcagctatgccttgaacatcaggccactgaattcttttcataagcggtagaagtttcagttgcgtacatgcctaccaagttacttcagtcatgtccgaccctgcaaccctatggactcatctgtaaaacagggagaataatacctacatggtagctattgtgagaattaaatgaataactgtataaaaagcaccagctcagagcctgacacaatgcagatctttgctattatttacagcttctttccattaatctcaatttacagcttttctagtcactctttggataacacatgattaaagaca

SEQ ID NO: 60936 - DNA, 1810 bp, Bovine  19866880473233
  misc_feature (1)..(1): n is a, c, g, or t
natgctggaaagcatgtggagaaaagggaaccttcttgcattattggtgggaatgtaaattaatacagccattatggagaacagtatggagaattctttaaaaactgggaataaaaatatcatatgatacattgatcccattactgggcatataccctgaggaaatcataattcaaaaagacacatgtaccacaaaattcactgcagctctacttagagaagaaagacatggaagcaacctaaatgtctattgacaaatgaatggataaagaagttatggacatatatacaatggactataactcagtcataaaaagttttgaatttgagtcagttgaaatgaggtggatgaacttagagcctgtacagagtgaagtaaatcagaaagagaaaaacaaatattgtctattaacacatatgtatgggatctagaaaaatggtactgatgaacctatttgcagggcaggaatagagactcagacatagagaacagacttgcggacacagtgggggaaggagaaagtgggacaaattgagacagtagcattgaaacatatacattacaatatgtaaaacagatagctaatgggaactcaactggtactgtctgacaacctagaggggtgggatggagtaatgggaggaaagagaggttcaagaagcgggggacatatgtatccttatggctgattcgagtggttatatggcaaaaaacaatataacattgtaaagcaattatcctccaattaaaaataaattttaaaaaagaaagaaaatatatgcttgctatataaattcagtatactcagaccctgaaatagctctgtcactaattagcagtatgactttgatcttggccttacaggtatatgaagattaactgggataatatcttcaaggttccctcttcttgggctctaaattactgcagatggtattagcagtatgactttgatcttggcctcacaggtacatgaagattaaatggaataatatcttcaaggttcctcttcttgggttctaaaatcactgcagatggtgactgcagccatgaaatcagaagacaattgcttcttagcaggaaaactatgacaaacctagacagtgtgttgaaaagcagagacattactttgccaatgaaagtctgtatagtcaaggctatggtcttcccagtggtcatgtatggttgtgagagctggaccataaagaaggcagaacaccaaagaactgatgccttcaaactgtagtgctggagaagactcctgaaagtcccatggacatcaaggagatcaaaccagtcaatcttaagggaaatcaaccctgaacactcatcagaaggattgatgtagaagctgaagctccagtattttggtcatctgatgcaaactgctgactcactggaaaagtccctgatgctgggaaagattgaaggcagaaggagaagagggcatcagagaatgagatgactggatggcatcaccaatgcaatggacatgaatttaggcaaactgggagatggtgagggacagggaggcctggagcgctgcagtccatggagtcgaaaagtcagacatgactgggcaactgaacgacaatcccactacgatgaatggtgcataatagtttgtcaacccatgttaatttcctgtcttcatcctttctgccttttaaagcacatacaaccttattatatttaccaccataaatttcagtcattcacttattttctaaagtatttattaagtatatactatggaatcagtttctctgcattgcactgggtaacaggtgcatagacactaaacaaagg

SEQ ID NO: 60937 - DNA, 1327 bp, Bovine  19866880647987
  misc_feature (1)..(1): n is a, c, g, or t
ngtccttggcttactttaaactcttgaatctcaccctgtcccctgttgatacagtcaacatttttcattgatgtctatcatacctgattcatctttgcattggttggagcttctgtttctgcatttcttgcttattgaaagaattcatccgtaaagtattatgctcagtctaattttcttaggcgtataagcattctttgtttccagagcaccgtgtattatattatagttgctgacatgtctgtcttcccactagattctgagcttctttaaataagcatctttgtcttttcatctttgtattccctgtcatctaacataggacctgacatataaatgtttggatgaaacctctaatcatattaggtatgtaaattgtgtgcctggaactacgtcatatgtcatgtttgttttgtttggtttggtctcccacattgacctagcccagtgtttttcccaagggtacttaaaggtgtttgggttggtgcagttctttatttgtgtgggactgtgcattttaggatgtttatatctctgatcttcaaaatgcacctacttatttctggggagtagggttgttgtcacaagaagaaatttccaggtgagaaccatttgctaaaaaatgctgggcatgtagcatatgcttaataaatgctatcgctgcaagcttttaaatacgctcttaactcggcatggtaccatgtataggtttttttataagagtcaattgctctacaagatttagcaatttcatttactagtttgacacaccatttaatatatactggaaggccattgtaacattgatattaagaagtaagaactatatacatgtaatatgtgattgtctttgttatgtcagtgatatagatattactgtgtagtgaaaacagttttgttatattatatcaaatttatatatcatacctggtaatattataggtagcacaaagtgaagctgaaaagaagttgaagaaagatgacaagaagaaagaattgcaagagctaaatgagttgttcaaacctgtagttgctgctcaaaaaataagtaaaggtaaactttaaatttcaaaagtgtttttaccaatgtaattcacatttgaaaactcttaaatgttttcatcagttgtatatgctgtgaaaataataactgtcaaaattatcaatgtcgattcttattccttttatatgtgcatggctgtgtcatacaactgttaaatccagccattagccctccaccctgcataagggaaaattaaggatttcggcagtctactagttgatttataacctttgatctttggtagtagacaaaacaaacctgtgg

SEQ ID NO: 60938 - DNA, 2304 bp, Bovine  19866880717681
  misc_feature (1)..(1): n is a, c, g, or t
naaatgcttgcacactatttgagttttcggtttttcttttccgcctcaccgtgcttcttgttcacaacttcttccagttttttctcatcccaattatccatagtatctttctcaagttcttcatctcttgcatcaatgtaaacacttcgcttttcacattttctctccagagtcaagtcatgagagaacttacacttatctcctttagtacactgtccttgcttgaagaatgcacatactacggatttgggatctgcacctttacttattttttgagcagcaactacaggtttgaacaactcatttagctcttgcaattctttcttcttgtcatctttcttcaacttcttttcagcttcactttgtgctacctgacgtggattctgttgaccaaatttaacttgatgagtgacagccttgataaacttctgttgctttgctcctttcttattcttcagaccaaaagttttgtcttcgataatcttctccttctttttctgctccgcctttttgctgcccccggcctgagcctgtttcttggggggcattgcggagacaggtcgagccggccagacttaagcgcagctggactccctcagggactctggccccgcggtaggaagagccagaggcatcttgagggctacagtccatggggttgcaaagagtaggacccaactgagggactgagcacacacacacacattgaggtttaatcgacaaattttaaaaatggatatatttaaggtatacaacatgatgcttttttacatgtgttttaagggaagaattgattgaaactgcccatcctggccaggcaccatattaactatctacatgagttattttatgacaggaggtcctagtaaggaatatggaactaacgagccaccaccaaacagaagaattcaagaattagggaggatcaaaagaagacacaacgtgtcctaccaacctcccagaatcctccttgctggaatccatcttggctgagcaatgcgtacaccaccaagaaggaaggcccctgagccagaatgaccggccagagacaacctgaaaactcatcctattatgataaaactcaagactgtgaaccaagtggcagagcagtcctgctgagttccctcaccctgctgttctctgctgggacgccccttcccaaaaaagtctctttttcgttagtatgtgtgtctcctcagacaattcatttttgagtgttagacaaaagcccattctcaggccctggaagaggtccccctttctgcaatgtgagagaagtaatcagtacagtcaagctgattaacatagctgttacctcacatagttaccattttgtgtgtatgtgtgtggtgagaacatctaagatctacctactctctaagcaagcttcaagtctacaatacagtattgtaaactatagttacattgctatgtattaaatctgtgtggtgtgtatagatacaatactattcagtattaaaaagtagaaagtcctatcatttgaggtaacacaaatcaacctgaaggacattatgctaagtgaaatatgccagtcaagaaaagacaaatattgcaagatctaacccatatatgcaatctaaaatagtcaaactcatacatgcggagagtggagtgggggcttccaggagctagaggacaggaaattggaggagagatgttgacctttctcttatggcatgttcttctctgagacactgaataacagatgagaaatcctagagctatgttgtacaatatagaagccactaattagaactattgagcactggaaatatggatagtgggaaaaaaggactgcattttttaatttaaattttaaaactggcacttgctttgattattagaaaacttttaaatatatttggaataaattggttatgtgcttgtacttttacactgtaagttttatgaaacctaaatagagagcaaatacttaagatgaaaatgtagtatcagaactgagatgcattatgagtcaaatagaccctgaattttgaaaattttgcagaaaaaggaatgcaaaatatttcattaatactttttatattgatacaggttgaaatgttaaaatttggacgtacttggttaaacaaaatatatttcaaaaattaatttaactttttgctttttaaaaatatgactattaggaaattaacaatcatttatgtgatttatttgtatttctactatataatgccgacctagacaagagcaccatgatccaaaggaaatgaaaactatatcagttaatattcaaaaatattgtcctcatttcagcattta

SEQ ID NO: 60939 - DNA, 1752 bp, Bovine  19866880874134
  misc_feature (1)..(1): n is a, c, g, or t
ncccaaaaaagatccatatagtcaaagctatttttttcctggtaatcatgtatggatgtgaaagttggaccataaagaaggctgagttctgaagaattgattcttttgaactgtgatgctagaaaagactcttgagagtcccttggacatcaaggagatcaaatcattcagtcctaaaggaaatcaactctgaatattccttggaaggactgttgctgaagctgaagctccaatactttggccatctgatgtgaagagccgtctcattggaaaagaccctgatgctgggagagattgaaggcaagagaaggagacaacagaggatgagatgtagatggcctcaccgattcaatggacatgaatttgagcaagctctgagagatagagaaggacagggataccaggtgtgctgcagtccatggagttgtaaagggtcagacacgactgagcaactgagcaacagcattacagaatatctgtatactgatgggaaatgatttacgagggtagaaaaattgatgatacagaagagaggatatatttgaaaaagagagatcctggagaaggtgagggaatgagatccagtggagctactggatttagataagcagatagacattcatccatggtgaaaggtcaggcagggtacatggggcccgatgcaagaagatcagtagttgtggtgttagaagtatgtggaagttctcttctgactgcttccattttctcagtgaaatgagaaacaagtcattggagaagtggcaacaaaagtctgaaatgagatatgaaataattaataaatgaactgacttagaaagtagagtaggctttcagggctatgccgtgtcatgaatttgaaggaagtataatcagcatggttattagtcttcagcttgttcagtttcccaaggacaggcaggagaagtacagaattcaatttaaccagagaggagtttggcagaagtgtgtaaaggcaaagagtatagactctggagttagactgctcatatttaaatcatggttcaagcacttggcaactagcttgtcttgaacaaactgcttacgctctctgtgcttctgattcctcagctgtaaaatgagtacagtctgtttcccatttacagagatactaggaccatttagaggaaatcttttacatgtttccaccaccctgtctcctagcttacctgcgtctgggcccatatactcctagggtgtggttgagtgtctgggtggataattctaagcactggaaaaagaggagggaagggtaaaggatgggggaagaggggaaggacacatagaaagcacaatagaagtgctttattatcttctaagagggtaaggtggaggagcaaagtagcaagaaagctgaggatgtatacagtgcaatgattaaagtgatgagttgtgagtgaggaactgaaatcctgcttctttagatctcaacagaagtgcaggaaactccagttaactttagggaaaccccttcatccaaaagaaaactctagaatttgatttgaacctaaatgaaagtgaggcagacttgaaactcatgatctctcgtacagttccatgatgaaaggagaaatatatgccaagaaaacaacaaattcttaatgcaaatcagagaaattctgctacttcgttgaaaatggtctttctctttctactgtaattatttcagtggtgtaggattgactataatccctgctcaaaagcagccatagggcagtttttataccaatttca

SEQ ID NO: 60940 - DNA, 1096 bp, Bovine  19866881154197
  misc_feature (1)..(1): n is a, c, g, or t
naaaacataatgaatgcttaaaaatgaaaatggtgtttcaggaagacgcatggagtaagggtatggtttgagtgaggggcaggaaaaacacagggagacctaggagattactgtcagagtccaagcagatggagagggggatgggctagatgagcgagtggccgagagaatgaaacagaaggaatgaacccggaagacactctgatgaatacttaactgaaaccagtgagtgctaggtgagtgtgggggagaggacagaatcgatgaatcctggtttcccaggtcacatagagaagggagagaaacagatctaaagcagggagcagatctgttgggctaagacgatgtctttcattaaataggttaatatattgcctcttccctgtgaatcatgtaagtacagttcacatgctgaatggtggtgtatgtgctatcatctcctcctcagtctctgaaagcccaaaagacagcatagcacaccatcatcctcagagcaagagcagcagacacagtgagctggagcccgaggcggaacagcgtgcgtcagcccatatgctccccctggcaagccacctgcctcagtgtctcagctcccccagccgggaagatgtacaaaatttaagggctttttaaaaaacacaaaaactgcaggatagggtgctttaaagtggtaagaacaaacctgaacttgatccacaaaaatacatccaagcctacagcttcacgtaaatgtgagagggcttcctaggaacctgccagctaattcaggagacagagacgtgggttcaatcgctgggaggggaagatcccctggaggaaggcatggcaacccactgcagtaatcttgtctggggaatcctatggacagaggagccccatgagcaggctgcagtccatagggttgcaaagagttggacccaagtgaagtgacttacacacaagtgtgagaccttttctcatgcttagataatgtcagttaaatggcctcttgctatgcagacacctctagagtatcttaatggagaaaaagttcatgaatacataaaattcctctctattagttttcttaaactttcccatttagcagaaaaccagg

SEQ ID NO: 60941 - DNA, 2418 bp, Bovine  19866881160522
  misc_feature (1)..(1): n is a, c, g, or t
ntgaatagactgaaaaacatggccatcttacttgaagtgcaggaaaggtttttgattaaataactgttcatgatatttgcaaacaagacaaatacctcaagcttcaactatgaagaaataccattttatacgcaaagtctaccagtacctattgcttggtccagctgtgaattaatgagaattcttatgtgttgctgatggcagtgtaaatgctgtgaagattttagaagataatatggtattatcttagccgacaaatctcctttccactgtgtagaatgatacatttttttttttttgtaatagcaaaaataaaccaaaaacccaaagaaatccaaaaaataattgataaactgtggatttattataagtattactcaacatgggcttccctgatagctcagttggtaaagaatctgcctgcaatgcaggagaccctggttcaattcctgggttgggaagatcccctgaggaagggatgggctaccccactccagtattcttgggcttcccttgtggctcagctggtaaagaatcctgcaatgtgagagatctgggtttgatccctgggttgggaagatccccttgagaagggaaaggctacccactccagttactcagcaataaaaattaaccttgctacatgcaataatgcaaatgaatgttctaaaaaagtgtcgaagcaaataacagaagaatacgtatggtctcattttaaaatgaacaggaaaagcaatctgaagaacatgctgttttagagacctatacactactgtgagcaagctaatggaatgattacctctggaaggaagacagagggatgaaaagagcatgtaggtagcttaagcaatataggtaatgtcctagttattatttatattgggtgtgtgtcagagtgctcattttattaacaggtctcatatatttttgtgtgaatcaaatattacattgcaaaacaaagttggttaaggattctcaatggataatgatagtcttctttatggatatcctattcttatgtaagtgtagttttacagagagttttggtagaactggatcaagggctgagtacagctggctttgtattgtgcgcttacggatttctacagatagcttgatgtcttacttagggttgatgttgtaattaattcaaagcttttccatttttaggatgaatctgaatttagagacaaactcactccaattactatttttatggagtattggttggattatagaacagctgctgatgcaacagggttgcaacctattcttaaccaatttactcctgccaatgttagtcgacaggtactgtacttttttattcttttatctttttaaaaaatattataattcattttttaaatagcataaaggatggcttttattttatatttttaatctttttgcattggagtatagcagattaacaatattgagatggtttcaggtgcacagcaaagggactcagccgtacaaggattgcttctataatgttgcctttttagtcagagaagtcagaggggaggagacattcaaagccactcagcttatatgcagaggaagacaaggtcacattttgaatacataaaacaataaagtaattcaaggaaaacaacaagatgctaagtaatacatagtattttagtattttgctgaacaagtttatgttatctttgatttatatttaaaaaactagtgtatatacacacatatgcatatatagtatataaatcattcttttgataaaatcaaatacagcaacacagaattttataaggaacatattttatatgtttgctacattttatagttttaattttataatttattttatatagctatcttatatttattttgcatgtaaatagtatagatgctgctttccactacccattagtatagaacttacaaacattgttcttagttcttattttttacaatttatatttttaggggatgcacagtcttactttgattaatttaataatgaacatatgagcctcttatagtctgttgttcagttttacagtttttaaaaaagttaattgttaattttacattatgcattttgatatatgggttatgattattttctgtttataattgtggaatttttttggaaactatttattagtgttaacattagtttactgggatcaccaatctctttgataccaatataatttaaaggcagcttatcaaactgcctaactttggaatctgatttgagggaaataataactttaatatttgactttcttccctttctctacctccatttcttcattatttgaatctttgtttcctctgtgttctacttttgtttcaacaaggacattacctattctcaggcatctttctttctctattccttagttttattatgaactcctcatttctgtgttaattacctac

SEQ ID NO: 60942 - DNA, 864 bp, Bovine  19866881164036
  misc_feature (1)..(1): n is a, c, g, or t
naaaaacaagatactgaggagagactagctacagttttgcctaagggtaacctgaataaaatgaggggaaactgtattcagttttcatggtaaaacaaaataatttaaaatatccttattaaattgtcataataaagttattggctacaaataggtcattttatggaaaaatatttcttttattttatagttaaacttatcattgaagcataaaaatacatttatcatgacactcaagctataaaagataattacgtctttatcagtcaaatggaattttactttgttcctttaaacagtcagtagaattttttcctcctgatgtttgtttagaaaaaattccaatggtaggattgtttttatggctctctcctaccaaaagaaagcaaatgtgatttttttttttttcttagtaaagtcatttaccagctgttgcttggtagaattcaatcatctgagcggtgaccacaattgggaaagccgaatttcttgatgtgtgtttataaaagaactgctgcaagattggactagcaaacacacaaaaatcaacaaagttggggtccctaatttctttctattaggtatcagaagagacttcaggagacataaaaagaaactgtaatccccaaagaaaatgctgagacaaaactgcctgagtgataggaaaaacatatcttggtaaggggaaagagaaaggattaagataaataccagagttttcagaacacaatcagaagagctgagactaataatctcctgttgacatgtgataggaagcactgatgtaaactgcctttcaagatagcgccactatgaactgaattcattgaagaatattatttacctgtgcttgggttataaatg

SEQ ID NO: 60943 - DNA, 954 bp, Bovine  19866881678357
  misc_feature (1)..(1): n is a, c, g, or t
naaatgtttttttaggtctgcttattcttaaattaggttgttttttttttctggtattgagctgcatgagctgtttgtatattttggagattaatcctttttcagttgtttcattttcaattattttcttccattctgaagtctgtcttttcatctcatttagagttccgtttgctgtgcagaaccttttaagtttaattaggcaccacttgttaatttttgtttttatttccattactctatggggtgggtcaaaaaggatattgcagcaaatacttttgagtacacaaagatcactacttaaagtaaggaagcaataaattctattgtgttataaataatattttatggaacataattgcaagctgtatacatggtctgttttagttttctaaattaatctagcaacaaatagaatcttagaaggatagatggtacatgaacccatgatgggacaacactttgccctcagcctacttttttttcctcacaggaccagtcataggaaccacggacagccctttggggctgaaactttctttacatcaagtgaattactgctgccttgaatttacctacttagtaataaaagaagaaatgaattagctatcccatctgctaaatagacataaaaaatgctggtaggattcttattattctttgagcattaagaccttaaaagtgtaaatgtttaaggtatttttatatactttctgggaaaatatatagaaatgaaagttgtcagaagcctctaaatatcactagtgagcagatgatcctccaaggctgtcagggtcaaggttcagttcagttcagttgctcagtcgtgtccgactctttgtgaccccatgaatcccagcacgccaggcctctctgtccatcaccaactcctggagttcactcagactcacatccatcgagtcagtgatgccatctagccaactcatcctctgt

SEQ ID NO: 60944 - DNA, 1210 bp, Bovine  19866881802145
  misc_feature (1)..(1): n is a, c, g, or t
nttttgtttgcagttacttatcttggaggctagataatagcaggggacagcctgtatttggggttttttcccagtgtaggatgtggttataattttctgttcctgaaatattgtatattccatattaatagatcctctattaatgttaagtattcatatagtaagcatgttttggttcaaatgtaaaaattagcaagtaaattttgcattgatctgtatactggattaagagcttaagcaatgaaaaagtctgcagcttcttagacaatacaataaacatagtccagtaccggtgagtaattaggctctttctgctggtctggtagtaagggaaggggcaaagcttcattcaggggttggatttgctgtgcaacattaacttgtttgattactaagaagttttaaatattaaaaactgttaaaagtgcattttttctgtccagattacctgtctatggttccattcactaatttatcctacttgtaaagctagggctgagattagaagccagggagtgattccatttccaactctcttagtacaccctgttgtttattcttttccaagaagcacaacagagcaattaaaaatgatagcctttcaaggactgtgtcttggtctaagaggggtcactttacatcagtcttttgctagcacgtcaatcctatggaagaatatctgccctaaaactggcagtagaaattggggtaaagtgtaattgatttctcttttttcttccctttattcacaatacagaattaataggctttttctcctttttcgtgtttggtagtattgagtgaactggggagaaataaaaggaagctctgtaaagtaaataagtgagctcagaagcaattttctgacactatatagtaatgattttactcttcttagtaccaggaatatgtcaccatagagaatttttatagctatcagagaactaataggagaaaaaaaataaccatttgacattggtgtataaaattaatactaatgatagtcatcaataagaataatgaaaactgcatatcatccatggataattaccttatgtgtaacaactgtgatgaatgtcattaatatctgtcaaattattactatagattttatttgattacaacactaaattatgttcagatatgctcaggttcttcagttctgtttcagaaatcttaaactgaaatctcactctttcatcatcatctc

SEQ ID NO: 60945 - DNA, 1144 bp, Bovine  19866880493774
  misc_feature (1)..(1): n is a, c, g, or t
ntgaattttatgacatgtgagttatatctcaataaaaaaagtgggagagcacagtacacttgctctgccagcatggcaaatagaagcactggggtgacggccagagcagaggctgattcccggacggcgccgcctcactctgtgcctttagtgacattgccctgggggtacagccaagctccattccaggctcactgggcagcttccctctgagcccagggctggggatggctgggaggccggggcgctggcgggaccccgcccctgccctccggccccatggctcacctcctggctctctgcctgcagcgtctctaacaaggagctgtcggagctcatcgagcagttgcagaagaatgccgaccaggtggagaggaacatcgtggacacggaagccaagatgcagagagtgagtgcccgcctcccactcggtgcccccgagatgccagccccctggggacccggggctcagatgacccccgaggttctcacctgggcgtgattctgctccaggggacgtgtggtcatgtctggagacatttttagccacggcaccctggggagtgcggggtcaggtatctagcgatggaggccagagaggctgctatgtagcctacagagcacagaatgattcagcctcaaatgtccagtgcccaggtggagacacattgaagaggagccttcttagtgctgttaataccagctcctccaccccggataccgagttcctgcagccatgggccctgtctggagcagaaccgcagtctcaggagccaggccttggctaggaccttggttttgccacttactgtgtgaccttgaggaagtcgccttacctccctgtgcacccgaaaggggaaaccatcacccggtctcctgggctgctggagagatttgatgagattatgcaggtggcgccagtggttaaagaaccctcctgccaatgcagatagaccttaaagtgaagtcgctcagccgtgtccgactctttgcgaccccgtggactgtagcccccaggctcctccgtccgtgggattctccaggcaagaacactggagtgagttgccatttccttttccaggagcatcttcccaacccagggatcgaacccgggtctcccacatggcaggcagacgctttacca

SEQ ID NO: 60946 - DNA, 932 bp, Bovine  19866880575028
  misc_feature (1)..(1): n is a, c, g, or t
ncctttcataaacaatgccccattccaactggaggaaaactggcttcaagtggaaaagaatggatgtttcggccaggctggtgtataaattactcccaaacactgtggaaaaataattaaaaagtgtaccagtgattttcaaatccagcattcaccagtcacttcagatgacccagcagaccaagccaaattctcaggctcctccaagtcataggattttggacccctcgtacctggcgccaaatgctcacagagggttaatattaacaggaaggaggaagcaacgactgcaaggctttcaagggcttttcacacacaggcccagcaacaggggagcagcgggcgcacccacgccaagggtaaggcagcgtgcaggtgaccaaacatcacagccgcgcacgtgaccaaggtatgtctataaagtaccaagtgggaaaaaactgcagaatgatcccacttttgtaaaaatcaacactactccccaaagcgaaaacctgtaacatggatatgtgattatatacctgatggttaagtgggtatgccaaacggtctggagcgagttaaataaacttgacagcaagcctgcgccagggtggactcgcacacttctgtattcattggcaattaaaaagtgtcgggaaaagcacaccacagtgtcaggctgggaaaccagctctgaggctgggcttgtcatggcccaagggaggggtcattacctcactcacgttcggctgccatttaaacgtggccatgggtccagccatcatccccttcacagtactagactcagggatgcctgaggtcctacagagggaaagacaggtggtcacaacactgtggcacctcaggagcacttgtcttcctccctcaattgggggcccctcttcactgctttgcttccttcagtcacactccgtcccaaactatcctag

SEQ ID NO: 60947 - DNA, 779 bp, Bovine  19866880594886
  misc_feature (1)..(1): n is a, c, g, or t
ncaaatacagtgacagctaaatataggaacttggcacatggaccaaggcacactcagcctcaaagcttccagctcaccaggaacacgtgagcttgtcaggaaccatttcagcacagacctcagggaccccagtcagtgtcgttctttgttctgaattaaaggaagtcttgtgttcagtctacgcaaacatccttcacaatgggagatggcccccaaatgggacacccaaccccccacatgcagacactcactcggtgtgcaggggacaaggggaggaggccagccagcgttcctggccacaacctgagacgctgaggggagggagggatccttacgtccttggctgcctttgggtccgacacgcaggcaaaggtgatgtcacaagttgaaacgacttcagcgggggttcttcctaggcgggccccctcctggatgaacaaatcacactgcaaaagtcacagatcctaatgtgagctgcaggcagtgcacaacacacacactagccaggccagagacacagcgcccagtgctcctgtgtggcctcccaaggcaggcggtctgactgctcgaggggaagtggatgggagccccttaaggacagtcttgtgtgtctgcaaacttggtgccgaggatgcacgttccacattctgctccacaggaagcacaaaacaagtgtctgctggaggcttcctgaaccaagaatgggacgtgaaaagtaattgtccacagctctctgtggctgtctcagctgtggtgaaatctgcccagtgctgtgtgag

SEQ ID NO: 60948 - DNA, 1580 bp, Bovine  19866880650076
  misc_feature (1)..(1): n is a, c, g, or t
nctctccttgcacaagacatggttaagcaacgcctctttcttcatttactacctcatggtcttgtttccagcttgtctctctctcagctctaatgttgtctgcagcttctccactctgaccgatgttatccttcagtattttcagtctcctgggagccatatctgcagccacctctgctaacgggctcaaaggttccccaatccttgtgggaatacaacactctcatgtttctcgtgttctctgtctagcctgctctaagtcacctgaattaaatgctgaaaatggaacccaccactctcctcaccaaaggtatctgttattcacagctatctgggtgggtggcaaccagttttctctaggattgtaaatcatgacagactaattctctttcctttgttcagtgttccaggacacccggaagacctggggatatgcatttgtacactgacagttgctcgcggtgtccttgaggcaaggaaaatgtggaccaggtgcactgggtgcaacgcagctaatctgctcagcagctggctttacactcgtaataaaaaaggatttgagtgatggcagaaaacactggactctgtcctcagcctggagttggattttttaaaaaaataagccaacacattcctcgttgatttaatgggcaacacccattcctcctttaattagcacatgcctccagctccttcacaccacaatggaagttcaccaaatatatctggttgaacaagtgacttcaacagcacaaaaaaagtgttttagtctgagaaagaaccgcacagaagactcagatgggagattcagacgttctttaggagaatgctccttccttaagagccctcatcatcacgactcagaagcacaagggggcatcagaatacaggcaaaggcgagggtggatgccagctaaggcctggggatcgcagtcaaggctccccacttgtctgggtggggcggagggcagccggcaggtacattgggaggactggggaaggcaggacaacaggctgccttcatcttttgctcccatctgcccccaccagggccaaggtgaggagttcttcaagtgtggtctcctgatgagcagccacttatctgggaactggtccacctgagactgactgatccagaaactctaggggtgcagcccagcaactggtgctttacgaagggtcttccaggtggttcaggaaggtctgagaaccactgacccaagtgttccctgcttaggagactcactagtgagcaaattcatggtacgaatgtacagggcaatttctgtcttccgcaagtcaagttactcccaggcaaatcgttaagaattacaattttccctttctctttccacttagtcccagcaacggctgggacacaacccttaagaagctgccttgaagtcacccccagacccacagaaccagagcccaaggaagccctcccccgaaggccctactttttgtctgtgggtgtgacgctgccattcaccgccgtgctgtctgcggcctggatggaggtggaccccgtctcctgggggaggaaacacaggtcgtcaggccggcctgcccatgccagg

SEQ ID NO: 60949 - DNA, 1514 bp, Bovine  19866880705836
  misc_feature (1)..(1): n is a, c, g, or t
ncacacacacacacacaccctcctacacacacacacacacaccctcctacacacacacacacacacacacacacacacacagtttctggggtccttggccccctccgttgtgggtgcaaccttccccggtcaacagaggaggcttggaactcagagcagcgccgtggcccttgatggggctcgtgccagggctgggaggggctgagccaaggcctggtacgggggtgggggcgtggctgcaaactcctaagccacatggagtcgtatgcatctcgtcagggttccccctaaagatgagtagcaccatccccgtggagtagtgggaactggaagtgcttggtgtcacctgttggttttcatcagtcctgagtccccgtcgggtgcatcagaacccccagggatgctcattctagaccccgactcctaggccagtgccccagacgcccaggcagcctccaccccagggagggtgtcccaggggagaggggccgctggttgcggccaacacgagggctctggtccccacagaacatcaccaacgagctgctgcggatcgagcccgagaaggcgcgcagcacggccgagggcgaggcgttcgtgcgggccctcccggacagcggcagcaccgccctgctgaggacgcgggtggaggacacccagcgcagatacgagcgcctggtgcagctgctggaagccgcccaggagaagtgggtgcaggcgggcagcggggaggccaggccgggtggtcaggggccgggccaccctccacccctcagctaactcctgactcgtgtcctcaggctcgacatcgccaaccgcctggagaagagcctgcagcagggccgggagatgctggccacgtatgagacccagctggcccaggaggacacggtgcccgagagtggccaggccctggacagcaggaggcaggagctggcggtgagtgtgcggactccgggccccgggagccccttgctgagctgggcgtgggctctaagggcccccgtttgctctccacctctggacaatcgagggacccaaggcccaggacagcaggtctctccaggtttggaatcccagccacacaaggggtttgtgcggcctgcggaaatcaggtgctggtatcttcaaatcaggtatcagcgtagccaccccctctccctgtttctctgaaggagcagacctggccacctgtgctcagacgcccgccgggcaggtcagccgagcagaggcagctctgcccctcgcccggcacctgccatcttcatggtgccactgggccactctaagcgccagtctgtgagcccgtgggaggcccctcattcacgaaccacctcacagaccccttgccttgtagcgacagcctcactgggagtccaggaagcatgctcggagggcagcgcctccaccgggggcccttccggtccgtgcgcggcgtcaccggccttgcgctgtgcgccacagggttttagaagctgtttttcccgggtggtgttcattgtcacgggacggaa

SEQ ID NO: 60950 - DNA, 1389 bp, Bovine  19866880736107
  misc_feature (1)..(1): n is a, c, g, or t
ntccctttctagaggttaccaagggaactgaactgggagtcagcgcaacgtttaccaggaaggggagtagtcaggtaaattatggagtattgggtgggaatactgcacggcctccattaaaggcaggcaggcccgagtgtgcggacctgaggtgatgcccactgtgaatctcaggacctaaataactcccagatccaaggagaaatcacaagggaggtgtggaaatcttttgaagtcactgaaaataaaaacatcgtttgtgggacaaagcgaatgcagtacttagcgagatgtacttaaatgcttagatgagggagaaaaaaaaaacaaagcagactctcagatcaacagtccaagcttctaacttcaggaagaaaaagaagagccaactgaacctaatgtgagcagctatagtaggaaataatgatgagcagaattcagtgaatcaggaaacaggaaaacggaaagatcactgcaaccaaagctgtttcattgaaacagtcagtgaagtgatcaaccccagacagaatcatcgggggagaaaacagaataaacaaacacgacaaaagaagatacgatgtcaggaatgaaagcgaggacgttccctcagatctcgccagacgttcaagtataagagaatattatgaaccatctcatgccaaaaactcaacagcttgacgaggtgtacagtgtgtccttgaaagacacaaacttgtgaagctgctcaagcatcagatgacccagatcgtccaatatctaataaaagaggttgcatttgtagttaaaaaccttcttaccaaaaaaaaaaaaaaaaaattgcaggcccagatggcttccggggtgaattctaccacgcatttaaggaagtaatacccagtcttcacagaccctttttcagaaaacacaagaggaggagggagcacttcctgactgttcaggccaggaaaatacacgatggggaaatagtaggacacgctgggtgttcctacatttcctaccaaccctggctcatacagagtggctctggaaggactcacgagaaactcacagcagggctgatcttcgggggaacggtttggtcattacaacccctttgggttttttaattttgtatgtgtattgctttttcccaaaagcggcaattatttggaaaacaaacagccttcagcgctgtccacagaaatcccccctgggtacctcaggcagactagctcagccaaggcctccgagaccaccctccccacccccagccccgctccgtggcccctgacctgagctccgcctgctggcagaggccgtcgaagcgctggcacagcttgtgcacctcggcctcctggcgctccaggtccgggcagtgctcctggaagcggcggccagcgagcccgagca

SEQ ID NO: 60951 - DNA, 2609 bp, Bovine  19866880987655
  misc_feature (1)..(1): n is a, c, g, or t
ncagctgcaccaggcacaagtcactgagctcctctgagaaggagtcctcctgctcaaaagtggggtagaccatggaggactcggtgcgggtccaggcatgtggaagcttccaaaacccaggttcgatggtcagctggaactctgtagagaggcgggagtgggggaagacacaggagcagtgagccattccatgattaaccacccccccaggctcctgtggttctgagcccaggaactggctgtccctcccctggcagccctgactgcacttgggtgccttcagggctctgagcattacctgagggttgagcactgcatttgaaatattcccaaagctttttatctgaatttttttttaatcactaggaaccatgtggggacaggctctgagtaaatctactgcaccccatggaagcttgagatatctaggtagggttagttgcctcatttggttctattagaacatggagctcttacagaaccaacctcaggatgagccagactgggatggtcttagggaccaggcctgggagagggtgtatgctcagttgctaagttgtgtccgactctttgagaccctatggactgtagcccgccaggctcctcatccatgggatctctcgggcaagaatactgggatgtgttgccatttcctcctccgggggagagggtggagcaccccacatacagagaagcaggccgatgcttgggagggccagttatctccccacctaccctcctggacctgggagagggagcctgggaggcagggctggaccacacaaggagctggcttataccccccaccgcccccgcccaggaacaactcaggccagggcttatagggagggggcccttggtaggatgactccaggctgacaaggagacagaggctctgcattctaggccgagaagaaagatactggcaagatgttaatgtttgccgtgcaaagggtcagattacctcttagatctcaaccctccctctcctctgttctgggatgatcctttgcccccaagcctggacatgagctgaaaaaatgagggagagtcgctccctaccttccacctgccctctcaagctgaagtcaaggatgacagaacaccccccagggcagatggttacaggtcctcccagagcctccctgacactgactgaagctgcaccaggcgtcttcggtggatgcccccaggagctgtgtgtgctcctgaagaaatgggaccccccccacgctcttacgtctcaggtactcggggtcactcaggttgaggtagaagatggaatcgtggaggagaggagccaacttctccaccagcttgcccacacgcaggctgagcggctgcagctgggagtccagagcccacttctcctgaacgcctctgagctgcactgcaagggggaagcagagttcatttgtcccaacattggacaaaccacatggacaggaaaataaactccccgttataatacatgctgagcctctcggcttcttccagctcttgaggggacaatatttgctgagtttattggaaattaggcctctgtggagctcagctgggtactggcggggcggggagtggtggtcagagtgagggaaggtggtggctaagagcttgatttctggagaggggggccagggttcagatcctgtctctaatgctttctcattgggtgacctgaggaagtcatttaatttctctctgcttcactttctccatctgtaaaatgggagtaatgatattccttacttcttggagatggggttataaagattaaatgagctaatgcatggcattagtgctaaagaacctgcctgccactgcaggacacgttaagagatgcaggttcaatccctgagttgggaagatctcctgtagaagggaatggcaacacactctggcactcttgcctggaaaatcccatggacagaggagcttggtgggctgaggtccatggggttagacaaagggttggacatgactgaagtaacttagcactaatgcgtatagaggacttagcattgtccagagtgcaaaaaaaagcacttaataacgtttagctattactatttgttagagacttaggctttgtggtccaggaggggaaaaatgagggagagactcagattgcagagtggagaggcgctgtgtacagttgagcaggttgtacactgcacaagtgcaacacacattcctatcatgggtttgtatatgttttaagacaattttccagcagatgtcagtcaagtgactcgagaaaggtggtacccttttctaattctcacagaggtgccctgtggactagcagtggcccagaaggggtgggagaggatggggtggctggaagagaaggtcatggggtagccagaaagagaggagatgtgagggggagcttcagggcagagctgagcagtgagatgaggtagggcagctgccgtcaggttgggcactgcgtggggcagagtggacaaggtttaaggagggtgctgagcaagtctggtgggataatgggctctgtaacacccctcccccaattctgctccctctctgaacttgaaccaggcagtctagttctgaagccttgttctagatcgtttggctgaacctgt

SEQ ID NO: 60952 - DNA, 745 bp, Bovine  19866881118167
  misc_feature (1)..(1): n is a, c, g, or t
nctcttggcaagggcccgccgtgaagggcagcagccgaaagccaagcaccacggcttgccgcggacgtctcacgtgcccccggcaggcaccgctgtgcccggcccccaggtcaaggtctttcatgctggcacacagccgcagaagagcttcacccctccggctccattcgtcaataagcttcagggcccgaagcctggctcccctcagtgtcaccgatccctcctgcagcttgtcaagacagcaaccaaaagccagagcttccatgcttccatgccagcctcctcgggcacgccagcctccagcagcagctctcataagaccccagcttcatgctctgctgccgtgagccatccagcaaaaccacactcagccagctcttcaggaccaccctacaagaccagtcccttcctgggctctgcctccaaacatggggtgtcgtccggcagcccctcgtctggaggaacgccagttcagagccctgcttctgggaacctgctccccacgacgcagcctccctccacaggacagtccaccagccgacccgtccctggccctgcagtgaagaagccacctgtaccccagaagttgaccctggtggcccctcccggtggtcccaatggagattctagtggggggacccagggtgtggccaagttattgacctcctccctgaagcccagcgcggtgagcagcgtgacatcgtctacctccctgccagtgagtgtcctgctgcagcccgccgcc

SEQ ID NO: 60953 - DNA, 1207 bp, Bovine  19866881144444
  misc_feature (1)..(1): n is a, c, g, or t
natgctggttcagcattacctttcttttgtttttcttttgcctcgtggcttgtgggatcttggttccctgaccaaggattgaacccatgccctaggcggtgaaagcacagagtcctaaccattggaccttcaggaaattcccagcccaacatatcctgtgccagctacacatgcccctagaatccctacagctccacctgggatgtaggtccagacctgacatcctcttggagcttcaaatctactccacggtagagtcggacatgactgagcgactggacaacaacaaaagaatttgaagcatcgtttttagaaggaaactgacacagccatgtcatgaggccggatgcaaaatcacatttgtttttaaaagatagaacacgagctgtggccgtttcatgttgatgtttggcaaaaaccatcacaatattctagagtaactattctccaattaaataagtttaaacattttttaaagataaaacccaaggcctggaagaaaccactattgagtgcttactgtatgcacagactttccccacccatcttatcctcaggacaactgcatgacgtaggggatccagtggtccccgtctaacagctggggctcagagaggtaaagtgacttgcctgatgtcacagagcaagccagaagtgcttggaggtcttaacctccctgtctctctgtcagcaacactgggggagagttgtcctgtgaggcataattctagactgttctagagcaaaccaaacccagtttgatggaattctaggagtgaggaaaggtacaaataggagggctcaggcccctctttctcccacccacccaatcagtctggtgtgttgggcctctgtctggggtttcatttgaagggaagtttctgcagctgaggctgaagcagaagagtgatacgatcgctcatgataaggggctgagccactggaaagtttatcggtgcccacgtcagggccccacccctagagaagctcaagggcaagtggaggaggtgagtgaagtgcccccagcctggaaggaagagacctcaggcgtgatgcaggcctggcccggcagtaggggtggggagtcgggaggccccatacctgaagtcctcagacgccagcacctcgtagtagtagaggagtttgcacctggggccggggctgtgcagggccgtcaggacatcctctacgcccgggaggctgcagg

SEQ ID NO: 60954 - DNA, 1193 bp, Bovine  19866881228242
  misc_feature (1)..(1): n is a, c, g, or t
nataaggaaataatacccccattaacaacataactttgcaatatttggttcagaccttttctggtttcttaagaaacaacatcacagatacagtcaagccatctcacctgatcccatatccctccttcccggagggcagcaccttctgaagctccttcctgcacatgattccacgagcacgtgcttgccccacagactaacctgtgtggtggcttctagccaggacactaccccaggagcaagtttgtgtgtggccccttggtatatgacaggacaactgacctgagagctaaagagaaagaaatatacaactggtttcatcattttcttttacacatgtgtgtacattattttgggcttcccagatggctcagtgggtaaagaatgatgcaggagacgctgatcccattcctgggttgggagaatcccctggaggagggcatggcaacccattccagtagaattgcccggagaatcccatggacagaggaacctggagctacagtctgtagggttgcaaagagttggatgtgacccaagcgactgagcacgcatgaacgcacgtacattattttaactcttgtctcttttctatctctcagttgcaacttgctgccaaaagttaaaatgagtgttgagataactcagtgactgacttttagtttctgtctggatgctcagcatagcaaaagagctgccaaggggattatttgtgtctgtcacctgcacaagtttgcaagtatgtgcatgcttaccgtcccccgcccctgctgtcctgcccaccagcgacacagagttgttccttccatggttgtattgctgcacaattcagctcagtgtttagttctctggaagaaataagaatgttcttatcaattcccagttgctgtaaaagtaggtagggttgaaataaaacaaccactgcctcctagaatgacatgatgaaagtgaaagccaagtagctgaatgagtccatgtgaaaaaagacataaatatatagttttgttgtctttcagttataaatatttagtaatttctattgtgatttcttctttaactcacaggttattcagaagggtatttttaattttccaaatgtatgcttgtgttttaactgtctttttactgtcagtttctaattttgctgcattatagtcagaaaatgtcatctgtataatgccaattatgggggt

SEQ ID NO: 60955 - DNA, 1327 bp, Bovine  19866881235384
  misc_feature (1)..(1): n is a, c, g, or t
ngcaggaggacatccttctgcccggcttagcccacgcttgcctggcaggacgtgaacctgaagatgcccaggaacaaccagctgctgcactttgccttccgggaggacaagcaatggaaactgcagcaggtaactgggcccttccctggctggggcccaaggcacaagggcaggtaggaataggcccttgcagcgctgaggcctccagggctggccgctgcggggccttgtggctgcagcaggcttacaacgatgtttcctagcagtgcagctggggtgggcagtgcctggtctcctagcctgtcctgtaattgggtctggcttctgccacctccctctcccctctcactggccaccagctgtctccacttcacggcctttgcttgggcttgtccctctgcctggagtccactcccccaacttttgccactgcacaggcttcagctaaagagttgccttccctcgccgccgcccgccccccaatcaccttgtttccttgtgaaagctgagcagtctattatcttgtgcctttcctctgttaccctctgtcctcctttggaaagtgagctgcaagggaccggggactgaggccacctcactgcaccagccaggcccggcaggcggcacccaccccagcccttctaggaagataggccccctcagggtagggatcctaggttgggcccccagagaccattgggtgttctgaggctggcacctttccctgccgaggccaagcccactgaccgctcagtgggccctgcttttagatccaagatgccaggaaccacgtgagccaagccatttacctcctcgccaaccgagatgagagctaccagttcaggacgggagcagaggtcctcaaggtgagccacctcaggagtgggagagcccggttccctgaccaccgattggtcccctgggaagctctgcccccaccctcaggtgaagctgagtgtcaacccttcacctctcggtgtacaccatgtccttccagccagttgaatggctcacggcccaggccccagaaacagatgtgggttctgatcccagggcctgcactatgagccaggccacctcaaatcccttacttagccattctgtgcctcagtaccctcacctgataaaaggaggggacaagctgtcatgcctgccatcatgacaacgcgggtgatgttgcctctagtaagcacccagtagatgggagctgcaggtattactgtcaggaacagaaaagcttctgtagttaacaaaagtgagtccacgtggtgtgaagggacaagatgagctcaggttccctgagttcacgctttagccctgcctccaa

SEQ ID NO: 60956 - DNA, 2252 bp, Bovine  19866881301581
  misc_feature (1)..(1): n is a, c, g, or t
nagctggctcaggtatggtgacatggagtggctgggctctcctggaagcgatcgggcggatcgttgctggtccggaaccacttgcagctcacggcccagagcagcccttagtgggtgctccgttgtctgcttttctgggctttcttcccatcccaagcaagggcacagggtcagctctgcctgtccttttgtgattccttcacgttggaaaatttactttcttctggagagatttttctctcctccttcgtgcctatcagactatccttccttttgtgtgacagatactcatgttggcagcaggcagctgaggcagagatacgtctctttagtaatctcctgaaggttttgaacattcatagacgtttgcagacatgttgggcgtggggcatatgcttagttgccgctgggtttagtgttaggtagtgattataggtggagaagggaatggcaccccactccagtactcttgcctggaaaatcccatggacggaggagcctggtaggctgcagtctgtggggtcacacagagtcaaacacgactgagcgacttcactttcacttttccctttcatgcattggagaaggaaatggcaacccactccagtgttcttgcctggagaatcccagggacaggggagcctggtgggctgcagtctgtggggtcgcacagagtcagacatgactgaagcgacttagcagcagcagtagcagcagcagtgattataggaatctggaattgtgataagtaagaagggctgaaccgtaagtactgtccaacagccccatgttaaaaacagtaacggtctttggaaaatagcggacattccgcgtgttttccccctggggatggggagttgatctagtactagagcactaaggactgtagattccgtgatccatgaatactgatgataagccgagcacgggtcattagttatagtgtgttttagttaaaataccatttcaccttggacatcatgacttgtgacaaccctggggacacttacactctagagcttcagttttaaaccagtgactctcagtgtttcagaatctctgttgtgtatactagtcctcatatacactaggaccagggcaggataaaatgttaacaacttctgcaaatgattttctcatttgcaaaaaatacttgaacatggcatgtgaaataattcagacgtcttattcggagctctgttcatccttatggaatgagcacagtgttgtttgaatgtacccatttaaataaattatgccctgtcaggattcaggatttgtcttaacaggatgttaagggagaagtagttaaatgggaacttggtgtgtatgagtttactgtcctatggttgcactcagaatatatgttaaaaaaaaaattatctcttcttttcaatcttgtggtttgtaatcagattatcctgtagattctgaaagccttgagtcaagtcagatgtgtgtggcagaggccagtcattccttagaggaaagttaaagtggctctgtatgcgtctctgcttctaccacagggggtgtcctagtctaataactgagaatcattattgcattttcttgggaaggatggacaagtctggtggaaacaaagcggcgtcatgtggaacagcgttgggtcgtgatgtgagaaaaccttactttgtggagtccgtcaggtggacgccgagcaggctctccttcctcaggaattgccgagtctcggtcgtctttcaggcgtgatggagacaggtcaggagcccataggtaaggtaggctcaggtcctggtgaggaggtggtgacgagacgtcactgtactggcttgaacatatattcacgtgtgaaactgttacttaagtcatcacctggcccttcagtgccagcattaagaaacgggaaattgggaaaatcctgccactctgaaaactattttcaactcactctcttttctagcctctgtgtatatgtttttatgcagttgtaattgtagttgtgaataattgttttctgctcttttcacttaataaatattattataaagtcctcattatttttaatgattgcatgacaaagaaggcttattttagaaagtgacttaacgccgctgtgtaggctcccggcactgggggcacttggtgccgcctgcacgtgtgcacaggcactctatccccaggccctgctgtgagagtcgctggcagaggttcctcccagggaaagacgcctgtgtacacagaaattacacatattttcaaaagtcacg

SEQ ID NO: 60957 - DNA, 830 bp, Bovine  19866880520713
  misc_feature (1)..(1): n is a, c, g, or t
nccatggaagtaatgatgatggaaatccagcagccattctggaccatgaggcagcctgcagatgaaagccatatgctaaggatggaggaacaggaagatggaaagaacccgggaccctgaggacaccatggactctccgcctagactgcttgtctcttcatttatcacacaagagagaaaaatacccataacttacataagctactgttatttctgatctatgttcctaatagccaaacaactcatttttgcatttttgtgcatatccaaaatagacatatacccaactcatgaagaactctggaagaacagtgttccagatctgtactggaaatgcaaagagctgagcactttccaacacaaagttcttaataaaccagtatgtttctcatgttattgtttagttgctaaattgtgtctgacccttttgtgacctcatgggctgtagaccaccaggcttctctgtccatgggatttcccaggcaagaatacttgaatgagttgccatttcctccccgaagggatcttcccaactcaggaatcgaacctgcatctcctgcataggcaggtggattctttaccactgagccaccagggaagccctgcgtttctcatagatggctgcaaatgtgcatgtgccttccaaacagtaggatttatttagtttaacaattctctagacttgtcataaatacgccaaaggcacactttcctcaagatttcatagcttaattggctccacgttctgaagcttatgaagtctgcagtcaccagatctgcttttcatccttcaccaagcctgcataaactctctactagacactgcagca

SEQ ID NO: 60958 - DNA, 996 bp, Bovine  19866880576350
  misc_feature (1)..(1): n is a, c, g, or t
nccctggctttggtgggaaagggatctagctgccaaaggtgatcagagctgtcaaaggatcctccagactgataacactcagcccccagtttttcccagttcaaccccctaaaaagaggtttgtttgttttttgtttttttttttttaataaacccagtggttaacaaccagcttgttagataaaagcctgagggacacagagggaggcttatgctctcctactcacttcattaactggagtaacaaccaattttaaggtgattattgctattataagctctgatcaattttttaaatatgtttccaggttttgaaccaaaagcgggaatattagagcaaggagagcagctgtgttgagaattagtcatatccccagattaataactgatctttccatcaaaggaacacaggacacatttagttagggttctaattgtacctccaataaacctccaccacagtgaaatatgagcacccataattttaagttccaacttcctatacataatccatctgactggatggtctcgagcaaaggcagttaaagcaatttgtttcacttatataaaggaataaatcagtgcttaattatgtgaggtttattattaacagtgctggcaatctgaccatatgccatgacttcatctttttacatcaagaaaaaatatgagaatatactgattgcctttatgatgcctttcccctctccacagtggcgcacagggaggagggtggcatgtgatatgaccagatgaggaaaagaaggggccaggagctccctgctctgagtgcccagtgtggggtctgggatggttgtggaatggtgagagaacagttgccatggagcaggagcagggaaacttcgcaccatcctaggtattacatcccatcataagaacaagaccctcaaatctttttctatagaacttcaatgtctttcctaaaccaacatccaattgctggcatgcaacagaggacaggaacacagatcagtt

SEQ ID NO: 60959 - DNA, 3030 bp, Bovine  19866880637465
  misc_feature (1)..(1): n is a, c, g, or t
nctggtgtggtgcgattcatgggggggcaaagagtcggacatgactgagtaactgaactgaactgaactgatgtgcttatggatatgatgcaataggaatgacatagcaatgcttatgaatttgttttgaccacaaatttgaatcataatcctatgtaatgtctagatctcatctgaactcatggtatattaaaagtacagaaaggaaacagatgaagcagaggtaaagaaagggcagatcattgtggaccatagagagtaaactagttcatattttaggttaagtgacaagatattgaagaattttcatctttgaggtagaacagtccttcgtccctattgcaaaggatctgcatgggtaggtatggaatacccttgtgtatcagagaggggaaaatgtatctgcctcccagctccaaataaatctttttctatattggctttaattatgtacatataaagcatttcaattatctcaaaagattaaaattagcttacttatttatttatggttaagcagaaagtatactaagaaagtatgctacaatataaaggagtggcatgcacaaaaggcaggaaaaattaaaagaacctgttgtacatgcgagtatccacgagtggactaagtatgacccttcagcctatcatcacactctgaccccctccaaggaaactgacccatctctctggaaaatctctggtgcccagattccatgagattggtcttgctttgtttcctgtctgtaggtacctggcatgatatcttgtttagcataggagcaccatgtcatttgtagaagttgggatgtaaggaaggaagacggcagagaaaaggagagggcgggaagaaatgaggaaggtaaaaggaaagcagcactttgggtttgcggttgacatttttacctcttggttttgttatcttcttggctgtttccttattctcactattccctaacccatcttcctgggacttaaaaaaaaaaaaaaccatccaacatgacacttccaaaagattaatattttcatttcaacatttctgaaagtatttcagtgaaattgctttcaaatggtttattttatattagatcattgagagatagattaatgtcataaacgtaggtactagcaagcaatatttttgtctcctatgcgcacatactgtatatttcataacctctgataacttaaagtcactaatttaagtcaaattagggaaaggccagtataataattgctatatttccgctctttcttgataacaaatgagtcttttttccccctccaccagtatataatagtgtgctttttctctggctaagatataaaagcactgctctacacgaacaaaaatatttttactggctatgttattactgagaaatgcattgggaaaatgtaaaaatatttcacctttatgttgaagaaaataaacatagtggattaaataaaattttcacagctcctgacacatgccatatgtaatgcttggtgaacgtcaaagaggctttgctgcttctgagaatcactgactaaaacaggagaagaccttgagtatttatttatccaccacccgaccctcaacacattggacaaatgagacctgaagatgttgaaggacaatcctacaggacttccaggactgaaaaccttgttatacaagatccagccctgcattaattccatcacaaaatgctgcctcctgcatgcttcattgcttagtgttgaaaattagcttgaagaacaaggagctgggactccggaatcaggctgactggacttcaggtccttacctggaccctgactagccctgtgagccttgacaacatattctagcctatggaagcctgaggttttcctataaaaacaagatttaatcatgccaacctcaaacatgtgtttgaatgtcaaacaaaataaagtactggcacatcataagcgctacataaatgtcatctattaaaactattattattattattattattcaaacatatagcatatgaaactcaattttgctgacttttgaatgcagttattagctaaaatgggacttctaaattcttatattcacacatataaaactctattcagaaagcttttaatagtctgactctaatgatctagatactaagtatgttttgacaattttgcaaactcaaataaatcaaaaaatatgtcactaaagcaatactctgtaaaggatgaacaggagttgacccttgccttcaaagaccctagagtctgcatgcatgctaagtcgcttcagtcatgtctgactcttcacaacccccatggactgtagcccaccaggctcctctgtccatgggattctccaggcaagaatactggagtgggttgccatgccctcctccaggggatcttgctgacccagggatcgaacccacatctcttatgtgtcctacattggcaggcggattcttcaccactaaccctcgtggaagagaaagacatgaatagccatgaaacttataaaagacagagtgtggtgtatatactataacagaagtgacaaagaggggctatggtagcatagcaggaggaagaaattcaggctgagaaaagcaagaaaagcttcatggaagaaggagcacgcctgcatgcctcatgttgtggccaaaaagaaaatgtatatgactctaaattattactagaaatatagaaaacctaggttaccaaaaagaactaccaatttgcctggtaggttaaagacctatggcacagtctagtaaaaattttattcacatttttaatttgtttagctgtatagaaagtgaaagtgaagttgctcagtcatgtccaactctttgcgaccccatggactgcagcctaccatgctcctctgtcaatgggattttccaggcaagagtactggagcggtttgccatttaactgtataagcagtagataaatgcatttgggttgtaaaagtacaaccactactggaacaagaaagtaaaaagttaaagttattcctcaactggggtctcccagttcccagcatcaactcat

SEQ ID NO: 60960 - DNA, 1566 bp, Bovine  19866880700897
  misc_feature (1)..(1): n is a, c, g, or t
ntaatcatctattgaataaagtaaacctggacaatctagaatctggatagaatagtgaagaaaacatgcagcatctgaatgaagaggaaaaagtggaatagatgttgtaagcttcagaaaagtgtagtaaacacttgctggatggtatgaagtggctcctacaactaggtggagattatactccagaagaaccccaatgaagcaagtcttctgggtttaaaacagggtgtgatgcttctgaacctccggaccttccaatttcacttggccttagcaatcataagctctggactgctgcacactgtcttatgctattcccttggttgtcttagaagcagaggaagaatcacttatgaacaagaaattttattgttttcatcacaccagcttcagttgggctattacaaaagactttcttttatgaaatttctcttcgaaaacaatggattataagataagaggaaatgacctcaggcaagtgaaaaaaatactgctaacgctgtaagaaaactttgcagaagtttctctctatttttgtgttctgtcaaacttcaaccatgtttcatctttcctttctccaactccaggtagcaaaactgtgtgatggttaatttctcatctaacatttatcatcctgaatgagagtggatttattcctccctcacctaagataactgtcataacagagatggtttgacctcatcttcttgaaagagctccctccttctagccaagataaacaaaacaaaacaacaacgtaacctttgagaagaaactgatttgctgctttctgccatttggaaaacagaaagcagtgtctctgccccagctcttatcaaaaccataagcaagtttgcagtgctcttttgggggtgaaccagagagtttagcagaagactgcacagagatggaaagagattcccaaaccattgcctgaactttgccctcagctctgctcccagctctttttctctagaaagggagctagcaggtggcatgctatgcagcaaaccagcagcaggccgatcacagctgtgcatgtttggcaaacaaatgtttaattttggaattggtctcaggccagttccactgagtgggggtggggacaaaaacctgtggctgtcacgtagaagaagcagaacacgtccacagataccaagaacccaattcactgccacagagagacgcacagaatcagctcccgcatcactcttgttgcaagcttctcaccctctgtcccaggccctgatggaggaagagggtcccaggagagaagatccccttctcggaagtagaagtcacaaaaagagggaagtgactaaccctcaatgtttctcaccatcatctctcttttacaaaaagtaggattctggcatcagatggaatctgcaggcatttcttcccaccattgggaagtttcaagttctcagtgtgtcatgttcccagctcagctcccagaaaccatctgatcctgtggaaggaactcaaaaataatgtcatcaatgactggggtgggttttatccctccaactctaatctaatgtattggtgcttccattgctccat

SEQ ID NO: 60961 - DNA, 1678 bp, Bovine  19866880733661
  misc_feature (1)..(1): n is a, c, g, or t
naaatgggttgaaagttcctgccctacatttaacaggaaggctgtagagacggcgcgtgaagcagctttagaaaggcaaaatgctatgtgaatgtgaggacttacccacattggctctggtggtagacttggagcccagggagactagctctttctctcttgccacgagcaaggaattttgggaagtgcatattgcattggcgtgactgcaggagaaacttctttcttcctgttcaatcccatcctcacctgtgaggtggaaccttttaatggacagtcattttttggtgtggtttctcttcaaggagtgaaaaaaaaaaaaaaaaaagaactgagtctttgctaacatttttccctttgatttttttccccttttggaaaagggataaattttgagtccttttcaagtttcctccaggtcctgctgagcacctgggtgtagtttctgagaaaatcaaacctgattgttgagcattgaaagcctctgtagactgagctgaggattacctggggcacagcagtctgactcctctgtaggtagcaatgaacacaggaccatgcgctgctttaggctagagatcaggtcttgtgatggagggggatttatgagttctgttcctgcctctattattgcttgctgtgagatatgaggcaggcatcttttcctctacttgcctttcctcctctgcaaaatggggaaaataccagtgccttcatcaggcagagtattaaatgaatgaggtaaaaagactcagagtgaccaatcaataatgttagctgttatgagtatctagggatcctttctgtttggagaggctgaggctggggaactccaggctaaagatttaggtccctatgcaaaatagaaagcaacctgaaacgagataaagcattaaatacttgatgacaatgggaaaacagaacttgacaaagctgattttgatgctaactttagacactcatctgctccaagatgaggccagacctacaataagatgccaagcccttgtgttggcagctatgtatgtgcttgactctctgggagattttgggatggattttctattgctgtgttgaaatatcagggagagaggaaaatcctattaaatctaaatactccccgttttatgggttaagacaaaagaatggatgagatgtcaacatcagatggagtatcccagggagtagactgtcaaggatttagaactttcaaatgatcttattttccactgataactttatttttaacataatcccatgctatctcttgcagaaagatgccacttataaatgatgactctgaaaaagttatttgttaaaattcaagtaacttgaagcaaacacttttctgcacttgacatttgtttggctcattttcctttatctgtacagtataataaagtcacttgtaatcacatgcaccacagaagctcagaatacatcttatctttttatcccagagcttgttatttgatttttgtgtgaaacgaaaaactttattttctggggtgctgactccatcattagaatcttcctgaactgtggctggaatcaggctttcattgtacttccacggtgggattaccactctgggaatgaagacaaaggattccttgatcctctcctttgctagctgcttcttcactagcagtgggactgcagaaggaagtggtggggg

SEQ ID NO: 60962 - DNA, 1248 bp, Bovine  19866880830133
  misc_feature (1)..(1): n is a, c, g, or t
naaatttataccaataggtccaatggaagaggaagatgatggatgggtcaaagaatgcagactcagaagaatgtactttcacagggaaagagagagcactatatgcagaatgagtggctggagcaaggacctgcagttggggattcacacagacttttcagagaacaatagctaaactatgatggcttaatagcaaaacaataaaacaaaaccctgaagagaactgctttttaataggcagttgtaggtggaattggacagcttagaatgattgaacggtactgcaaaatctttaaatggcaaccttcagatagaccaatttatcatcattgcagagctattgattaagattggagaattgatgttatatattacatacacacagcagtcattttaagtaaaagttaggaatagcagtctttcattgccaagcatgtacctgcagcctgagacaaatgctgaaagcagaaatttgaaatttttctcattgtttgaggcttttctatcatgtggcaatggcaacccactccagtactcttgcctggaaaatcccatggacggaggagcctggtgggctgcagtccatggggtctcgaagagatggacacgactgagtgacttcactttcacttttcactttcatgcattggagaaggaaatggcaacccactccagtgttctcacctggagaatcccagggacgggggagcctggtgggctgccgtctatggggtcacacagagtcggacacgactgaagtgacttagcagctgcagcagcatataaatgaaaggcaccttcttttccccttctcttcccttgaccttcttcttgaaataagaatgtactggttgtttctttgactgtggtagtcacctgtgatctgtgagcaatatcaggatgcacagatgttgtaaatggcagtaggcctacccattgagagttttctgaaatctgtgccagactctaaaacaacaaaattagcccaattgattgggccagtggaaagcagcctcaactttgccaatcttacagagtcaaggagagaatcctcaactgacactagaattctttggtttggttctgtaaccaaaaggtggcctttgctaaacttgagccccactcgagcacaatttactagctcaagttacttccacttgagtcttctgtagtgaaaacctttcctctttccaggtgtttccagctgtgcaataagaaaaaagaatcagttctaaaaaataacagaat

SEQ ID NO: 60963 - DNA, 935 bp, Bovine  19866880833443
  misc_feature (1)..(1): n is a, c, g, or t
nctgggcatctctgcttgtgtcaggaggcaagggacctcagccatgacccagcaggtcagtccaatgcagagttgttcattctgctcctctctaatcgcaactaaactctgcaacattgaaatgaaacaagtattaagtgggaacacattaaaaggctcctgagacttattccttggttgtagaaactctaggattctttgatgcttcagaattttccacagcagcagcgtctacaaagggcagcacaaaatttgaccgcacagtttaggaaaagtggcctaatagaaggaacacaaactaagaagaacccctctcttgccatagtcagtcatcacaaacagaaagctttttccatgagtctggccaactgcactgaaccaaaatggctcagacaaggccatgtctatctttgaagtgttcttaagggtgattctgttatttaaatagggaacagcaatttcttaggaagtcccttggctgataatacatttgttttgacttgtatagaaatcgtctcatcttagctgtttctaaggcatgccaaaagtaagctgaaaagtgaaaaactagtcaactggacatttctaactatctggatccttaacaacatgcataacaaacatctatttctccagttagcatatctttcttggagaaaataatggtgtcttgccaccatagatgtttgagtccctgtgaatacatgggtagaaacaacccatccaaactcatctcatatgagatggctagaaggtcttgtcctactctggaactaaaaagctatccttaagcaaaaactgacttttccttcctgcctctcacatgttcagtggctcaacaaatatatgttgatgcaaaagtgggcaattccagggagttcagatctccttttccggtcaaggagcaggagacatgattttcttctctgtagagc

SEQ ID NO: 60964 - DNA, 1814 bp, Bovine  19866880851951
  misc_feature (1)..(1): n is a, c, g, or t
nacaacagcataggcaagggtgtcttttaaatatttctttttttttctgaaagactccagtgaaatctttcctgaaaacttttcataccaaagtcttctattacatgagagggaagttacctgcctacatgattatttgccatcacattacagccaaatttctaactgaccgtccatcttttttccagtctcatgaaggagaaggaagaaatcacactgagaaagagaatattcccaaacatgctgggtgaaggcatctaattggcagctggggctataaaccacattgcttccctcaaaaactgcttactctggttgattttcttgtacctatcttaaaaataggacagtgcccctgaagtaggattagtagcagcaaaccctgttttcagcagtgaaaacaaattataagcctttttttttttttttcctcactacagagccatgatacaatagcagggaggaaatcatttgttcacttgagttcagttcaagattatactcaagtctgattgcaaaagcccattcacagggaagaagagacaaaagactaactgctctctgggtagagtgtcagaggctcagtgtttacaagaagaaattgaggggaagattagagaataattttctcctagggaattataatagcttaggggtcttttgtagagaaagtcctttgctaggattaaaggcaggattattggtagagagttgagaaattgaaatggagagcctcttaaaatggcaatttagttggaatatccagggagttcttgaaatgtgaattctaaggaaatgggtagtacttaagaaaagaataaacttggactcactatttcaagtgatgatactataagcggatcacaaaatgatggaactgccaatgcctgccgaagaaagacaagagaccgatagtatggttactgggtcatcttttaagtaaaggcacacgctcaaaatcctactgagggagaaattgatctaatctacatacttaagtaatggctacactcactagctaaagaacagtaataattagaaactgaactaatgttatattactggtttttttgtgaaaaaatactttattttttccctttttatttcatattggagtatagttgatttacaatgtattcatttcaggtaaatagcaaagtgattcagttatatatgtacatttatctattctttttcagattctctttccatataggtcataacagaatattgagtagagtttccgtactatacagtatgtccttgttaattattttatatctagtagtgtgtatatgttaatctcagacttctaatttatttctcaccctagcctttaccctttgataaccataagtttgtttcctaacaaacttttttattactctttaaatctaattcccaaaagttggtgttagcataagtcatattttagcagcactgttcgttacatgtaaaaaggtttgagcttggcaccttatactaaattcaagacttgtaaatttaaagtatacaaaatgaaaagtttcatttggaagcaataactactgagtaattctgaacttcctacgattacattggtttcccaattacctgtaaaataaaaatcacacttcttttcttaatatatcaactagacttttggcaggaaagagctgagagtttaaagataatttgttgaagggactgttgatggaggtattggcaggctttcgggacctctgagtgatgctgaaacactcagtaagtagcaacgactagaggcctgaaggcgcttctaggcctgaaggtgtgagtagttgtgctgactcaag

SEQ ID NO: 60965 - DNA, 1878 bp, Bovine  19866880904593
  misc_feature (1)..(1): n is a, c, g, or t
nagggcatggcaacccacttcaggattcttgcctggagaatccccatggacaaaggagcctggtgggctacagtccatggggtggcaaagagttggacacaacttgagtgactaagcacagcacagcacactctccagagtaattcaaagtctatattttaaatcatttaattagttaacgattctattattagattctaatattaaataatgtttatttggagaaacagtttcaataatgggtaaaacttatctataggtctttggagaattttgctcacatgttccctctttagcatggttacctaaagaagaacaatatttatcttgtcctctttacctaactgatggatatgtttcaaacccatgatctctgtggttaagttttagattaactttttcagcttggttcacaaagtagtattatgactcacacatttatagttcctgacacagtagagaagcagaagcttgaccaggagcccagcatcagagaaatgaaaatggtatatagatggataaccagggttgacacggcaggaaaaatgtagatgttctatgggtaaacattcattgtgaagtttggacgcacatttaagtattttctgaatgttacgtgacaccatttgaattgattatttgttgttattttaagcgtaactcatgaattttagacctttttccagacacatattattgttcctatgttatatcccataacttgcttaaagtatttggctctcttcgatgtggaatatatccaacttggaaccaaaaatatgagagttatgtgagatttcaatagtactttcaaaaagtaatacaccattttcatcagcagtattctgccttctctcaaatataaatataaaaactacatccaacattttaaaaagaggcaagtgtgtttgaaacattatatagttgttaagtgttgaaatagctatattatttcttgctatcttagaaaacaaaggacagtaagtctacaaggataaacaacaatttagaggggtgggcaagggtcaactcaggaaaaaaattgtgttagttttttgtctgccccacatttctcctttttggaaatcaccctcttgtctgtcacatgattctggtaaatttgtcaatttaggagctacttccctgccccaaagtttgcatgcgactaaacagggataaccagaacttctgttcagtgattgagatgaaaattgggcagggcagggggttggggggaggaggaagaggctgtctcttccaagaggttgagattaaaaggcatgtaacagtacaaatgttgcgatccatttttttcactatgtaaagagagcttggctgaagatgaaatcaacagagagggacacagaaatagagtgacaaacaaatagactgaccacaggacctcatttaagtacttggataaagctattcctaaagcatgaaaagaataacagaaattacataataaggtaaaatggttgatttcattaatattcagctattttggaaacaaacctatttgcagaatacagctgtaaacctaaattttgtaacaccacacatcaatagtccttgtatctttttttgtatgccatattcattggaattaaatttatgtactttacctagtagctcagcttgtaaagaatccatctgcaatgcaggagaccccattcaatcaggggtcgatcaggagtcagaaagatcccctggagaagggagaggttacccaccccagtattctcatctggagaattccatggacagaggagcttggcaggctacagttcatggggttgcaaagtcggacataacaaagcaactttcactttcaccttataaaagcttacagttctgtttgttagcatcaggatactt

SEQ ID NO: 60966 - DNA, 1191 bp, Bovine  19866880956211
  misc_feature (1)..(1): n is a, c, g, or t
ncctgacccagatgtcagccccagaaaccagacatcagaacaggcagctgctggaggagatgagcctgtggcagtacagccagagatggatgctggggttcttcggggagctcaaggagcatgcatctcaggcggggtatcggggtgctttcctggtcagtcacaagctcagctcacccctgagtccttttgccagactctggggacccatgacacatcccttcccaacaggcaccaggacacttacacacactcctcaaggctcttaacttatatagcaaggaccggtaggaccacccagagctcatattattcttactctagtcatgatttttgcttcacatattctattttgaaaccatacactgtgctgaaattttatggtggctcttgaggtagtttatggttttatcacagattgatcctttattttctaaataaatttagaaatttccttccgtttcctcaaactatagacaaatgtgtataaacataaaactaggtaagtgatggcgtcatgttaacaacatggctttttcgaacttttaaaggatggtagttatccgttggtcttaggaaccaaaaaatcagtgcaactccaaataaaagtaataaatctattctcttccttcaccttagctaccctgttcctattaacaatacctattataataacaagcactgacagcccttgagtatttttttcttcaaagtagatgaatttagtcctttcccttcccattctcttatttctgaaaaagggaaagagagaaggggaaaggaaagaaggaaggaaggaagagggggtggaaaaagtgaacgggcagtgataaaagctcttttataagtcagaagaactaaattctcccaatatttaataatcctttttcctctttgtagggactgaaggctgaattatgccaaggtgtgacaattagaaaaattctgagtcagggaaagtttaccttagcctgattttatgcctttaatacatgcttatattctaagatctgcatttagaaaggggttgtgagatattaaagaagttaggaaagccacaagatacatttttctctaaatcatataaaaggcacttctttaactcacacagatgtgcaggtgaaatccagggaggacttgactacgtactacagcagggcggccaccgtggtaggtttcacggactggtag

SEQ ID NO: 60967 - DNA, 1480 bp, Bovine  19866880995825
  misc_feature (1)..(1): n is a, c, g, or t
ncaagaattttcttgaaagtaggatttagtacaaaggaagctacattgaaatggtgccctaagattgactttgctttccaagagagcatgctaagacgccagagtgcacgctgaaatggactccttgaaaatgtgatgttctcgaattccttgctgaggggttgagtgccagctggagcagctgggacacagcctgaggtttcagatgttgtcagctatgacttcaattcctcctcttctccaaaaattcacgactgcagatatacacacacacacagagtcgttacgaaatgttaatgtgtcattggatggcctgttagaattcggatcccaacttgaacgtcaagtaaacggtgtcagggcaggctgagcatctgtgggccaactgccttgagaagactgtagatcgtcttggtggtggtggatgctttcctattttatgtggatgttagtgcattaagtgttcccagcctgtagtcgtgatccagtgccaaagctgagatttacatatgctagcagatgtaaaataaatgcttcagtaaatgaacatcaggtttcaggggagctgaagagtctggtttgtggaaccactcaggttctgttttgtatggagacagggactgggccaggatcaactttgcaaagcttgtggggtcttccaggagggagttttcaaactcccatagttataattgcaatggctctgccctgtcctcctcctggcttcctactggaactgtattcaaccagagatcacacaaggaaaagcattctgacacacaggctaggatccacctctcctcctgaaagctgttgagaatggggctttgtgtctcctcttggctcttaaaacttcttaccaggctccagggatttgtctgacttgtgaaaaattcatttgtgcatttccagatgtgacatagctcttgagtgattaagctacatcacttagtatgttagcagtgttagagtgggtagactttaataaaagtcctctcccttatatgtgggatctacaaaaagagtacaaatgaactttatttacaaaacagaaatagagtcagttcagttcagtcgatcagttgtgtctgactctttgcgaccccatggactgcagcacgccaggcttccctgtctatcaccaattcctggagcttactcaaattcatgtccatctagtcagtgatgccatccaaccatctcatcctctgtcattcccttctccacctgccttcaatcttttccagcatcagggtcttttccaatgagtcagttctttgcatcaagtagccaaagtattggagttttagcttagcaagagtccttccaatgaatatttaggactgatttcctttaggatggattagttggatctccttgctgtccaagggactctgaagagtcttctccaacaccacagtttaaaagcattgattctttagtgctcagctttctttatagtccaattttcacatccata

SEQ ID NO: 60968 - DNA, 1705 bp, Bovine  19866881045630
  misc_feature (1)..(1): n is a, c, g, or t
ntcttgcttgattctaaaattaattagagaattaacattccttatgaaaatttgcctgctttttatccttttctttaaaagaaaaaaaaaaaaaacaggactagaccccaggccttttctgttctctaatgaaattgcaaattgacttgtgttcaaatggtgattgagtaaaatgaacaattaaaaatgtattgctaacaatgagatctatcagccagtctctttaaggattaattagttgcaggaacaatctttcttatccagtataccaaggagaacagagccatggtgggtggacaaggatgtgtcaaggaataactttttaacatgtgcatgagcacatatgtatgtgcatatgttgtcctacatatacacatatgtaggacaagaatgcccagatatatgtgggcatctttatgagtttaaatgataaaaattagctgcagcttccttggaggtatttatttcaccttagctagaatgattcgactgttgctgattagtgatccattagttagcttgaaggcagccaacagattttactgatcgtaatttatcattaaagcagagaaatgctctaggtatttaaataatgtatgcagataaattcactcttattttttaaattatccacctgtacccaccttgtaagaatctttgccccatatcaaaagtttgctctctgaggaaattttcaaagttaactgaaaggaaaagcccttcttcctggtttatcagttctgcatgtcaacccaccactttacaaaatatctgaaatgtttcaggttacctttgcagtccttaaaaatcctgaaattatctccacattcactgttacaaactgagggcttgtcctgcaaaatctgatacctctactgtttctttagcaaagatttcagataccatagagataaactagggtccccaggacccattgcaaagctccagggaaaaatggacatagctttcttcttcacgacttgtttaaatagaggatgttctagaaaatgtcatttttcttaggttgccctaaagtcagatcttctcactgcctctattgtgccgagtaagcctaaaaaggcatttagagttgaggcatttggtaactactgctttcttgggcttcattctccctacagggcattccaagagatgaatagtaagtgtgaataggaagaacaagtttccagtcctgtcaaactaattagactagtgtagaatgaagtgaggtttgccgttagattaagttgaaagcgtgtaaagaaaatcattcaaaccatctgaaaggattttaaaagttttcatgtttttgtttatttgtgtgagacatattgtatatgtagataattgtgcacgaatgtatattatctttatttattggttttttttaaattaattttattctattctcaaactttacataattgtattagttctgccaaacatcaaaatgtatattatctttaaatggagaatagtccatgtttttatagaccatatacaacatatgtaaaaacagacatggcaggccagttgaaaaaaggacagccacaattcaaatcactgctgttaaatgaaaacagacaagcaagcatgaatggacctgactcttttacttataagagcaaaccctggttcagtactaagaactgtgtgcaatgagctaatgaggggattcactggggcacagggagtggtgcaattt

SEQ ID NO: 60969 - DNA, 1272 bp, Bovine  19866881101722
  misc_feature (1)..(1): n is a, c, g, or t
ntctgattcttctgggatgtgctagggcaccaactgctttcaggttgtggaaatatcttttaataaaacaaatgaaggagacttggaatgagaatgtgcttggctgattggattcccaactggctccacatctcttactaagtagggagaatcaagccattatccccttggctgagctggatccactccactccatatttcttgcctgtttaagatagggtataaaatttttaatatttctgtaaacaatattaagcagaaatggcacaattagatgctaaatctcaacgatgattgttcaaaggtgaattagagttctggcccacttttagggaatgcaattaatatcacatttctactggcaagccagcaccacaagctaaccattggatttcataataaagtaccatcgtgatccaccaaagcaatactatccttttaggtgctggattagaatccaggcgagtccacaatatagtctttacacatcatcaacttccacacaggacataaattgcactaatatagtaatacactgaaatctcagaccaactgtttgtcattggattagaatgtgatgacacaaaataaagatgtgagatgggatctgtgctgaggtctaaattcacattggaagcctggaaataaaagactgtttataaaattatagcccgggaattgctgccaaagtcagcctttggtgcagctgtaagtcggatggaatccacctccctgacatcagacccacccactgaaatgctgcttctcggcctagagcttcccccagtggaaactccatgtcatattacaaagcaggtgctgtcgtgccagggctgttggcttttttggatctttatggcaggttggttatttacccttcttccctccagcaaaaggaaggccatcagtgcgcttgtgggtttagaatccatatttgttacacatggcttttgagtttggttcaaaactgcagtgtcttgagtcctactctctaagacttccacttctgatgatgaggtacctggttctgttttttcttttctccttttttaaaattcttcttcaactgcctccttctacatcttctatgcccaagaaatgatgacacccctaatacagattccacttccgcaggcatcttgctatatcatttaccaaacataggaaaacatttttgtttcctatcattgagaaacatttgggccatctataaagatgacacagattaagtgtcattgaagatttgtcagaactagaaacgaaacaaaattt

SEQ ID NO: 60970 - DNA, 1033 bp, Bovine  19866881160590
  misc_feature (1)..(1): n is a, c, g, or t
ngtcacataatagttccctgccatttcctttattgtctgccctcaaatcctctttctgtagtaagcaaaggaagggaaataatgctggcttccaaatttcattataaaagcttccattaaaacaaaacgtattgcgtattataattgtaaccagaagcagtgagggcagtggttttcaaccttgtgagaattgtggggctgctatgaaatgcgactgtcttcagtgaaccccatcctctatccagcctgtgaattatagggcattttcaaaaaattactacactgcacaaaacccagacacattttatatctttttttttttttagttactaaaatggatataattttcttaaccaaaaaaaaaaaaaaaaaaaatacagtaatagttcttgtggttcactagtattctgttttccctaaagtccaagtttgagtttgcacagacaaaactgtttggaaaaacaaaaacaataatgtcaattaaaacctgttttttgtttttttttttttttatctcccaaacaacaagctgctgaattcaactgctatttctgtatgtagtggttggttgtttccaacctgctggtgaatgtaaacacaatttctgtctcttcttaaagttacaaaggagttcaatgaacttcagccatgcaaacaatgacaactaacattttctgaatgcttaccctgggccaagtccttaacagccatgaatttatgtaagcctgcctggagagacagatattatgatctcccttttacaagtaaaaaattaggcttaaagagatggagaatttgcccaagttcaccctggcgggacagtgggggaagcagagcatctgggtcccatggcccttccttcaagctgcatggctgcttgtcaagacacttgcctctgattcacactgaggttctgagtctctgaaaagccttctccacaaccactagttttacgaaagatacttggaaaccactattaaaaatgtgggagttctccatcaaaattctcaaattaaattcaaaatctgtttta

SEQ ID NO: 60971 - DNA, 882 bp, Bovine  19866881324057
  misc_feature (1)..(1): n is a, c, g, or t
nattatagtgcaaggatgtcttttacaggcaaatatagagagatggtggaaaaggcaatggcaccccactccagtactcttgcctggaaaatcccatggacagaggagcctggtgggctgcagtccatggggttgctaagagtcggacatgactgagcaacttcattttcacttttcactttcatgtattggagaaggaaatggcaacccactccagtgttcttgcctggagaatcccagggacgggggagcctggtgggctgccgtctatggggttgcacagagtcggacacgaccgaagcaacttagcagcagcatagggagatggtgttttttattcttgtgtgtttgtgtcaggtttttttgtttttttttgtttgtttgtttgttttcaacctccaggaccacttccttcagctatccatctatccttccatccatccatccatccacccattttccagcaaacacttataggaagtcttctatgtgcccagaacagaactaagtactgtgaatagagagatgaatgagaaacgactcccgcccttggggagctcacagtccagtgggagagagagatgtaaacattaattacaacgatgtgatgaatgctctaataaagttcggagcagggtgctcagctatcccacagagctggagggcagtgatcatctatttcaccttagctgtctaaaggtctttgattcctccaagagtaacctatgagccccaaacctcaggaaagctgggttaggtgcagctttaaaggaaaccctgcaggttgcagttactatttattcaaagacagcaaagagtcagatgatggtgagatttattcccagggctcatggatttcttaatttatgttctcttgactct

SEQ ID NO: 60972 - DNA, 1109 bp, Bovine  19866881384458
  misc_feature (1)..(1): n is a, c, g, or t
nccctagttccttttcctgcaaaacctattgcctctctcagaagcctttctgattactgcttgttttctttatttttctcaaatgcttatgtatcaagcctacatttcattaatatgatcttgttgttatgtagctttttaattattcataaatcatttgcgagttagtgagatatagtgggaaaaggttcaatttgaaggcagaagacctaggttcatgtttaagctttgcagtttattatctgtgtgggtttaggtctatttgtttgaaactcagtttctttatgtcaaagaataggaaaacctacctatgtactcaatggagttggcaatatgtcacctaataattgcacactacctcaggtttataaaattcttgcatatgtatcttgcttaatccccaaacaacagtataagatgagcactattacccattcatttttatgtgaattacttgaaaatactgtttttaacaccataaggtattattatttttagtctgccgattttatatcatcaatttaatactaacatccctaggatctaggtcatatctatcttttatttattttttattttattcttccctcatattcctttcttttaagtgatttgaagaatagattcagaagatagatttttccagtacagataacaaaatgctttgccaaataaatgcttaataagattgtgtctgcatgttgccagagtaactgattaattttacttgatgccaggaagaaaataataatctaccatttgatcaatatttttactttttaatcatttgtattgctcttgtgcacatattaaaatgttctcagagagcacagcaattttggaagtatagaaataaaacacacatcttctctataatgctgttgatcaaacaaaagactcagtacatgattctggaaagcataaatggtagcctcaggtacagaggctgcaagctgttttgtaattatttaccctactagagggcaaactctatccaaaataggcccttgcctgtcttattcacattcagtattttgggtgcctggttcatagttggtgcacaatgaatattagctaagtataaagtctcccattaagcttatacaaat

SEQ ID NO: 60973 - DNA, 1152 bp, Bovine  19866881394480
  misc_feature (1)..(1): n is a, c, g, or t
nttggtgatggacagggaggcctggcgtgctgcgattcatggggtctcaaagggtcggacacaactgagcgactgaactgaactgaactcgcctgccagagagataacttctgtttacaaggaatgcatgagtaaaaacacaatatcaaaatgacactccttcctgcatttattggtgtgaagtgaaaacccaaatatattcctcaacaaatgaataagggatgaataaacttctaaacttgcatgatgtgttaaagtgtcagaactcttgaagtctgcatcatactacagcctcaaaaataaacataaacatttctctttgtcagaagggagtaaacaaaaataggattttgctaaatccttcagttgttcagatcctatgctgtggtctcgaatcagctcaattccatttccagctgaagtcagctctgcttgatgccttaagcaaatgagaggagagatgaagttgaccatgaagggaaggactgacttgagattttactttccttttggtcaacagagtagccagaggatcagaatgcaatgcacaaaaacacacaaaaaaactgccttcacaaaattccacactcagatcctgtttttccttgatgatccacattttaattactgctcttaggaggcagacttagaatagacctgttcagaatttaccaagggtgcacagggtaaaggtgggaggtagatatgacacaaagagataagcctatctcagatgtaggaaactcttactgataattcaagtaaccctggcccctcacacagctggagaagcatgtcagtcttcccaccaaattctgccagaagacatgcagtggtcagaaaatggtgatttcccttctccaacttttgctttttggtgattccaatcatcttcttatttgtgctacttcctcttcacttttctcttgaacttcaagttccatttgttttgaatatttctttacaattgattaattaaacacgcaagagagatttgtgggtctttcttgtgtttggtattgtacactgagctgtgaagaacacaaaataagtgaaagagattgcctttgacctgaagtatgctatatgattggaaaaaccacatcaaactgatattacacaatggaatataagcaaaagttaaatagtaag

SEQ ID NO: 60974 - DNA, 813 bp, Bovine  19866881407282
  misc_feature (1)..(1): n is a, c, g, or t
natcttccgtctgaaacagatcctctttataagtctcccgaaccttctccagattattcatctgtgtatcttgaaagctatctgtcaaaatggtagggtttattgccagcacttggtcccaatcatcataccactggttagttacaacaggccttgctggtctttctcgaagagaactgttaaaacgtgttactcatggggcatacctcacgtttattttccactattcttaacatcgattctattcttccacctgtcaaggatagtcacttggcctcaaacacaccttgttatttctaccgcaatagctttgttcctgttgtgtctcttacctggaatggcctttctgctcccacccatcttactagattctgctcagttttacctctcccatggagcctttattaaatatccgagctcatagctggttagtcaaagcaggtaagggttaatgctgcattctgttttgataaatatccatgatatctcagcgtctttttatgaatattgctgaaccgagccctctggtcttttaggccagagctgagtatgtttctacatgcagtctgaccatctgcactgtggactaatgcaacttcttgttgtctggtcttcccgagaatgcattatatagattgctgttcatttagaatgcagctgccggggtcgtgactcacacagagattaatcattacgcctgggttagcttcattactttgactacccattacatcttaccgagattataaaatgttgcttttaacttacaaggcctacaccagcatccacttatctccaagacacgcatttatg

SEQ ID NO: 60975 - DNA, 1807 bp, Bovine  19866881475294
  misc_feature (1)..(1): n is a, c, g, or t
ntataggatatgcttcaagaaagtagggccaagcccctctatatcaggtaatttgagggacacaaaaagctctgacatgtgcccctgccaacatgctattgcacctgcaagttacccttttagggccagacttttgcaaaaaaaaattttaaattgaagtatagttgatttgcaatgttgtgttaatttcttctgtatagcaaagtgattcagatatattatatatgagcatgctaagtcacttcagttgtgtccaactgtttgcaaccaactctttgcgaccctttagactgtagcccagcaggctcctccgttcatgggattctccaggcaagaatactagagtgggttgccatgccctcctccagggaatcttcctgacccagggatcaaatgtgtgtctcctgtgtctcctgcattgcaggcagttctttatcctctgagccatcgggtaagttcatatatatttataggtcattctttttgatatgcttttccattatggtttagcacagatattgaatatagttccctgtgctctaaagtggggccttgttgtttatccattctctatatacaatagtttactaatttcagacttccaatcctttcttccccttggcaaccacatgtctgttctccatgtcttggagtctgtttttgtttctttctggcttacttcactaatatgaaataaggtccattgttagtttcattcatgttgctacaaatggtcttatttcattcctttttatggctaatattccattgtatatatgtaccacatcttcatccattcatctgtcaatggacatttaagttgctcctgtgcttagctattttgaatagtgttgttataaacataggggtgcatggatcgttttgaattacagtttgtccagatatacatagggtcaatctttagaagtaaggcctgacctctaaagaactctttgtaaaataccaatgtccttccttgcatgtgacaccaatgagctggtggacatgtagaatggaccagttggcaactgtcagtctgggatgtcaagagcagcctcctgcagtgagaggacataggaccagtaagttttgatgagagcaggaagatgggatcttcgttctatgggctgcacaatgtcaaggccaggttgaaggcccagcaagagggctctggccacctggaatcctcatgaagaaatctgcccaaaggaggatgagaatggtctgagacatgtcttctctctctctctcccagctgccttggatggagaatgttgtttcctacctagatcaataccattgccctttcttaagggaccccatacaaattgctttcttacacctgttctgtagttaacagaaatagagccattaagccgaggccccagaattgtcctaagagatgattatgatactggaaggctcagctcctccccaactccccatctgatattctgatcatcaggtcctgcctttgctggtgaattttcaggactagactaaggaggcagaaacacaaggcctgggtgggaagttaagggatgtttatagccatagaaccaaaatatgggaggaagcaggtgggcgaaatttgcctaggttgcctctgtggatataaatcaccagcttttgttcgtttagggggaaaattcagctttcctgaaacagacccatttccctctagctttttcaatgtgccttttcatggattttgctttcaaatctgcatgaattatttttcttctattaaatattaatgtgtctttctaagtagaaaaaggggcagcgtaggtcaggtacacatctt

SEQ ID NO: 60976 - DNA, 1518 bp, Bovine  19866881612001
  misc_feature (1)..(1): n is a, c, g, or t
nttgtacaaaattgcacaaagtatgccagcatttattatgcgttcactggaaggactgatgttgaagctgaaactccaatactttggccacctgatgcgaagagctgtctcatttgaaaagaccctgatgctgggaaagattgaaggagggaggagagggggatgacgaggatgagatggttggatggcatcacggactcaatggacctgagtttgggtaaactccgggagttggtgaaggaaagggaggcctggcatgctgcagtccatgggattgcaaagagtcggacacaactgagcaactgaactgaactgaactgattatgtgtcaagaatgacttaagtagtttaaatattttaaacattttatccttattataatcctatgtgatgaatacctttattatcattgttttacaagtaagaaaactgaggcacagaaatgtcaaccaatttcccaaggtcatctagctaataagtcacagagccaggacttgaagctaggaagtcagcctccagagtccttgcttttgctatttactgttaccaagggagaaaaaagtgagagagagaattcatgcagacaagcaaaataagataaagaatgaagaacagaaagctagaagcaatactctgaagtattggtggaataaaagagttcatgttgtcaaaagaaaccacaaatgcccatgaattcccttccattagactctgtgcatgaagcagagagtaaatcttgatgccatcactcaaagtagatccaccaatgctttaggttctaaaatatctccatctctcttggtgaaatatctatccttcaaattgtaccacaagtcaaagaacaatgtcaagttaagctcttgagcaatcctattttctccaataaatgcatgaacaaatacattaacttcacgtagaacctgtaacatttcttagaactgtagattttctttagaactgagataaagtaatgtaataaatgcattgcttgattttttttctttacatttttatgtatgattcctgaaattagaattatggacttctgtaaaatcaggcagttttctccattgcaaatattattttatatcactgtagtatcaaatatttatttttactatttcagagtataaacaatgggctaaattgggaaacaaaaatatatgactctttatgccttccaaactgcaaacctagatgacttctttggatggcagtattgactggaactttccccaggatactgcattttggttccagcttgctgttaattacttactcacagtgaaagtgtcacactgctctcctttcagcactttgttggccaagtgtctctggcaataatctctcaacacgtaagcaccgttccctttcatcacattatttaatcaataaagtaatgccctcacactggccaggcccagagccatcttgtcacaagtgctaaataaatgaaacaaacaccagtcgagtttctacaacttctctattaataaatagaatgaagatgcctttaat

SEQ ID NO: 60977 - DNA, 834 bp, Bovine  19866881857062
  misc_feature (1)..(1): n is a, c, g, or t
naaagcaactagatgctaatgtctatcccctccctccatggcaatgtatgatgaagcaaactttaaaatttaaaaataaatttaaacacattcttaaaatagagttccttaaaagtccatgaagtctaaggaagcaaacaaccaacaaaagacctttattgggaaaaaaaatttgcagtgccatttctctcccccactttctcctatgaaagaaaggagaaggcatcaagactaatgattgaatactggggagaagatgaaggtttcgagaaagtgctgggttatataatcgcaccaatagtgcctaggatttttgtgtgatctgcacaacattgcatctttttacctgtgtaaagtgaagtaaaaatatttgaggcaggtcttttgggtgtgtttgcctggtaggagaaagaaaaatagaagatatattttgggttttccagaagtgaggacaaatctgtaaaacgaaattgatttctctcaacacacaccaccgctttgataatgctggtctgaggaagagatggcatggtttttctctctcatctgttcctgtcagccttcccctcacatccggtattttgtaataaaatttccaacagatacgggttgttcaacagtcactagcaatgcattgattaattatgtgtaccagactttcagtatataattaagctaaacaaaactgcattaaagtaatatgaataatttgacttcaagccaccaaaacaaggaaacggagtgaaagcagaatctctgacctcactcgctttagcatattggaggagacaaaaatataatcagagttataaatcatacagctgccataataca

SEQ ID NO: 60978 - DNA, 1455 bp, Bovine  19866880367551
  misc_feature (1)..(1): n is a, c, g, or t
ntgtctgcacttcatgatcacaaaaaatggaagtaacactgagagatggaaaagaagtgcccaggtagccaggttagcaaaaggagccacgagtcgtcaaacaaaaaaaaaaagaaaaaggaaggaaaatcagagacctgggtccaaggaagctgctgctgctgctgctgctggggctaagatgcttcagtcatgtccaactctgtgcgaccccatagacggcagcccaccaggctcccctgtccctgggattctccaggcaagaaccctggactgggttgccatgtgcttctccaatgcatgaaagtgaacagtaaaagtgaagtcgctcagtcatgtccaactcttagcgaccccatggaccacagcctaccaggctcctccatccatgggattttccaggcaagagtactggagtggggtgccattgccttctccagggaagctagggaagagcaaagcacatatgtccaaggtaaccaaactagttgttatattgtttgaccttgaaaccagatcccctgcctctggttgtgatgcccattccagctgcctactctccatctgtccctacaaaaaaacagctggaaaacacaagttgtttaaacttcagtcaattatattaatatctccatattaaaatgactaaaacaaagcaccattttatgctctttaccaaccccccccaaaaaaaaatatttccaagtttcttaaaattccctgatgtggcagagtaagatagccagggtgggtattagtatctccatattagatatgggaaaattgaggtttccaaaggtttagtgacttccctaaagtctcagagccctaaaatccagttcagtaatccaatttggaccgtctctctccaagtttagtcttccttctacttacactatattgaaatttatacatactctcagcttaaccataaattttttctcatttcttaaagattcagttctcaagcatctcttcctaaaacagatataactatcctccaccagtcttcgtgcacatacctgaaattctgggagatgattacatatgatctcaatggatttctataaaagagttgggggaaggtttcatgcacatacaaatccagcagatactacactgctgacgaagaagtagtgttcattgtattatcagtttcagtctgataattcgatatgacgggtgtgaggcacaagcgacaagtctctccttcttaaaacaataattgtgagtctttattcttcaccaggaatatcaaggtcattgtctggatcaaacctaaaagggagcttccatcagcggatgtcataacagataatcaccaatttgacatgctcttgcagaactatcacctgctatcagagctgctatgacagctgtggagtaagacaatgcaggccaattcatcggtccctgggccccaagtgctcccctaatgggtatgacaaacatatg

SEQ ID NO: 60979 - DNA, 1361 bp, Bovine  19866880655623
  misc_feature (1)..(1): n is a, c, g, or t
ncatcatcctatcacctctgttataatctgttctttagacgtgagtcactaagtccagcccacactcaaagggagtagaattatgccctatctcttgaggggaggagtagcaaagagattgtagatatctttaaacccctacatatgtgtttaaaatttatttagcatttggtgatcacaagagtcataattttagctcagagggtatttgcttttacttcctggtcctaaaaggaacctacataattatttaatcattggcacacagctaaagtagacttctaaaattaagatagcttaaaagagtcttagaggttgcctagtttataaacaagggataatacaggcactgaaatttttaacctgtgtgtcttcatgctcaatcatgagatgtgtttaatcatgaaatgattatgtgttaatttattcatcacatgatccctttctccaccaaacagcccattattttgagtattccataatggtctgtatttttagcatcagacccataatccctaaaatcttaatgcctaaaatccagatgtttttaatctctaaactgtcagggtgttactgggaacataaggtaaatgccttgaagcaaaacagtaatgcgtttttaatgaagagtcctttctattttgctgatttctgagtcaagagtttgcctctctagcaatagccttttcataccatcctttgtaatgaaacatatggcttacatcacagtaaaacatgtagagttggaaggagaaaaaacatgtttcacatatgtgccatgtctaatgtaatgccatatgcccagcaaacacagagaactaagacttgccttcagtcctgaaataattagagtaacagactattcttaatttgttttaaatactgcaaatggtttcacattttcaagtaattaacactccattcacttttaatatgtgtatttattattaaaaaaatgcccagtaagttttaatgaaccctcaaactgagacatttagaaagcattagctttccccaaataaattatcaagagaaaaatagttcagctttgactttactatgttgaaatgagcttaaaaaaggaattaaaaaaaaagtattttgtgcattttatgaaatgtgattgtgttttgcttgtctttgtgcttatggtcttgtttttgatgagaaattttcatctgatacattgacagtggtaacttaggaccatttccccctggtaaaacaagaaaggaaaaaaaaggagtgctttcagaaacttaaaaaagatggtacctatgttttttttggtctttcagtttagttcagtcgctcagtcgtgtctgactctttgtgaccccatgaattgcagcatgccaggc

SEQ ID NO: 60980 - DNA, 1003 bp, Bovine  19866880775489
  misc_feature (1)..(1): n is a, c, g, or t
naaaacaaagaatcccctacattcaccgtgttagagccataaaacatctctgagctactgacattcttagtaagatcgaccatacactttggtataagacactgtagacactggtttagcaacacaaacttcagaaaggtagtaccagtgctcctgaatccctcttagaatcagtggagccattcttaccattccttatgtcagactcatgcatccttaatgaaaggttgttaccagcagcactatttagatgttcacttaacattttccacttcaagcctccaggttcacataccatctacttacgcattcaaaatacacagactgtgtatccatctttgttcaatggagtgataaaggcccatatactgacagacaaagtcatgcaatctctgctcattggtaaagatgtaggtgaataacacattatttactgttttctttttttttcacctttcctctaaatggtaatgtactcacaaggttatttaacacagacactatatttaataaaaaagaaactcttagcatcttagcatcttttcatagttaagttttcaaatcagattcatttacatcattcactgctcatttactcattaatcataacttatcacatcagctgtgctgatcatcattaaaagtaatcatttattcttccttctaacctgatgcttatcatgtatcttcaaactggatcataccggaaaggtaattggtttatttaaaaaggaaaatgcaaagatataattaaagtggcaaagaaagggataaatgaaaaaacaatgtcatcattggcatttttttcttctaattctttctcagttttatgttactaaattccagaatacagattctattacctcccctctaacaaatttccagtaagtcaactatgtcaattttgttttattattaaggggaactacagcgagaaggcaatggcaccccactccagtgctcttgcctggaaaatcccatggatgggaggagcctggtaggc

SEQ ID NO: 60981 - DNA, 975 bp, Bovine  19866880820425
  misc_feature (1)..(1): n is a, c, g, or t
ntcttcatttgcagactgaaatctaccccaaacagtaccttcacagaagggacttcttgtttccaaaacccaccaaattaataccatgccacaattctagtagctgcctttaaaaataagattgaagtcacactagacattttcttttaaattttagtttcagttcttctcagcagctcattttaagaaacatctgtccagtctggctcttgcgaagatgttcaaaaatgaacgtcctcatttggatcctaagggactctcctaagggacaggatagtcctttgaaagcaagcaaacactatcaaaatatttacaattcttgaacttcttaatcgagttcaatgtatagtgcagaatatgacctagtttcatccttaatcaaaaaacggcttttgagtgcttccctgacaccttctaagacatcatgctgtcttcatgttaagtaccaaagtagtcagtgaccaatcagttcaaaggcaatcttggtcgagcctaagattacagagaatattacagagaatattcaagattgaacacaactaacctggaatctgagtttttctacaattcatatgcacaaacccacatattagatttgtgtatgtaggtggaaagtgaaaattctccaagttcatgtccacaacacaaccatctcacaaataattaatacataatctaattcttgatgaaaggggtccaaataggtttggttcagttcagatcagtcgctcagtcgtgtctgactcctcgcgaccccatgaaaagcagcacgctaggcctccctgttcatcaccaactcccggagttcactcagactcacgtccatctagttggtgatgccatctagccatctcatcctctgtcatccccttctcctcccgcccacaatccctcccagcatcagagtcttttccaatgagtcagctcttcacatgaggtggccaaagtactgaaatttcagctttagcatcatta

SEQ ID NO: 60982 - DNA, 1235 bp, Bovine  19866880822036
  misc_feature (1)..(1): n is a, c, g, or t
ntttcctttttgtaagggtgattctgagttgctttagcctgacttaaacatctccattgttcaagaggagtggaattaaaatatttaccaagagaataatgggttatagggagagaggatgataaggaaataaaggaaagtttaaaaatgcatttatcccttgcatatataaacttggtacactatgtagcattataaatttatttattagaaccaaaagtggattaggatgatttatttatacaaatgaaatcctagtttttaaaccagtaaattctcatattgtcactgtatagtgaacctttttttttttattacagagacgtaatttttcaggcatccagaatttcaaaagacagtaaaagtgacatacctcaattgcttattttttggcctcccaagaggttacacctatggctaattaaagagcaaagatttcagcccaagcctctcaactgttaaacaacttcagtatctacaaaacaaagaaactggtgtgtgtaaaattctcaggggatttgtacactaagaagagccaagtatctgctcctgcaatactgaaggtcctctcattttgtataattcagaacttggtgtttgacttttccctagcccacatatttgctttggatagtgatattgtacccccaaatgtcagttttcttggttgacattaaaaaattagactgaggctcacagcgcccacacttctgtcgaccttggctgtaactggagtcacagtaaatattgttgtttgttgatattggcacttgaggtgaagcgtgttgagtgcaggaagcctcataggctgtgtggctcacaccacatacctggaacatgtggtttgtgttgtcctcactgaactttctgtaaagggcatacatcttggttttcttttgggaatgctgtaattttttttctgagtcaatttgaagactttttttccccctatccttccataagtttctggcagagttttgagacaggccatgacaatgtttaatgtaagaaactgggaaggcttgaaggaaaatattttaagacctagtgtaggaatcagtatatttatgtgtatgtgtgtgtgtgtatatgtgtgtacatatatatatatattatatatatatgtgtgtgtggattatgtatataatgttttctgtcaggtgttccagatattgccttaaacttgtaaaatacaaggacgaatttatttaacaaacaatatatatacaacattt

SEQ ID NO: 60983 - DNA, 3493 bp, Bovine  19866880891182
  misc_feature (1)..(1): n is a, c, g, or t
nacacattatgttgatgatttttttttttttttttgtcctagggatacttcttgaacagagggtatgctcaacaagagatgacatttaacttatacacactttaatttccttgggtttggattagctgtggtaggtaaacaggtaaactgtcaattactattattaactgtaacattctttgactctcaccccacaatgtaatatcaaaagcctagtgaagctagggagttagtgtcacatattcagtcttaagcctctgctccagttctaggagtatctggaaaacatcttccttctgggggaaaaactaaaatagattcttccaaataaatggaaataaaactattctaaattcaccagaccataattatagacacaaaattataaagtataatactcggtgttcaataaaaaatctagtcaattattccaccacaccagatcagaccatctattcaacaggatcataagttcagggactgtttcaagtccaaccatttccctttgagatgagacacaaacatgtaaaagtattccttaagcatcaatcctgagtgccacactgtgccaggcactgcagaggactgcaaagaatgagaacactgttgctaaactcgggtttacaaactgtcaggagcctcctggtctgccctaggactgggtgatggctccctcagaccctggggattaacttctgcaacactggaagaagtggacaaaggtgtcccaggacaaatgtccatagaagcttctgctgatccagggcgcttttattctttacaggaggtacctgcagtcacctcatagtcaggtgggcacttcagggtcaatccctagaaagacctactagaatcttgggcaaggcctgatgatcttccttgaattaacatgaataatcgtgtctgacctttaaggccaagagatactgtattcccaagaagcctgagataagtaaagagaaacaagcaaagaatcctaaaacccagtttatagaggccagaaaaggaaggagatcgtgccaaaattaagctcggaagcggctggatacatatcaattccttgagcctgtgtttgcttacagtatctcctgaacgcattcctgcacatcacagacttgttattgatccgctgtggtcagatattgtaagtataaattaacctgctccactgaaaaatgcccacaggagccattccactctgaagaaatcttctctttaggtttaactgtaattacgagaagaattcaatgggagggtgggggatggtgagctctgatttccctgatcacttcttacagccctgattaaaagagtctgtagtacatgaccagctccatgctttgcctcggcacaccttcagactgaaggaatggcacaggaagtacaatgtattgtagcagccagcaatcagctgtcaagaggcgcttatctaaagaatctcaggggttacggggctgctttttaatcaactttggtgatttctctggaaagctcagaggtggtttctgaagcccagggtgaggcgactgttccatatgagttaaatttatcagttccaaggataatacccttaggagataaaggtactaagtgaaagaagagaaaggtggtcaggagatctgcaccccaactgaggaaaagaagacgccaaaatatttaccaaaaatgaaaggcaggtttttaacattagagtacaactaatgagtataggaaaatagggagaaagcattacacaggaaggaataaatagtgaacctctgtattttgctaccaatttctaaacttttaaaggtcacacagagcactatgctaatattttgcaataatggactccagggcagtgctttaattaaatgaattccagagctctctgaatcttaatcagactgtgcaggggatgtggggaaggtcaagctgcagagcaaatgatgcaagctatacttacacattacaccgagcaccctttccccaaagacgttcagcgctttaactttaacgtcctaataatttctgacaaggtgagaggaccttccacttcactctgtatgtctaacaggtatgtccagcaagtatagcaggcccatggtcagtccaggagactttccagtaaatcattttatttaaatatatggtgtttgctgccaacattgttgatttcttttaataacatggctaagacacgtgaagaaggctgagtgccgaagaattgatgcttttgaactgtggtgttggagaagactcttgagagtcccttggactgcaaggagatccaaccagtccattctgaaggacatcagccctgggatttctttggaaggaaagatgctagagctgaaactccagtactttggccacctcatgcgaagagttgactcattggaaaagactctgatgctgggagggattgggggcaagaggagaaggggacgacagaggatgagatagctggatggcatcactgactcaatggacgttgagtctgggtgaactccgggagttggtgatggacagggaggcctggcgtgctgcgattcatggggtcgcaaagagtcggacacgactgagcgattgaactgaactgaaaacatgcccagtatactcctttcaaggataaacatgaagagaagcctcaactgatcgaaggctgagatgaggatgcatgaaaacagaaagactttatacatcctcttcatatgaaacccaacagcctacatagtcagaaataatctccaaatccataagcagtgacattttacctcgaaataagtttcctctataacctttgcccatttttctctagcccactgaatctcaccaatcctagcaacaaatagaaatgctcataaaggttaagaatacaaaaaagcacttataaaatgactgtaataatgtgttttaaagtacagtgacattcagaaatgaatgtagaatgatgtaagtagagcataatcatacattaattatccaccacaaaattcgagactcttcctaatgttacaagtatcagttgctgccatttttactgcgtgctaggttctgcgttagggcttccccagcggctcagtggtaaagaatccacctgccaatgcaggtactcttgcgttgtatctcctagtgactactctgtgagtaagtactatttagttccacttcacagattgagaaactaagacttgctgaagttaattcgcctaggataacacaaggacaaagctggaaattcagtctcaccacaccaatcattccgacactgcctcaaggtgaaggctactgtagcttgagtggccactggcttggtctcttacactgctaaggtgacaaatgactccattccattgtgatattgcagtactggtctgatgactgggttatacaatcataggcctttcactcatattttattcctctagagattctcagacagggcaggagagaaggtaaagaaaacatattactttccaaacaggaaaaattaaaaaataaataaaaattt

SEQ ID NO: 60984 - DNA, 725 bp, Bovine  19866880917664
  misc_feature (1)..(1): n is a, c, g, or t
nacttatcactatctcagtaatattttaatcagagtccaccttagaataaactgtaaggtctttttagttgttcagtcactaactcatgtccgactctttgtgactccatggactggagcacaccaggattccctgtccttcactatctcccagagttatccttttagaacagaccaaacgttttagtggcagaaaattgctacaaaatcagtttcttgcaggaaaaatggatgacatcccaaagtcaaagtatctgcagcaatttctgctattgttcaccatgttatatgtaagatctaaagaatagcagtatatcttcctaatgcactgtcactttgaaaaataaactcaaacaaaatgtacagaaagaatccgccaaattgcacataaaaaaataaaaagacattttttatctcatatgaggtagcaaagaacctttaacactgatcaggaaacacatctgaataaattaagtgccaaactacctgaatttttaattgccaagaaatattgaaaaataaaatttaataatattggaatggactattttatactttctgggagggtatgtaagtatttgagaatgaacagtattctacaatagagactagtgaaggccagtggaacagctgaactttaatattaatacaatatgctcttcatcaggctgacactcagatgtaagaatggtctcactaaattataatgaccctcacttatcaat

SEQ ID NO: 60985 - DNA, 1111 bp, Bovine  19866880964281
  misc_feature (1)..(1): n is a, c, g, or t
ntgaaggaaaatatcctttaataaaatggatctgccttgcttctccatccattctgcttatcttaaaaagctagttagtaaatgctgcagttttttctatgtaagttatacctatagtccatgtgtatttaaaacgcatatttgtatttgcaaggaaattactataaaagatttagcaagatttaggaattctctttgtgttccctagaagatagggaaagattccatatttaaaagaccaagtactgccaggtgtatttctttccttttattcctgttccaaaatgcatgccttcaagaggtttttttttttttttttttaaacagactgaacttgactgatttaagatgttaatatggaaggagtacatatttccctaatttttaaacagatttgtgcctctcacctatctctaataaggtaacaaatgtagtgttaatttagatgagttatactttctatatgagtttgctaacagaacttgacataaaagccgttgtgaagaagcttgattggtttggttaccatagcaacactgttgaatggaagaatgatttcctttaggaacctttcctaaatgctgttttgtaccctataacgatattgctggcttgccatcccttgtgaggaggtaagaagagatgacttcgagggtcagcatggtgtctcgtgtttatagattatcctcagccatcaaaagactgcttggctcatcttattcttcccgttgctgaaccaattctgttcttcagtatactgtgataataggagtcttgaacagacttttatgtcttagaatacacaaaaggaaaaactggatctagaccaacgattatattctgttaagctcgtttcctaaagctaatgtcttgttatggatttttaattccttgcttatctttgtttgaaattctgcagtttatcaataatttgtcctgtgagtgatgttatcctttggaggagactaaagggtttaaccaacaaacatcagcaggggcttcatttaaaattctttagtggtggtttggtattctggagttactataaaccctaaggcttacatatgagatttcctttgttatagggtaaatgtctgctctattagcacag

SEQ ID NO: 60986 - DNA, 876 bp, Bovine  19866880966218
  misc_feature (1)..(1): n is a, c, g, or t
natgtttctttttaaaaatcccttattatccaatgtgctatttcaaatagtttgttttccagatttcactcactttttttttttttaatcactgcaagtgacattctcctagtgtttattttaatggaaaccatgtaattttatcttcataccacaatattactttcatttaggaaactgtgctgccatcagtaaaaatgcatctaaattattattttctgtattgtagtaaactctcaaattccacttagaaaagaggtcagcaaagaggaatcaaaagcagcttttctatttcagaactttcacaatcaccaagcaatcactttatcgtcatgaggtacttaaattcatttcttctattgactatctccctctgcaaaaagtgttattcaattacacagttccacagcacactggaggtcagttgttaatagcaaagatgtattatgatgtgcttttattatttctaaggagtgggaaaaaataatacattctaatacagagcttcagtcatagtcaacgttttcattcatttgtaaaaaaaaaaaaacaggcaactgaatcgagaagtacagagaaggctggggaggagacttttttcatgggttgtaattagagaaaagtccttatttttaacatcactaaatagtaaacaccaaaacaaaaactgaagttgcattaaatctgacataccactttcaaatcaacctttgctcagtgtttgagttgctagaccactaatcatgtttatttgaggtgtctcaatcctgtaaataccactgccttttggtctgtcaatgatttaatctaaattgaaaataagaaacacacaaggtgggggatttctagtgaaggtaaaacttttctttgtaccat

SEQ ID NO: 60987 - DNA, 903 bp, Bovine  19866881031436
  misc_feature (1)..(1): n is a, c, g, or t
ntgttgttatatctactgcttgatgaagaaactaaggccaaaagcaactgtctatagtcacaggccaagtggaatcaggttccatgtaccctttccattggttggtgttacttgcagtgtgtgtgtgtgtgttatagaaagatgaagaaaatgcctttcttcttagttgttttcttttcccccaacacctggttctttgaaatgtaatatgtatagaatgtaagttactataacactagttgttgaatactgatatatgagtatacttttgccaaagaatcattatttctatgacaactgctatgaaaaatctatggttaaaaaaaaaaaaaggtattccttttccactggcatatctattatatgtctttagtattagaaaatggggctttcaaaacatattttggttattgcagttgccatgagcttaaaatgactgtaacacaaagaaatgtcagctggtatgatttccttcaaaatatacagagtacagctggcttcttatttttgtccattctaaagatactgtggctagcctaatttgtacgggcccactggatcatgcctaattgagttaatgaagctcttctgtaacaagaaccctctaaaggaaaataaaacacaatgaaatttcaaaatgcaaattagcccagctttactgggtttcattctcatgggtagaaggcacggtaaaagaaaatccttaaagccaattataccacatattcaaagatcaggtttacctaaaattgtcacacgcgtgttgcgtgtgttctgggcagaagagcccggtcactggctgcttgttgtcactggagcctgcctgggatacagaaagcttttatttgctgcttaatcctaccggcttgattatttcgtgtctgctggcatcttcgagaattt

SEQ ID NO: 60988 - DNA, 823 bp, Bovine  19866881114224
  misc_feature (1)..(1): n is a, c, g, or t
ntttaaaacttaaacacccaaagaaatattctgttgcgatggtgtcactgatgttcagacttgttattatgtttgtgaaagttaattatttgataagataccctgcggttattactaccaccaagaaaaacatgtgtatgtttattaattcaaagtgttccattaaaataaagtatgctaactaaagaactgaacaattattttctaattattactgcacaatcatttgggcattttataacagctttttccttttcctgaatgaattatactttacatttaaaactattcgcattgatagtgttttattttaatagaatttgctatttttgtgcatatttttactctgaaggatttagttgtaaatctagtgtttgaagtcaaagtttcttcctcactgaagaaaagtgttaacgtgtgagtaaatcattaaacatcttagaacaagaacctacaactcaaagggtgactatgattcatgttgaatattttaagtattaggtaaacattcaatgaaggatggaatcaaatggtttgttcagaaggaagagcaagatatttccttattacttcttccatttctgttgtcttacaggaataaaccatacatgtcttatgtgagagaaagaaatttgaaaaatgaagcgtgtaactataatggagttaatgtggcttcttatcccacagccctacagttgtcactttctcataaaatccaagcaataaagttgaaattagatgttgtcctttcacagaaacttccttcctgcaaaaatacctataaatctggggtctaagacaagtgggagggaaaatacatgca

SEQ ID NO: 60989 - DNA, 1536 bp, Bovine  19866881248335
  misc_feature (1)..(1): n is a, c, g, or t
nggtagatttagtctgcaaatgaagatgtgattagacttggttcatttatattggcctgttcctcttgtgtggccatagttttgcttgacatttttgagcattaccagttctatatgcttctctgtctttcaccttagtaccgtacttatacaagtctaccattcagtcagcttcaaaataggccatttatggtaaaaatcagccccaccagttgattgacatcatataaaacccaaaatattggctgatttccaacttattcctgatgtgtctgttgccttgagatagacacctcacgttcagtctgttacacatgcagagtttgcccacaggagttcttctggaaccccaacagaatggaaatgttgtggctgtgagtattttaagctcctggctgtcagttttgttcatggaaccttcaaaagtgattttttttttcccccaaaaactttaataatagtaaaggaagacagttggtccattgggctttcctacttctccagtctcaccaaaatataatgcactttttcccccactttctacatttatgcactgcttcgtagaggcctttttatttcctttaaaagatgattcctttcatcttttgcctttgttttcataactgccaaagaaaagctttctcttgaaggctccagaatataaggatgacttctttttaaagcttgatccattggaataaaaatacaatgcttttgcctttgaagataccaagacagaagggtattctgacatccagcttctgatgccaacatggcccactcccagaagagctgctttacgggggcagaaattcattcagaacaaccccagactggggaaagctgatcactttttttctgtttctaggaccaggaagtttgtgaatattgtttgagcacatgcatattaataatatgcccagagagagcagtaaaattctttgaatgaaaacattcattgtgaagtaaatgaatgtaattataattcataggagcacttttgtcaaagtgcaatttgtaacccttaatatcaaaacacagcaggcatccttaaatattgttcaaaataagtctcttctacctaaataatttcctattaatcaactttaacgttactccctaatttgtgtaatgttctacttgagtgtatctaggataactataatatactgtttatctataaatgatatgattcattgtctttgatttaagacagtgaaattagttcaatttgaggttagttaaaaagggagaagtgagtgaggttagtgtttctaagcccagaacaatagttgggacattattctcaatgatttcttctgcagtgtggacttctagggtaaggcaaggaaggaaagagggtgatgggcatcatggtcaggagaatctcagttgtaatctgggttccaaccttctctgacagtgaacaagttattagcttttcttattttttcttattttctgtaaagtaagaatgatttgtaaaaaattgttgtgaggagaagtagcaatatacaaaatatggttcttgcatgt

SEQ ID NO: 60990 - DNA, 728 bp, Bovine  19866881343017
  misc_feature (1)..(1): n is a, c, g, or t
naatttcttttaagtttaaatgatcggggactccgagagcaccattacaacagctgggatcttgtaccaacatgctacaccctgccagtcctgccttctgagactaataaaagagaaaacccttgacagctaacagctgggctccttatgaagctgttcaatagaaacgactaggcctcccaccgcccaccaaaaataagggcttggtgcatagacagagaaatgcacgggagaggagcttcggtaaggggaagtgtatatttcaaagagaactgaaataagatgatgatgaatagcagggaagaagctaatcagtggaagagacaccctgtcacattcaaatctggcacagctacccaagatgcaggagtttcagagctgactgtattgtcactttgattagtgcaaaaggattcatgcatgcgttttaatccagccaggatcactgacttctattacatactatgagctacaactggaggcaaacaacaaccctctcagtaaattcatgtagtcacggttccatccaaaccacaataaacatcctgaatactcttgcgatgacctacagtttgtattcacacttgcactaaggagaactactctgaatagatttgccattgcttcctgccaactcctctgcctccatattgatgtccttcctcagatgggctttgattaccagcatcaactcccctagtcaaagccacgtcacagagttcttgtca

SEQ ID NO: 60991 - DNA, 1390 bp, Bovine  19866881393984
  misc_feature (1)..(1): n is a, c, g, or t
nagtgagtgagtatatgtgtgtatgtgtgtacatgcgtgtacctcttgttatttaaacaactcatgggacatagctgaaaaaaattcactgggactggttttatgaacaatacactcctggtgtatattggggaatggtcataaaaccaaatgaactgatgaaaagcctgcattctagttaacatcagtttcccttcccctttcaactctggaaatagaccaggaaaccagttttctgtgggaaaaatgttatgaatcctgaaaactccttatgtctctaaacctcctttgtatgttcatgtactctaatattacaggataatcactttactgcaatatcctcagaagaatttggagatttgttatttcctggttaaaggtttcattatttctcctggcagaaacctagtcagaaagaattcattggctgtttaattcttagttaatatcctttgaccatttaaatctgggaaattcatttgcaaaaataactcagcacatttggtgtttttaaggactgcagtaaaactttactgagtgacctggtaccctttaccaagagggacttagtttgaaatcatgtgaatgaaaaacacaaatatatttgcatatatctttaaaatttacaaagttcaagatcatgtcatgatatgtggcccatgcaaatgtattttaaatgtatccttttaattatgtcattcttgtccctttccttaccattctgtttcactttttaaataatttgtattagccaaattagaagaaaaaacctaatcagggccttgttccaaaaagtcaaacatgaataacccagagtaacttctatgtcaaattaatagttcattagaactaaaggaggcttatctacctgagtgagtaaacatcttatttttagctgtttttagaattttatgacacactgacacacacggacatttacaatggtagagtatttctcctattgtaaagaatttcagagcaacaataaattagcttattaaattaatctctaaatagatttacatattttaatgagcaaatagtctttggttattttggtatttttttttgatgactctttttctgacaatagggcaaattataaaaattcacatttgcttccacttacaaaatgatagaagtttatcaggaaaaaatgcaaaagaactgtcagatctcacttgacatttttttctggcaatgtttgctaagaatgataaccctcagtgacatttcacattcacaaaggagacaggcatagacaaagcttccaggggtcatcattttgtcctttgtccctttaacatttaaacactacaaacaagcgtctccaacttttctcagatgatccagttcttaaagatgaaggcaattcagggcatgggatgga

SEQ ID NO: 60992 - DNA, 1422 bp, Bovine  19866881750361
  misc_feature (1)..(1): n is a, c, g, or t
ntctctaggataaatattgtaaacattttggtggatattcttacaggcttttttctatgcatgcttgtttaatcctactctcactcttaaagagattaaaaaagcttctttctaccttattccccaaaagagatatgctaagaaaggatataaaaattgataattcgtttgaattttttgaatgaattcagttgaatcctttgtgtctttaaacatgttggctcaagaaaagtgggtccatttttcttttaaataataaaaaaccagaatctgagataatggattatatttatcataagagtttaatgaagaataaaatgaattatctgaatgttgttaccgattcagattctgtagttatgtcaagccacaaaagcctttgggagtatagataatactctagctagggttcacagtgtccagggccacattgataaagcagcagtgagcttgaaattgatattgatttaatgcccgagcaaaagcttcagaaatctgaaatgtagttctaaaatgtaaacttgaatgcattctggatttattttatttttccttattttctctttgttcttgtttcttctacaaatttaattttttaaattattttcctcattgtttgcataaatgtaaagtgttctgaattgtttctggaacaaggcatgtatattaacaaatatgtaagtaaacagacaaaaccaagagtaatgtagagtggggataatgtttggtttccttgaactgaaaggtgattggtgagaggagaaaacttactttaccaaaagaggaataagagaagtttagatatttggatatcctttttgccttgatgttttgtctcctttctttctagtttcttgactaaatatggatccctgtagcattcatattattgagtgctagcacaaagtctgttgttccaggattaaatctagtaaaacaaacaaaatttccacttaaccccttacttagaaaataaatgaaaagtaggaattgataatgacagcaatgagtaatttattattgtaatttagaaaatacactttcttatccctattacaattgatttctttgagcaaagacatctaccatttttttagtgtaattaatagaagccataaatctttgcaagctgtttctgtagcagtacagcaatataggaacatgaggttttaggatgacatcttgttagatatttagctaaaaattgcttgcaccatttaatgaaagtgccaaatggagtccacccacagcaaactaaaactaaaaattaaagctatgaaaagtttatttggtttcccaatactttacatagtgaagctatatttttcttaatagttattattaatttatttacatttatagctaaaatgggaattgagatattatagcattacttaggtgttttagtctaaattttattaa

SEQ ID NO: 60993 - DNA, 884 bp, Bovine  19866881876828
  misc_feature (1)..(1): n is a, c, g, or t
ngcagcatttcctgttgctgtcaggcagcaatgttctctttaaaaactccacatctttctctaaagacaggcctagaaaagccaggccctctctcctcactgttcagtctgcatttcaccctcacctgctgtgtgtagaggacgttatggtacgatgctattttccattggctctgctactggagattacagcatgcgactgtgacaaatggatattcccattaaattctttagtagagtggggcattccattaaccactggcactatcccaacccaagtgaaacattgggtcattttttttcttgtgagcaagaagtgaaggaggaaaacaaaggatagactctaattacctttcctatttttttgtgttgcatgcattatgatagccgtatattacaattatttataattaatatatgacaagctgtcagctaaaatttaacaggtgatttgtcaagaagttgcattaattcatacatgaagctgtggatttcagtatctccagcaataaaagtgtgtttcggttttgttgacttaaaccattgtgtttaaatattgtgtttaaatattcgaaggccacctctctatatatgtgcagcatctttaaaaagacaacacatgctaacacaaatgggtaatttgttagtaattttaaggaataagcacattcttctgagactttaacctttaaatgctaatgttttcactgaagaaattaattgccttgtgtttattttgaaattttaaactttatgatttgtacacattttcaaacggtgtctttggtagtaaaggtaaagctgaatggtgagaaaagtaattgccatgacttatgttccatttagggtttgtatcttacactagggaattctgaaaataaaga

SEQ ID NO: 60994 - DNA, 1386 bp, Bovine  19866880126665
  misc_feature (1)..(1): n is a, c, g, or t
ngaaaatcccatggacagaggagcctggtaggctgcagtccatgggatcgctgagagtcggacacgactgagcgacttccctttcacttttcactttcacgcatcggagaaggaaatggcaacccactccagtgttcttgcctggagaatcccagggatgggggagcctggtgggcttccgtctatggggtcgcacagagtcggacacgactgtagtgacttagcagtagcataggattgagatcaccaggcaatttgacctaactcctgacctatgctctcctgagtacacaccatgtcttgtctaaactgttgattcttttcctggataaaagaataagaatgaagaattaagtagttagagaatgactagctcccttccccaaatggctcccttaacaatcctgcagtcagatcatatgggcaagataccatgtagagatggatgtagactccatccttctgattaaagcatctttcctttctactgactcttgcctctcaaattattaacttttgagtaatgaagagccaaacctgaactggataacattgattgctaaagtacagagaaaagtgtttaggaagagacgttagtttttcactattctctgaaagcaattgcatcatgttaactctatttcctacttatgattttgtttcagtttatcaatgatgttagctgcacctaggattgtttgttgaagcttattaattatgaatttgatttttaatagcattttgatttatttaatgattattcaagtttcctgtatctttttgtatcattatcaatagattttggttttatatgaattcatcattttatttaaacttgcattgctatattgttcataatacctttccatcttttcagtagccagaaggtcaacacttatttctatttttcattttctacattggatatgtatacctaatctctctttttctgttcaattatgttaagatgttattaattttatatatattttttccagaaagctttttgttatatattacatatttagtttatattttattaatttcttattttatcttcattattagcatcaattcattgtttaaaaattaactttaattttctatgttgctgtcatatatgcctgaataattaagcttctaattttttttttttttcctgatatataatgtcagtttcaaactgagtaagacccactgggctctggaatctgcattttaattaagtattcccaagagattcccatagttcctattctgacattcagtcataaaaatatatgcatacacacaggtatttacagaatatgcagtaaagataggagcgatcaatgatttcactatgcttctcacagttgtcaggaagggcttctaggaacctaagga

SEQ ID NO: 60995 - DNA, 862 bp, Bovine  19866880419076
  misc_feature (1)..(1): n is a, c, g, or t
ncttctcaccacaatatattttaatacactctactgcattctctgttggtgaatgatttattctctttatttttcttagagcaatgggttatattctggagaaagtcaccaagggagtgttaagtccagggagaaatgtaatgacagcatcaaccacagtgaccaaaatttggtcttggaattacaaagacattagagtgaaatttatgagataggaaatagatatgctgcgttgttctactagggtagaaatatgtctcagtataaaatggaggcttggaggagggcattctcatttcttccttgcttgggcaagagagaattcctatgaggacaaattttacctaattcaaaaagcaagcatctttgtttacatcatgtaaagctcatttctggtgatgattgtctctcaccttaccaatgagtaagtaaaagtccaactgctttgctgcttgcactggttgatttactatcaaagaaaatgtaaaatcctcacttttaaaaatgtcaggagaaataccctaggacttttaaaagatagaaacacattttattatcacattcttcacttggccattctcatgaacagtactatcaaataaaaagagttcagtcagcaaatagatttcaaaatatatttttaagcataaggagagttcacatctctttaactattttgaacacagcttagtaagtgaatacattattttcacactctcaaagtatataattatgcactgaagaccatagcatgaagatttaaattattcacaaaaggttcttggaattgcttacaaatgcattacctgttctgtgattcagttatgcagcgtcaaacttattaatgttcctattaataaaa

SEQ ID NO: 60996 - DNA, 2729 bp, Bovine  19866880466618
  misc_feature (1)..(1): n is a, c, g, or t
ntatggatgtgagagtcggactgtgaagaaagctgagcgcggaagaattgatgcttttgaactggggtgttggagaagactcttgagagtcccttggactgcaaggagatccaaccagtccattctgaaggagatcagccctgggatttctttggaaggaatgatgctaaagctgaaactccagtactttggccacctcatgtgaagagttgacttattggaaaagactctgatgctgggagggattgggggcaggaggagaaggggatgacagaggatgagatggctggatggtatcactgacttgatggacgtgagtctgagtgaattctgggagttggtgatggacaaggagtcctggcgtgctgtgattcatgaggtctcaaagagtcggacatgactgagtgactgaactgaactgaactgaaagccattctgtttcactagtccatgctaggtttctggctttcagtgtgattgtgagaatattggttttcaaggccaccatggaggtgagggaagggtgatgagaaaagggcaagtaaaatgccataaagactttcattattgctaagattcagctatctttcttgaataaatattccacgatttttcaagcctctgactaatttacagactcctctaaaaggagttaattctgacagcttttgataatgttctcactgcttttaagaagaaatgggtttttggaggtccttgctccaccattcccactgatacagaaggttcacatactgagatatggagaagtcattctgacttttacatgagttaatgtgaattttatacctgtttgtggcttatcaaataagcattgtacatttactttaattattaaagaaaagggtacattggccaaaagtaaagaaagtccatgctataaatgaagagtaaatgctggggtctcagtgctggtactctactgttgagcagacacccttcccaagtaccaaagccatactgactcactgtgcacatgctgagcttcttttttttaatctttaaggaatgtatctctgccttgttttgatgttctttgttctgacaagacagaaaactgtgttgacaaccatgcttcttctccagggcagttcctcaaagtcatctgagaagctgccttcaagggtatagtcctcagttgggctcatgtaaaactctttcctatccatattatagattgtttactgattattttcatcaacaccactgatctcattcagtgttttttattattaaccatgatttgagtacaggtattcctacatgttaacattcaagagagaacctgatgggaaatcaatgtgattattagttagcaagtaatttgggaataatctactgaacattctttgtttgtcattctgactttcacatgacttaaaccacagaaatatgcttgcaaataaaactcgtgcagtttaatagacatgaaacattcatatcaaaactatctttttttgaggcagaggtgacagaccctatgcatttctgcttgcccctctttctgcttgtggacaccctcaagaaatcctgggatttattggaaaataaatgcagtctgagaaataaagtaacagttgaataaagtgggtccatgaaaagatgtgatgggaaggtggcttccctaacatccacagatggagatgtaggtactagaatttctagtccaagacaatgtatggaagcagtatactttcaaggtggaactactcattactcatctttttatttaagaatattatgagacaatatttctcattgttcagcctgcctgagtaaacattatatgactacaatcattcttatatagatagtacatttgtaactaacactgaacaaaagtatccataacaagctggatgaaaaacacaaaacattcctttattttcaaggccactaaactgtaaatgaaccactatttcaaattgatcttgggaaaattgcttatttagctttcctgttactttgttttcctgttagtgtaataaagagtaactgaaaaagcagtgatgtttaagagcaccccagcacagaacaatagaaaacatatttccctgcacacagagagatgagtgagatgacttgcctcaatgctaaagagaaataaattaattggtcttattgaagtctttgttttctgttgtttttttcacatcagaaatgccaaatgagtctgacatatatgtcagtctctctgttttgtatgagatagcacttggatttttaatctgcagaaataagctttggtgtgttcagtgatgccagtcaaagttgtttttatttatttttaaagcattcaatggaaaagtaatccacaattctctttcatttgccagatcttctaacgtctgtatttctaaattgggagtttatatcttcaagaaaataagtaactcaaagggagtgcattttaaacaccacagtggtcagagagaacatgagggttttgcagtgtgctttctctatgcccatatgagataaaatcatgtctaagcacaaggctctaaagtaggaatcagcgacaaaggtctgtgggagaaatccatcctggtgcctgattttgtagggtccatgagttcaaaatagtttatacattttaatggtttggaaaaaaaataagcagcttatttggtgacataagaaaattatataaaattcaaacttaagtttccatacaaagtgtttattggaacaagtaatgctcattt

SEQ ID NO: 60997 - DNA, 1690 bp, Bovine  19866880638112
  misc_feature (1)..(1): n is a, c, g, or t
nctcatttcagagatatttcatctttgtatttatattctctagctaccccccaccaatggaagttgaaatatatttgagagatatttggtattgtctagagactagtcttttacacccaaggatagaacaggagtaatgcaattacggacacttgatttaatgtttggagaaaagtttccctagagagttgtgttactttgatcaaacttaatttaaacaatagaatcatctggggctgatttctgtggccatcaaattaaaaagaaaatcagcttgtttactcaaactctacctctaagctgtgtcacttcatttaagtaacagtagctgcataagcaaaaatatattggattttttattaaccctaattcatatattcagtatcttaatcttaatcctgaagtacttaggttcagcaagagttgctaaaatgaataaaattcattggatcataaaagaagatagaaaagttaaatgatgctgaaatacattttatatgagactttcatttttcaataaagcttccgaaaacatgcctatattctacaggatagaatatattacagtcacattggagatttcaataacttctaatgctcacaaaagattatttaggtgtttataactgaagggaaatgttttccatcaaaatctgctgaattatgttttccaggaatatctttccaatacaatcttcacacagtgagcaaaaaagaaaaagctttagaagacaatctatcttggaaagaataacagattttactgaaggatcttcatgttcttaattcttatatagagagtttttcagtacttgaaaatctgcctcaacacagacacaattgctgtttttcccttctggtgtctgcctactgaatgctattttgtgcttgtcaaccacatccaagtgttgtcagccccccatttgtcaagggcacaaattctacctgcaagcctttacagcttcacctcaaaaaaaaaaaaaaaaatcgcatttccacgcaactgtaatggaacttcttggtatgccactttgttttcattgtttcccaaataaactgggatggattctgagcttccagtagaaaataaattaggatgaaccatcacagggtgttacttggattctcaaggtgtgccactcatcatgtgctaccatcatttgctaccaagaacactgatgtacactttaatggtggttgaaatttactgagcacttactgtatcccaggtccagtgctcagcattttatattttaactcatacatattcccctacaaactctaggaggcatagatacaatgattatgctttgaaatttatttaatattattactggaaagaggtttagattaattcaaagaagggtaacatctcatttatcaccggcaaaacactgtagcttgatcttagagcttctaaacatccacattgatcccccacctagcattcacttattctttttggttaaaagtaagtcagatataacatatcccattttgaaatcacagtgtacaggagcatagattaggaagaacagagatgcagactccaatgtcaattctgtcaccaccctgtatgatcctgcattgatggattcatttctttgattcaatttctgtgcgtgtaaaatagttagatatttacttaaaagagtttttgaagatttaaaagttaatgatatataattag

SEQ ID NO: 60998 - DNA, 4015 bp, Bovine  19866880673450
  misc_feature (1)..(1): n is a, c, g, or t
ntttcaaatgagtcagctcttcgcatcaggtggccaaagtattggagcttcagcttcaccatcagtccttccaatgagtattcaagattgattttcttcaggattgactggttgtatcttcttgcagtccaagggactctccaagagtcttcacccaacaccacagttcaaaagcatcaattctttgatgctcagctttctttatagcccaactcccgcttccatacatgactactggaaaaaccatagctttgattagctaattgacaattaatacctcaaagtgcatgcatacatttttatatccccaatcatataacaattgccttgtttaagagaatctggtcctcattcaatccatagttcctaactcatgactttatgcagctcagggaacatataaatattcattcctttgattaacacacttttgtttataccacatctgagtttttaaaataaagtggcattatattcactgtacaggactagttcccaataattctgacttaattaaattaggatgagttccaggtattggtatttcaggtcattttatatatatatatatatctccagggttaacaatcacaactttcagcttggccctgaatggattaagtctttaggtgacttttttttaagacaatggggatttccctggcagtccagtggttaaacctctatgcttatacagcaggggttgagtgttcaatccatggtcagggaactaagatccctgcatgctaggatcccacaagctgggtgaccaaaaaaaaaagcatttatcctgctatatttacttgctcctggtaaaaatcaattactaccccttaaaaaatatgctcagtcttttcatttattaacatcctgctgcaccagtcagtcagttcctgtttcattcctgttctcaagcagagatatgtgaactctctggttctctttatacttcaaatgcaaacaaatcctttaaaatcaaattgattcagcagagaggaagaaatagtgtagagaggtatgttgatatttttataacttctaagtgaacaatccattttaaatgattaattccattacactgcaatttatgtctagtgctagctaatgaaacaaattagtttcaccatcaattcaatcctcttccttttcttacatgctcttattagcttcatcctgaaagttttgctacaataatttctctgccacaccagttgtaccattactggactttccttattgattactgaaaattcagatgtaaaaaagatagatgagcaggaagttggctaccaggaccagtttacagtctggggcaaacaagtcatcaacaagatatttattctcttgtctatttattatctagaggaaatggtatatttctgaccctacatacattaaacagctctgacagataagtaggttctaaaacagttttcgggaatgatttattgatttattccattaaacaataatgctaaaaatgttgcaatacctttctgtatgtatagtgctttctcatctactatctttaatcttcatggaaaacctaagaatgcagaaatgtagacactttaaatatgttctattaatgaagaaactatgagtcaaagggtttatgtaagtgaccttaggctccttagtggaactagacttttcctttccccattatccttcaaaggcaagaatcataaatcaagaaggtggactgggggaaactgactggtaagttgtgaagtaaagacagatgattctttatcaaaaagaactatctcatccatcctctcaaatattggaatgggaaactttaccctgaatgttccactgaatgcccacagtatccgaaatgcccacacataaggtacacattgtctgacatatcaagcaatgttttgaatacataattcattgagtctcatggaggcaacatttaaatccaatttctcccagatgcacacatcatattaaattaatatgtctataatgttaggcaacaagtcacataagtctagcataaatacattttgacagtcaagggaagagtggattcaaaggctctttagaaaagaaaccagaggaatattgaaacaagggtccttggagttagtattcagagaagcaggatggaaagtgggtgatgcactagccagtaccccaaacacttcaaggaggatatgggatcagtatttcttctccattatctgcagcgtgccataccttgagagcatgaagtaatgtaaaggatatcaacttggcaataagagaggcaaaattcctttcatcactgtatcagctgaaagacactgaaaagttgtttcatatttctgaacctctgtgtcattatttcagaaaaacatgtggccattgattaaatgaactaagaagattttaaaagttccccagaataatgagtgctcaaaattgcttcccccactttcccatcttcctttcttattcctaggaactattacattccccaaatcatctaagttgtaaaatatttatctttagtagttcaaagttcagaatatgcagtcatatatgtgcatgcatgctcagttgctcagtcatgtccgactctttgtgatcccatatactgtagcccaccagactcctctgtccatggcattttccaggcaagaatcctggagtgggttgtcatgccctcctgcaggggatctatcttcttgagtcagggagggaacctgcgtgtccttctcctgccaaagaatcttggcagtcagattctttacagctagtgccacatggaaagccttgtagtcatatatgctagaggacaaatcttgcctttatcacttataactgtaatcttgggtgaaaaatttaatcacactatttcaggaatgtgtgaattcctcatttataaaataatacatactcccattgttgttatagtaaaaagtacatgaagaaatataggaaagatctctagtgcatggtttttagcaagtcctcagcaagccctcccccattccccacattattgtatggtacctgaagcatctcgaccttcgctctgtcttcctcacaggtctgttcctggcagtgtgctgctgctgctgctaagttgcttcagtcgtgtccgactgcgtgacctcatagaaggcagcccaccgggctccactgtccctgggattctccaggcaagaacattggagtgggttgccatttccttgtccaatgcatgaaagtgaaaagtgaaagtgaagttgctcagttgtgtccgactcctagtgaccccatggactgcagcccaccaggctcctccgtccatggattttccaggcaagagtactggagtggggtgccattgccttctccgggcagtgtgctggtcaccacctatggacaacctaggtttggctgatgtccccctttttgaggcagagtgcttttgtctcaacccgctaacatatgtttccttccattcctcctggacggacaaactgtttttctagtgacaaaaggacagatgtatcctcccaccgagtatcttcactccaggcaagaccagccaggtgcttctaggcttttgggactttgctaggtgatggctatcctcagtcattttcaagttaaagcttcatgcttaatcattctgtgatttgcatatatgagataaattggctcatttcagctttaaatggatagtgaggatcatcttttaaagtgaaaagaatttgacttgaaatataatattgatatttttctctttggtgtgtattctcaaatggaatatctgttacttatatattcataattgagatagaatcagcatgtgaaacctgttcaaagtcagacaatatactggaatatattgatatgttttattttaaagtcaagatgattaaaacaaaaagacaggttcagctatttaattttttaagctaaaccaatttggaggagtctggctaaattgcagacagcaggttttactgctaacattctaatagtcaatcaatctttgagaaaggattttctgcctcccagctgcatt

SEQ ID NO: 60999 - DNA, 1925 bp, Bovine  19866880690631
  misc_feature (1)..(1): n is a, c, g, or t
ntgtacatatactgagtattggcactttcatggagtttctgtctcatggaacactcctctgaccacaagttttattattttttactcttttgttactcactttgataataactgtctgaataccagtattttgcagaatatcatttacttcaattaatttacatcataattattgatgtaaataattgtggatttctcaaaatggaagcttaatcactgtgaagattctttttacagttacttatcatttgtagttcatcaaatattttaatcttcattctttcaggaaaaaaagtatttaaacattatacagaactaggtttaaatttcattatctttattcacaagaatggtcaaagtttttctttttttaactataaattatggagcacatttattccatgagattgctgtcagcacatttcatgagggcttcaatatatattttctattttcaatcaattctaagactcttgcttttcctacttccacctttctgatttcatatcttcactggccctttgagatactggcatcctacaatgaccaccagagacaaataaagtcagtcagtgatatattgaaagaagagtttcaaaggacagcagaaaagaaaggaggggtcagagactgagtaaatttgttcagtttggaagaaacaattataatctgggctttaattatattcaaatgctgtgcttctgatttttaagacaaatttacaatcaaatttggttatccaacaactcctaaaagtgtttatgaaaaaggaaaataaattattgagatttaatatctaaacactagtttgttttataaaagcaaaaatgcacctgaaaaaaattatttttaacaccaagggcttgagaggaaaacaaatccatttgtttctaccaaaatgaaataaccttgaacttacgtgaatccagactcttcagactgtttctaaattagtgataaataagcaaaggcagatgacccaggaaatgttttgatattatctccagtaaaccttgttttataagcacattatgtacatattgataaataacaggacatatccttcctataatagttgccccatttcctccatatgtcttcaaaagtatttagtcttcgacaagtgcaaattcctttcagctgcggctcacaggagccatttctgttcctgctctaagtacttaaagaagtgaattaacccagaaacctaattcataatcatcctaataccttaaaaaattggatcaaaaaaattcttattcaaaagtcagtagaaattattcaatcctgaactgattctttcgcgtacaaataagagcctgttaactcactgttgtttgaggaagcacatgaagtttatcctattgtcaatgccaagtgtagataccaagggtgcagctcctccttatgatatgcttgtctcatttttagcatgagtctctgaccactgggtcgaggaaaaataactagtggttatagcattaaatagcagtgatagaatgctaacatatactgatattaagaactgattatgcatctacagtagtaattggcacttatttcattttcctcccaatccatttatggatgttattttaagtttaaggtacggatgttattttaaattgaagaaaactcaagtttatgaaactgaattaatttatataacatcaaacagccagtaaagggtagtgctaagagtgatgctcagcctcacgtgatctcagagtccatattgtttgcatctgcattagctcctcactttggtttctctatattttttttatgatgccaaatgaatatattttaggaggtctaagggaaacattttgtttttgtttgtttgttttgctgtttgtttagttggttgttttgtatattagagacaataaaaaaatgtaagaacaggagccaagctccaaaat

SEQ ID NO: 61000 - DNA, 1096 bp, Bovine  19866880725852
  misc_feature (1)..(1): n is a, c, g, or t
nataatcatgcataatagctgaggctaaatataaaatgaacatatatttagtggttctttgaatgcacagttaaactgcccttactaaggtacaatactcagggtcagattctattttatgatggagacaagggaacaatttaagggaggaaataaccaaggattactgtctaaagacaagaaaaccattggatgcacctgtgtttggaataagagccagagccgccttctgtacctataacactttcttgcccagatactcaggaacccacaaaataatttctcggtaatgggattgccaaagacattaattacaaatgatttcattggatacactctgtctcagcctctctttccacatagccctttgcaagtttattcaaaagcctaccatttctgctgccactccaatatgaaccaccattatgttccccatcgactgttgagtaactttcatcttggcctttgtgggtgcaaccttccacactcgtagactggtagtctcatcactgatacaaagggaaactgttacttgctcagtcatgtacaactctctgtgaccccatgagagggtagccccgccaggttcctctgtccattgggattttccaggcaagaatctggagtgggtagccatttccttctccaggggatcttcctaacccaaggatagaacctgggtctcctgcatttctggtagattctttaccatctgagccagcagagaagcccaccctcccaagatttcaagttcaaattgccaacaatactccactcagtccagttcctcaccttggggcaaaagactcttcttgattctttgcttcttgttcattcctcttttaattccttggttccctctcagctcctcaagtacacagtatctgtctcccagcaatctgctaatttactctttaacctgctttacatttttcctgggtatcacctgctcatcaagaccttgcctatcaattctatttggcattaaactgttgttcacaatatttcttttccaatgttttacattattagttttatcagagtacttaatatattttattcctatatataatatatttttaatttttgagtttct

SEQ ID NO: 61001 - DNA, 2357 bp, Bovine  19866880827985
  misc_feature (1)..(1): n is a, c, g, or t
ntttaatcttataatacattgaaaagtatagtattccagtacaacagctggtgcttttagcaataccagctacatcaccattgcttttacacttgtgtctatatatcctggacttgtaataatgatgctgtattaactgtattccatagagtactgtacagtaaagtacacaaaagcacaaccacttttgtgtttgtgcacacatgcaggatgcacacatgtaacaatgtacaccagaaacatgaactaacttacgtaattggacatgtgaacacatgctcaaatctttgaaagttcacgaattgaaggcctatattatatgtagaatttctgtagttgaaaatccacaaatagagacagcttgaatgtataaacttaacatttcatttaaaggaaacattcaatagaaatatttagttggtcttctgtagtttatcatgcagtaccaaggcacttcaatttaaaatcttttcaagccatgagattataatcaacatctggaatgataaacttttgtgacctgttcccttctttcttgtgttttaaagtttgggaggaaattcccacaactgagtgcttaaaagtgtctgatctttcactttatctctcttataaaagcaagttgtatatatcaagtatcaaaactatggagagatgtccctaaaaaaaaaattaatatgccaagcccaaattttgtagccagatagaattgaaatgaaatctaccactctgtttgctaatcactttttctgtgatgttggacatatggtctccctgcaaattcattatgatatacagagacagatgttatgttgatatatgtaatgtatattatatacaggtctacatgtatatgtatgtatagatatgtatcacattacatctaaatttggtcaagggccatgttacaaacctctgttttctatattaaaactatttgaaatgagcttcccattttgaatacatgaattcattccaaggaaaaaaaataaaaagattgctatcagttaaattcctattcccaccagaaatactaacattttaaaaagtaataaaaataagaactctgattcttaggaatgtcagtggggaagatattttgggcaagtcctgtaagcaaatgtgtgttttgcccatgccaaaatgaaactatctctcaaacccaatcacagaaggccataaaaaagtcagaggtaattgtaataataactattgctttaggctcctgaatagttgggggcagatggactgtgggtttagatgaaaggagattgagtggagatgaataaaaatgaaatatgcagatatttaccaactactaggtcatgatatatcctacatgattatgcctcaagcctggaaatattctatttgagtggatttaattctcttctttacctgcactgtttcataatcaggttgcttcacgattctctgtaatataactaacactataaaatagtatcacatgcaacctttgacttttttaatgctcacaagcacttctgtgaagacaggaattctatcttcgtttgaatcataatgggaaaaatagaacggaaaagcaaatggagtggaaaaagacaaccatatctgttaagagcttaatcatggaggatcctacatgtgtacagatcatagttcatttattctacataataaccccatgaggtaggatgactttccctcctttttaaatttctttttataaatgaaaaaagtgaaggtcagagagtttatgcatcctgtccaatgtcacatgcagaaagatgacccataatcatgtgctgtgtgtgcatgctgagttgctgcagtcgtgtctgactttttgtggcactatgtagcctgccaggctcctctgtccagaggattctccaggcaagaatattggaagaggttaccatatcctcctccaggggatcttccggagccaggtatcaaatccacatcttttacttttcttgcattggctggtgagttctttaccactggcctcacctgggatactgggatttaaattagcctttacttgccttcaaagctaactaatatttaatgccttaaacacaggcattttattgacttcaaatgcattctcttgccaggatgtcacacgtatttgccaccacatgaccagtcactaagcaaatgactctctaaaatgaacttcctcataaaccttgagatagtatgcttcagaattcttctctctccacttgccgcttctaggtcaatgtgacattataatgcaaagaagaattttctgggatctcaagttttgcattattattattaactttgtaattgtattatttaaaatgtcatcttattcttgcctttctgaaaagaaacaaaat

SEQ ID NO: 61002 - DNA, 915 bp, Bovine  19866880993592
  misc_feature (1)..(1): n is a, c, g, or t
nctggtaagtggcagagttgaggttagcactctggttgatcaaaattcatgagttgcaccttctcaacataactagtagcacttcctaagggaggaatatttgagagttaggtggggacaatttctggaacaaatggtaaaatcaatatgtttcatgagcagtttaattaagagactccctaagagttgatctgagttgttctggctggaatgatcatctgagtttcattgtaagaatttagtttgtaatggcaaaaaagataatgtacagaaagcaatactacacagagaattatttgtctaaagtgtatttctgtgagtatgctttttaaataacagctcctaattttactgggaatgtatcaaattcaaaagaaatcaaagcacaaaattttgataactgtaacaagactctctctcttttcttttctttttttgtgaaccttattctagaaatatataaaacaagagaaaactcaatctgatgccattctattatctatcattatctgttcagttcagttgctcagttgagtccgactctttgcgaccccgtgaatcgcagcacgccaggcttccctgtccatcaccaactcccagagttcactcaagctcatgtccatcaattctgtgatgccatccagccatctcatcctctgtcgtccccttctcctcctgcccccagtccctcccagcatcagagtcttttccaatgagtcagctcttctgttagtttctgaaaaaatcatattttcattgactagttgaaggtttctcatccattaccataacaagtagtttctatccctttattagattggcaagttatttatatgtaaaaaagttttgtcagtgagttaaaagctgcttgctatagttgctataatagaatgtaatcattttcaggtaaggcaa

SEQ ID NO: 61003 - DNA, 1600 bp, Bovine  19866881148682
  misc_feature (1)..(1): n is a, c, g, or t
ntcatgtgttattacaagaattttctgtcttctgttcctattttaacctacagtctgtgtctgtttgagtcatcaggtcaattgaatgaagttatgtagtggaaagctttcagatgagatttttcactcacatttaaaaaagtcgtattgctgtggcttcccctgctagccttgggaaaagaaaaaaaaatcatatatcaatacctaagtgctgcaaaaagcacacggcgcactttctcttttaactggttcataaaactgaatttttatccacagcaccaaagttaaatatgaactcattctgtaagggcaggaggactaattttctttttagtgttccatatggctaaatttcacataaaagtcctcatgtgactgggactaaagcaatttccatagcatgacaaaatacaagaaaaacttcaagaaaaatgaggaaatccatattagataagatcaagaggtcaacttaatcaaactcttttaaatagcattattgtacatgctaaaattttttaggtgtaagaagcatgaaaggtcagacctcagatagctcatcaaataattaggcagataacaccaatatataaaaggaatgtgtgtgttggtctttcagtcatgtccaagtctttgtgaccccatgaattgtagcctactaggctactctgtccatggaattctccaggcaagaatactggagtgagtagtcattcttttctccaggggatcttcccaagccaaggattgaacctcggtctcccacattgcaggcagattatttaccttctgagccaccaggaatactaataataatatggcatgaataactctgacagtttcatcaaggtaaaccatatgatttatttttggctatatcttcagtaaattgtgtatttcttgttgccgttgttcattgctaagttgtgttcaactctttgtgacccccatgaactatagcacccaggctcctctgtccttaaatatcttccagagtttatacaaatttgtgtcctttggggtcagtgatgctatctaactatctcatcctctgtcatctgtttctccttttgccttcaatctttccaggatcatcagagtcttttccaatgacctggctctttgcatcaggtggccaaagtattggagcttcagcttcagcatcagtctttccaatgaatattcagggtagatttcttatagaattggctggtttgatctatatgtaaacaaacatggagtggaaagcagctcttttgctccttttcctgttttcccatttccagttcactttaaccttagaaaaacctatgtttaggagtgagatcactgggcaatttagcctaactcctgacttttgcacaccactctttgcctaaactgttgatccttttcctagataaaaagaagtaagaataaagaattaagcagttaaaaaaatgacaagctctctaccttccaacagttcctctagcaatcctgctgacagatcacaggggcaggataatattgatgagagagccagcccatttgcacacaatggagaaggctacagaacctaatctccttcctcaagattcagaggttcttcacccattttctc

SEQ ID NO: 61004 - DNA, 775 bp, Bovine  19866881390771
  misc_feature (1)..(1): n is a, c, g, or t
ntgtattgcattccttcctctccctctccctcttcctttctctctctctctctctctcacacacacacatgcacttctcatgctatcactgtgaacacaagcacggagttatgtaaacaaaatcattgttgttttccaactgaacctggaagcactgacatggaatgacatttttctctacatcccatatttttttatttgcaatctttacactttatgccccaataacactatatagtcacaaccaactctctccacatccctaagacatcaatcttgtcaaatctaattgaatcaaaccacaagcagttataaacggagtgcagcttgacaaataataagggggaaaaaatgaaagagaaaagaggcatgcttcaaactgatattttttcttttagatattctcttatggaaatattctgtaatttcctaaaaatttctcctcattttttccagattctttgccagtcagaattttgctctttatttagaaatacttctctattttcaacactgattttgattttgttcaagttaaatatttcccagagtagaaactgaacatgctgttttgtgatataacattgtctacattttcacaggaggctagccttgggtggtagtttgtgatttactgtagcactaatgcagtcaggggaatgaacacatcacaatacgaaatttaacttgtggacccacaactaggctctattagactgagaatttttgcagtttgtaatgtcacaaaatatctctacaaagttagcagggctcc

SEQ ID NO: 61005 - DNA, 1107 bp, Bovine  19866881864257
  misc_feature (1)..(1): n is a, c, g, or t
nagctgtattttatttataagagctttacaactgtgtttgtatgtgtgcttttatttgctttctcttcctgcagccctgtgaagtgtgtcaaggttattggccttattgtgtagattaaacatttgaggcaattaagatttgaaggtagtttcaatttatttttggctttggaagaacagttcacaggtaacaagaggtccatttacaagtgcaaaggatgagtttacagaatatagcaataaaagaaaaacaaatacattttgcttccagtaaattaagataagccctgtttcacattaaaagcatttttaaattctgaagctttgtttttcattaatcagtagaatataatgcacctgtttaaaccaaatgcttttgattcaagaagacttaggcttaaaggctattcgctagctgtgtagttctgatacattccttaatctcattgagtttctaagtataaggcataaataatagtgtgttcttaattggtttttcatgaatattaacatcttatttgtacaatatctaacaggtgtagaaatattataaggaaagaatgaatagcattcatctttaacttaattttcatcatgattaagtatttattaaatattcaactttagtgtccccataagaataatagaataactagaacattattatacactaaaacactctacagcatttttaaagattatatattgttttctttacatacttgtcataatgtttacaaatgtcaataacacacatgtatatatcattgcctcacttttagtacttggtttatcaaaactttagactgcagtcaataatgtttaccaaattacacaaatatgtgcaacaagtacagatggctttagagttcagaccctgagtcttaataaagtaacacctggaacaatttccaaaaatggtgttattaaatagctaattcccagaagaaatgaaataatcagtaacctgaatagccttgtagaaaataagactaaagattgagtgtgtaagtacaatattttgtcacatatatgaactgtactgtaagaggaaggaggtggggatagttcatgatgaatcattgcatgtatcatgtcaatatcaaa

SEQ ID NO: 61006 - DNA, 1720 bp, Bovine  19866880702076
  misc_feature (1)..(1): n is a, c, g, or t
naaatcaaaatttgcatagaaatgaatgaaaatgaaaacacaacaactcaaaacctgtgggacactttaaaagcagtcctaaggggaaagttcatagcaatacaggcatacctcaagaaacaagaaaaaagtcaaataattaacctaaccctacacctaaagcaattagaaaaggaagaaatgaagaaccccaaggttagtagaaggaaagaaatcttaaaaattagggcagaaataaatgcaaaagaaacaaaagagaccatagcaaaaatcaacaaagccaaaagctggttctttgaaaggataaataaaattgacaaaccattagccagactcatcaagaaacaaagggagaaaaatcaaatcaataaaattagaaatgaaactggagagatcacaatagacaacacagaaatacaaaggatcataagtgactacattttttaaagtctatttgctcttcattaacatttcttagactaaaggaataggattttgcacatcttttgaccaattcatctttcttgtaaaatttctgtgtgatgtatgttaaagtttatttatattttaaatctattataattccatttacagtatgcttaactgggatttctctttttcaaagcttcaattaaatgatttcatcttcagtgggaattcattcccatgtagttattcagcagagtatatagtggttgcatcaaaaaaaatgcattttcttttcatttgacatgtatttagactcaacattattttatttgtcaaactttgggtggaactattttctgagataattgaaaattaggctatctcaagttatttgagaaggcaaacatgccatgcatgtatgcaaacattgagagtaggctcctgtggttactgaatactaaggagataatgaacttacatgggtatggacctcagaactcaagtttttcaaacaatattgactttccctcaaattatatgaatatatattgatagaacattgccacacatgttaccagttgttttctcaaacaatgaaagtacactgcagaattctgaattctgcattacagctgtctttacagtaggatgaagcgaacagaattaaaagttcaaaagcatcgactccaactaaaacaaagcagcattaccagagttgacttcatattcctcgctagacaaatgcttgttttcaacttgatgtttcaagcagtagatttctcacttgtggccagcatctgtgagttgtttatcaggttaaaaagttctggatatatcattgatggaaccttgtagtgacaattggctgtgatgtcatagactcttagttaaacttctagaagttatatttagtcataccagagattaaacaggaaagatgcttactaaatgaggtgggatccaacaggagtgtagtacagaatgtaataatttatgaactaactttttcctgaggtagctcaacagaagaacttttaatgaggaaggcaaaggcttaagtatctggtacatttgtcattcctgatggttaatttacttgaaggttaataagtttgaaatctaccggtcttagaaatggaagagaaggatgaatctgaacagtctatctcggcagggaggcaagaaattcgaaagagaagacgaccgagccagcccatggtagataaatcccagcagacgaaggacagagaaaaagaaacaattatctataccacaatcatcggccccaaag

SEQ ID NO: 61007 - DNA, 1502 bp, Bovine  19866880741232
  misc_feature (1)..(1): n is a, c, g, or t
nctgttagtaaaatgctgtactatgtgcacacattacttattcaaaagtattattattgttttcattttcaaaggtaactgattttatcagtagctgttttcagtttgtgtgcaaggctagccactgttaggaatcagagacaatgtcacaaaaaatcaaattgtgactcctttgtttgagatagttttgactataattcagaccactgatgggttggaaagcatcacaagttcagatcagcattttggggagctcgggtgtgagtctggcattgatttttatgaatctgggacattggaacctacctgctccacagaacaagcttcagtcttcaggcaggtaatcagggaagagctgttagtttggcaaatggctgatgaattatatacattttatgaattatatttttacagttcatacttatgcttgcataatgtgaaaaataacttgcatctaaaaggaatggcataggaaagaatctaccgggaggagagatacaccagagaaagaggaaaacactaaaaattttaaatcatatgccaaaatataagcaaaatttgatttatttaaccaaaatatattgaaaataaggattgtggaagtgattcaatagggatctattaagatttctaagatatttactgaaaccaagatttagctatcttggaaaaccaatgaagtttaatcaatatatattcattttgctttgttttatttttaattttataagtactatcgtccaagccttgatgtcaactgtgccattaaacagggctgagattaataggtatgaaaaatgtcacctggatagggatttggaaaataatttttagctctatgagtttagattaaatgctataaaaatctagtgctttaaccttaaacatgctgaggataatgattgtttagacactttctgagacaaatatcatatactatgttatctattcctattagatacacagaatagtggctctgaatatataaaatgtcttttatctcaaatatttgttacaaaaagtttaactttttaacatgcatttatagggctttaatttacaaggacattttacatgccaaatatgtgcctggctctctgctaaggcatacaaatgtgtaaaatgttatttttaacaaaagagcttcatgatctagaggggaataagacatactaatacgaaagagcattatgaagtcattacccaggtaaagaatgtaaaaattttgcattattacttagagattgtaaaagacataatagggagcccaggttaccgaaatatttacatattccaaaacatcttacaggaaacccaaactttttggccaaccctttagaatattctcaatagtatacctcaagggacaaaatttcaagaaattcttttttttttttcattcctagttagctaaaagactcacacaatgtaaaacataaatctcttttgaaacccttgagtttgtctcatgatttgacagcacttcttattacatgttccat

SEQ ID NO: 61008 - DNA, 805 bp, Bovine  19866880783233
  misc_feature (1)..(1): n is a, c, g, or t
nggaagaacaaaatgaagtattttttccttgtgactgtccttattagtatgtatgctcaaatgcatcaaactaatgaggctgcgtcattacacggaacagctgtattgagtattttggaagtttcagtacattggaaggataaaaccaaaaaagctattagttaaacacaagtagtcataaagtaataatgaagacagtcaagcaatatgttgacttcactagtaactactgcatgtggtgtcaagagtggaattttaacatattcatttgtttccccaagcataaattactaaaagctacattcgaaatacagggcacgctgtaaaaactttttccattacaaagtgtgatcccagtacatttaacctctcctttttatttagaaacaggacaaaaacacattaacttctaatatcatcaatatgatgctccatccatttgcttactcttaaggttaaaataaatcatatcactattttgcacatttaagtgaaaaatccaatgaaaaataataaaatttggagaaaatactaagtccttaatctctatcctcagtatatgataatgaaattgaactcataattaaatcatgtcatgagcattccaaaattaaacagaaatgacaattatataattacaaatgggaaacaagaaatatttaatccttttggcattgttgcttagtatattccattattagctgaattttttcaatcacaataatcctacaatcccttctggtccctgtaacacagcctattcagcataatattagatacagttcaacacaaccctacactaaac

SEQ ID NO: 61009 - DNA, 796 bp, Bovine  19866880807801
  misc_feature (1)..(1): n is a, c, g, or t
ntctcttttgctgtctcgtatacagggttattattaccatctttctaaattccatatatatgcgttagtatactgttttggtgtttttctttctggcttacttcactctgtataataggctccagtttcatccacctcattagaacttgatttttaaaaatgttgatattctagcttggaagcaaacaaatcatttggaggacatatttcacttcagttttcctagtgcgttggtttagaatgctaagattataaagaatttaaaataccatggaggtgagttgaatttaagggaggatagtagacaggtcacccaaataagctgccctaggtaagggtacactgaagtggatgtaatagaatcctttcattctacttcaaaattttgtttccccaaggactgtagatagtagtgaatggagaatacacttagaataggctttttgtaccagaacaaaggtaaaacaaaaacatatgttctttttcaacctagtaattttttttttttttttaaagacaagaagcaatatacaatcctgaagtttgctgccttgacagctgataatcagcagaagctaacagtcccagtggggctcactttaatcttattcttttgatattgagctgcattttaaggctccatacaagatgctcttttaaagcttgtatgtataaaaacagtcttgccttgagatttgttagctgcacatgttaagtgccatgagatcaggtggaaatctttgtttggggtattgccctcatggcacatcaataaatggtgaccttctgttggtgt

SEQ ID NO: 61010 - DNA, 1517 bp, Bovine  19866880842845
  misc_feature (1)..(1): n is a, c, g, or t
ngtcatattctatcctttgcccctgctcggaaatttccaaggtaaaggagaattaaatgatgtaacttttattttgtcttatcgaaataatttatactatagcttatgttggatataaaaaggcaaaatagaagctgaggttataatttgtagactggactcattatttactgagtggactcagttaataacaatattaaaaatttaatacaattaagtttaccctgaaaataactacattttaaattttggatattaacttgaatatatttatctaggcacataaattggtaaactctaaggaataaatatttcaaaataaaacattattcaagcatggaaagatttctatgcccatcaatagttttgcttcatgataaacattaaacattatttaatgtttaataaattattaatagttttcaatgaaatccagtatgacgctttcatttctcttgattatttttacatttactaaaagattgaaataaaacaatcttaagttcaggaaaatactgtttgatagcattagacacttttgtattacacaatctaaaacacaagtggggcataagtactcttgactgacaaggatcgatgttagaatatcacaaaagtccaaatgatggggaaatcttttaatatttctcattcttcacatcatgaaagtattcaagtatgtccacatttatagagggactctttctcaaagctccaattctgaattaggtcaagtgtttgaagattacttccatagattatattaaaattaccttaataatgaatggccacaaaagtctccttttagttatgatgcaaaaataataaaactttcatttagcattgtattaataaatgtttatggagatattattactatcttgctggttataatatgtgaaattaaaaaacaaacagattattattttttctctcttaaattacctctaagccatagtcatagtgtatggtagttgggattctaagatggccccagatattcacactcccctagaagaaaagctatgaccaacatagatagcatgttaaaaaacagagacattactttgccaacaaaggtccatctagtcaaggctatggtttttctagtagtcacctaagggttagggttagggttaagagttggaccataaagaaaactgaccaccgaagaattgatgcttttgaactgtggtattggagaagactcttgagactcccttggactgcaaggagatcaaaccagtcaatcctaaaggatatcagtcctgaatattcattggaaggactgatgctgaagctgacactttaataattactttggccacctgatgagaagacctgactcatttgaaaagaccctgatgctggaaaagattgaaggcatcttgatggttggatggcatcactgactcaatggacatgaatttgagtaaactcccagagttggtgatgaacagggaggcctagtgtgcctgcagtccatgggggtcacagagtcaaacacaactgagcaa

SEQ ID NO: 61011 - DNA, 1770 bp, Bovine  19866880869071
  misc_feature (1)..(1): n is a, c, g, or t
nagggacagggaagcccggggttgcaaagagtcaacacaacttggtgactgaacagcaacaactactggaaaataaatttttgaagcttatagtgtagatttggtttctagtaagattcttctttgggcttaccaggtggagctagtagtaaaggacctacctgccaatgaagcattcatgagagatgcaggttcgatccctgggtcagaaagatcgcctggaggaaggcactccagtactcttacctggagaatcccattgacagaggagcctggtggactacagtctctaggaaaagagttggacacaactgaagtgacttagcacacacaggatgctttttcattctaatcaatgagatctattcacaaaagatttagaaaatggaaaaaagtcattattctcccaggcaactaaggcaaggacgtgtgtttcagcaaatggcctttgagagattgtatccagaatactaagggttctaccaagaccactgtggaattacatgcaactgaagcaagtggaaaccttcttgcaaacattgttctgccattccctgaaaaattcctgacttaagcttctcctgtgttttaaaagttattaagttctcatgtccctattttaacccactaattctaagtagtaagtaatctgcttactcttaagtgacctctgtttcttgactgagccctgaacaatatctgtagatacccagatcccttctgcatttcttttataataatagaaagaagtttaaatttccacttcagtgttctccatcatttgtctccctgtgttatatcattcctctaatacagcatggtgtgtgtgtgtatggaaagggagttaaatgtagaatgaaattttgcattgtcaaaagtcacgcaagagtaacttacaaaaggtaaaagagggttttttaattccctgtggtttcattactcttgcaggataaaagggagagcgtttttacactaggtattgtcaagctttggacttgtcacttattcaaatcagataataagaataattaatggatttcatgaaagaatagaactttttaagaaagataatttttttaaccagacactgtctccattctaataaaatagacaataacttcatcacatgtgatagcagtaagcttttctaggaaattgagataaacatagtaagcttccctggtggctcagatggtaaagcgtctttctgcaatgtgggagaaccaggttcaatccctgggtcgggaagatcccctggaaaagtaaatggcaacccactgcagtactcttgcctggaaaattccatggattgaggagcctggtaggctacagtccatggggtcgcaaagagttggacatgactgagtgacttcactttcactttaatagtgcctggaaaatgataaattattaacctgaagtaaaaaggctattaattatatcatttatgatttatggtacacctgagcttatctagataagtaagataagcttggattaaattggcattggatgcttatttctaaaaatattataaacattttttatgtcctgtagtcttgtacaggccactgggaacatgattcatgctaatgaagtaatattcctagtcagacaaagtttcaaccaacacaaatcagataagtatatatagccattaaaataaatagtaataaatgggggaatttttcaaatttatattcaccttaataggtttaaatcctaagcttcaatccgtagttcaaattatatgagtcctttataatgtca

SEQ ID NO: 61012 - DNA, 749 bp, Bovine  19866880937912
  misc_feature (1)..(1): n is a, c, g, or t
ntttttttttttctttcaatcaatcacgactcgccattacagcagttaattctcaaggcagtcacaataaattctcatccagagagctctccttattaattttccaaagaaaccaagatgtctgtgttgatccgtattttaccttgcccaggctgttcattaatgtcaatacaaaagttcatgagctgtaaaatcctgaggttaagattaagcagctattacaagtgtaccttctggcctaaagtgaaagcctcatagagtaaattactctgctgcatatcactgcctttgtggttccagagtgattactttttttttttctcactattttataagatcttatggaagcctctttgaatcttttattactttccttgcagtaaactggggaggggggcaaaaataaaaactccactctgaatagaatctattacttttcatcctctgaagatttacacttcaattgattttttttctttcaggacaggggaaaagatgcacttcatatttcacaacattctctttactgtaattctaagcaccatttttttgtaggaataaacataagatgaagggtactttgtctctttatatttttccttgatgtagtcggttttctttgctcttagccaaagaatcatatgcaaactgtaatttcaatatacaggacaaaggatgccaatgtaaaatgtatcccttgataaaggtcataaagatttcttataaagaatcaagacccttttctcaga

SEQ ID NO: 61013 - DNA, 1857 bp, Bovine  19866881055831
  misc_feature (1)..(1): n is a, c, g, or t
nccctgcccgcatatgggctttcatacgccctctggtggtctgggatgtggaggcagtgctactctgcaggttcagaacagtattcccaggacttgagaaaaatcctgagctcagccaagatcctggggagtcctcagaaccttaaatttagcttgtgtgccacagcagcagtggctcaaagcattggttttatttgtttcctctgctaccctcctcttttctctctacatcagacctccccatcaggtggcccttcttcacagctgatccttcagcagttgggttcttagcctactgaatctgcatccagctttgatagcggttggccgcttgagtaggaataaaatttttcttgttcttcttgtgggtagctgaactcttaaatctgttgctccaacctgaagtatgaccttcaaaaacatgaaattgttttaactgccaggttgcctagcacagagaggtaaagaactatattacatctaataaaagggtttatgatatgtaacaaaagtgatccctaatgtgggtctcactgacctctgtgtaaaagtgaataaattttccttccttaaaattcttagcagtagagctactttttgtcaacaaaaagccagtgaacttgaaggttttaatatctcagggttttgttaaaacatttctttcactttattctcacttgctaagttttcatgaccctaaattctatttccattgaagtttgtgtagcatcattctctttaaaagatgttgtctgagaaagattaacttagtctgtttctctgttgctaacctacatctttataaactgtaaaagcctagtctaacatcaccccaggtgaactctttctgtggttgaagcataatttgaagctgaacggagttttcctgtaaaagacagtggctgaagtcagcctctgaaattctaatatctttcttcaaattctggcacttactgttcatactcgaactttttatttgaattctctgagcctcagatttctctcagtaaaatggggatactaacatccaccctacatagttgtattaaagaaaaaccattctgtcacttgttaaaatgctgaggagtattttattcaagattactacaacatggtcatgcctgtcataataggaaagaaagaatggattcaagcctaaatacagcaaaggcagctggggattttgtagccaaaaccagaatgagaaggtcagaggatggagaattactcacaggagacatcagggggagaaggattcttgctaacctggtcttacagaactctagctaaaggcaagctaaggacttaaacatcaaaagtgagggatgaaatacttggtcagatatccaggtaggggggattcttactaaactgatttggtaggattctttatgacaaggaaggggccaatgtcaaggcagagttgactagaaggatcagagaagcctgacaaaactcagtcaagtagggaaactttgtcatttgtgaggcttgcattaaataacattaagtcactacattaaatcagtccctgctgctgcagatgctgctgctgcttcagtcatgtccgactctgtgcaatcccatagacagtagcccaccaggctcccccgtccctgggattctccaggcaagaacactggagtgggttgccatttccttctccaatgcatgaaagtgagaagtgaaagtgaagttgctcagtcgtgtccaactcttagcaaccccatggactgcagcccaccaggctcctccatccctgggattttccaggcaagagtcctggagtgggggtgccatcgccttctccgaaatcagtccctagtacccagtaaaggctgattgattaaatggtaa

SEQ ID NO: 61014 - DNA, 1422 bp, Bovine  19866881184677
  misc_feature (1)..(1): n is a, c, g, or t
ntttccttaccctggtgaatgatatttagtaagtttaataaagaaggtatcagcgatatttatttacataatttcttaataagatggcagtcatttttaaatcaaactattttgagactttttctagctccacatatcattacatgtaacttattaaactgtgatgttaataatcccagttctactatttgccagctgtgtcatcttggataaattacttaatctttttgtgcctcaattctctcatctgaaaaaaatggtgataacaatggtatccacctcttaaagtggcaaagaagaccgagtgagtaaataaaacactatcaccattgctggaagtaatgggcaccatacaggtattagcattttgtagcattattatttttcaactcattcattgtattaggagtacctgattgattacagaatggctataaaaaatcctgctatcaaatggatttcactagacaaataacctaaattctccttagagattagataaacgggaagtatttgttaaataggattctaactagtgatcattcttatcactactttaatcacttttatcaaaggcaagcaggactgtttaattaaaactcattgtgtaacttttaagggtggtacctaacccagaaatgtcaaatggagctgaccaaatgaaggagcacactgcttcatccaaaatgaacaccatgatcccaactcagttgataggagtttcagctagacttttcagtttcttttaaaagggagtaaaactatccactgaaatgcactttgcctggtcaaacttttgatgcagtaaaaatcagtcataaaacctaaaggcaattaagactcagatcccatgcctgtcattctaaaaagcaagcatcaaagaccgttgtgctagaattcggccatttgtttttaggagaacatgatcggaatgcttcctgtcccagagcttcttgctgctagctactgaagctgagaagctcaatatttaccaaaagaaaacactactattaagaacagatttcctagttctttacccaacatctattctgccctcctgtcaaattaactgaatcccagttttaaaaactccaaatatatattataaacattttaatttaatgtatacctgtggtggattcattttgatatttgacaaaaccaatacaatattgtaaagtttaaaaataaaataaaatttaaaaaaaataaataaaatgtgtaagggtagtcttaatttcctgtcttttgatgtgatgccaaaatcctttctttgaaagactccaatgattgcaatcttatttttcttgcataaatcatgttcataatttatcttctaaaatttctagtttcagcttctttaaagaattaaaaagggacatttaggaggcaatgaatgtacatcttcaagcagtttggcaa

SEQ ID NO: 61015 - DNA, 1496 bp, Bovine  19866881221351
  misc_feature (1)..(1): n is a, c, g, or t
naatacttgtaagcctctgggatagggcatatctacatgagaagctgcatgataggtagaaggctgctggatcagactggaatctgaagaaggactctaatgagtgaaatgtttaatggcattaagggaaaacagcctgctgcaagactgtaaccaaaaggatgatctttccaataggaccagaatattcaactacggctcccttccctgatctccaagtcagaatcagctttgctgtgtcatcgggtgactgaaaggggaagctagaggggattcatgtcccctaggtgagggggtcttcacacggggatgggcttaaacaacgtggatgaaacaaagagtgctttcatgcagtctctcaagacccagtaggaaagaaaaggatgcctagctgaagaggagagataagggttacagcttgtcatcactacagaaagggtctgggacacatagacagctgagcctaaggggtggatttatccccatggtccaccaatcctcaaggaagcagagtttcgtgtctggcaagagcagtagcagcacttgcattactcactctgagcccgccgccaagagggctcgaggcaggatgtgttcggtcgttgccttcagccgtcctgaggagacagactccacacttagccggctggcttggagtcctctctgactgtgagaccagccaagcagaggcaggcagctgaatcgcagtgagcacaaccaggtgcctcatgtgcggcagcccaggcttttaactaaaccacagtctactgccaatactggacttcttgtgacctacaaaaatggcattgtcatatggttgactctatctatccaagttggccataaaatcaaagaccttgtgtgtgtgttagccagtcagttgtgtctaactctttgcaaccccatggtctataacctgctagactcctctgtccgtagaattctccaggcaaggatactggaaggtgttgccattgccttcttcaggggatcgtcctgacccaggtattgaacccagatctcctgtattacaggcagaccctttaccatgtaagccaccagggaagcccaagtatactggaatgggtagtctatcccttttccagggaatcttcctgacccaggaattgaactggggtctcctgcattgtaggtggatgctctaacagtagagcttctggggaagctctcaaaaactctgtcagttcagttcagttcagtcgctcagttgtgtccgactctttgcaaccccatgaatcgcagcatgccaggcctccctgtccatcaccaactcctggagttcactcagactcatgtccatcgagtcagtgatgccatccagccatctcatcctctgtcgtccccttctcctcctgcccccaatccctccccccatcagtcttttccaattagtcaactcttcacataaggtggccaaaggactggagtttcatctttagcatcattccttccaaagaaatcccagggctgatctc

SEQ ID NO: 61016 - DNA, 831 bp, Bovine  19866881229337
  misc_feature (1)..(1): n is a, c, g, or t
nctcttgtttatatttggggggcattttgaatattaattagatattaattatatatctgtctccttatattgtactttcctgaatgcagagactatatattacctaccacagttggcagtacttactgactcaaggaatgtcgtgaaggatgttagcaagtacttcccagacaattagttctgtcaaaacttgaaacaattaatataaaagacaacgtaaaaatctgcaaattaaccttaccacttggaattaaatctttgaagacttatttagttttttgaacaagaacttattcttaaagtatttctaagattatatctttaatgtgatatcactgtttcattgtcattatataatgttaggatttttttatacattgccactttattactcttaactgtatgatatgatgagctaggttatttgggagtgataggcaatcctccaaatttcagcatcttaaagagaaagaaaaggaaagtgtactatttttttcttgttgcctgtctgttgtggattggctataggtctgttccatgccatcttcactccaggagccaggctaatagagcagcttttcacttgaaaattgccaattgttgtggaagcaggaaatgatagaatggcaaagcatgctttaccctgaaagcctctgcttgaagtgatccatgtccctgcccacactgaattggctgaagcaagtcatatgctacttctgacttcagcaccgtgaggatgtttaattcccgctggaggaaaggcagtacatttttgtgaatagttacacaatctactacagcataaaaactgttacattttccaaaaacatt

SEQ ID NO: 61017 - DNA, 778 bp, Bovine  19866881371023
  misc_feature (1)..(1): n is a, c, g, or t
nctctttttacctgcctatttatatataacacacccaccagggtttgaaaagtggggtgtggtaactctacctcattcttggctaggatgaatgactcattaattttctaagcagtagagctcaaagcatactttctcttttcaagttttagaaagtaggtttgcaagtcctgtggggtttcctttactattctaggtcaagcatcagattcttttatatagaatgaacgtcgcttctgaaaactgcttgtgaaaaggactgcatgtcttttagaaatgtcaggttttagtctaccacatggctccaacctgactctcttctttgctccatgatatgcacaccgaacaactgaactgtgcactaaaccaaaaggaatggaaaaatatgttttcctgttagtaaaaatgtccctgtgagatatggaataaagtctgaatatttttactgtagaacagtgtatcaagtttctctttagttcactcataatgtattatttaagcagacagaaggctgaagagaaaaaaaattgtgttgaacaaggcctcgactttatagtgttgtaaatatagtacagtgacatgagggatcagtaaaataaactgctccaagctggccagtgaatcatgtattttataaatacaccacatttgcaaatgtaaaataagatgggatactatggattaaagaagggtcaattaaactacatttatgctcttttacatacaagataacatgggaggggaaagatagcattcattttcataccaataatattta

SEQ ID NO: 61018 - DNA, 2853 bp, Bovine  19866881374260
  misc_feature (1)..(1): n is a, c, g, or t
nattgcctgtggtggcttttgtattgcacaagcagaattaaatagttgtgatacaaactgtacagcttgcaaagcctaaaatttttaataactataccctcacagaaaaagtttactgatttctaaagtatatctcattagcacaatttagcacaattcagtataaaatttcaggcaattttaataatatgtaatagcttaaaatgattaaaattggataacttaaaattatgtggcaaaaagtgaaagtcgctcagtcttgtccaactctttgtgaccccatggactgtgtattccatggaattctccaggccagaatactggagcaggtagctgttcccttctccatgagatcttcccaacccaaggatcgaactggggtctcgattgcaggtggattctttaccaactgagctaccagggaatccaattatgtggaaaaaacacatttaatcactatcaaaaggcataatagaataacaaaaatatttacaacagcctgacaatatgacttaactatttagcataaaaatagtagagggaataaaaaataaaataaaatgggtatctatgtatgtaaaagcatgaattttgaacttaagatacattatagtagttgaaagataatcctctaaactaaaatcagaaaacatgaatatttttcagccaaatttctatgtttaagtctaagtatggagtgaattcatgcattaatttattttgtagggatacattctcacattctattttcaaagaccatcttgtaagtgaggcatttgtctttcacagcttttgctgaccttattctttccatttgtgggagtgtgaacataaatatttcataataccaaagtgtaaaatatttaaatgctgcatttcataccactatatgtatattttaaaagatggttcagaaacgctctagtttactgtttcctggaatgtttagtatatttgtaggaatagtgctttttaggattattgacaactccctctgatcataaaaattatatacattttataatatattaagctaaatgttttggaaattaatgacttctgaatggaatcatgatatcaattataaagtagattttttattgcataccttaaaacatgtcctatatttaccttatttcatggaatgtaggtttgcagtttataatgaaagtgaaagtgttagttcctcagttgtgtccagctcttcttgaccccatggcctgtagccctccaggctcctctgtccatgggattctccaggcaagaacactagagtgggtagccattcccttcttcttgacccagggatagaacccaagtctcctgcattccaggcagattctttatcgtctgagtcaccagggaagcaaaccattattttatgtaccaccaagaaataaagaattcatccaattatcaatgaatcatgaactataaggaaacaaacattttcagagatgctaaaatataaaaacaaatacctcgggcctaaaattcatgacaataatataaagtattttatcagttttttagacatgacctgctgcccaaagttcttagcacttgtttagtgccttgtattttcaatttattttctttattctctctgatattctgattagcattatatgttgcatcttatacttcaaaacatgatcttacattttcttcaactttgcataatagtttctttcaacaagcctttttgtttagagagatcaaaggttttcctttagttacagttgtattttagcatacctgatatcttactggatggtaaagcaagagctttgctatgagactcatgttatatgaaagctttatgcattactgccttcaagatagagcagatgctttcctttttctagattattagtgctgaaagataattctgttagaaagacattctataaaaagatagtccgttcggtaaaatatctttgtaccttccactcaattttgctatgaatctaaaactgttctaaaaacagtatgtgtgtgtatgtatatatgcatacgtacatacatacatgatattctgaatgatcgtttttaagtttgactgtaaaacaacaacacaaaaaagtaaagttctgagaaaaaggacaggacagatcacataggaaaagtgtttaatttataaattgagtgacattcaggagtgatgtaactattgcaccagcagcataatgaccatatgactatgccatttctgcattatactcataggggcaattcacactctgaaattagatgaagtaagctttacagcttctgggtattctgtatagatctaatcatacatgtactgaacatcaatgacctataaaacactctgctggcaaatctagacttcctaacattaagaagtttacaggtttgtaagatggagaggattctgagtggatttttggagaaggaaactgaaattctctggaaaagattcattttggcaagtgatagggtttgattttctaacggtagaaggggtggagcaagagattccaactgggttttatcttacagtaattattagaagtaattcaccatggaattgaaataaaaaagaggtataggtagataggaatgtttcaataggaaattaaggagacagaggatgctttctgtgttccagatctaaggtaaaggggctgggagagaaaggagttagagacaaacatgaaaagaaagagattaatgtaatatataatttttaattgtaagatctaaagaccaaaaagattatattgacattgtaatatactcaaaaagatgatcaaagaatatttttagaaactttcctgttttaccatgtttcctacatattatgtaccaaaatcctcactaagaagg

SEQ ID NO: 61019 - DNA, 731 bp, Bovine  19866881413952
  misc_feature (1)..(1): n is a, c, g, or t
naacagcagacatactttagtgaatcagaaatagtggttattggatggccgactaattctttttcaaagtcaaaggaaggtgcacagaagcgcaaatcttcagggaatatttttcttagtgaacatcctgaatttcaacccacaacaagtagcaatgaagaaattaggcggccaagtattagcagaacagtgtctatttcaccaaccaaaaaagattctcctgtacctttagaagatgagaaagatgttccagttgaagtacagcctcctgctgcagaagagatctctgctgaagaacagcttccactagctgagactacttcagaagaggttcctgtggcagttcagcctccaccagctgaagagcctcctcttgaagcacagccttcccccactgaagaggctcctggagatgaggcccctgctaaagtagagcctacaccagctgaagaggctctttcagaaaagcctcctgctgaagaggctcttgttgaaatacagccttccccagtggaagaggctgctggagatgaggcccctgctaaagtagaggccacctcatctgaagagactcttttaaaagagcctcttactgaagttcagcctcctgcagctgaagaggctcctatacaagataccccagaacttcaactttcaccagctgtggaggcccctgcagaagaggccccagctgaagctgagcctccaccagctgaggaggcccctgcaga

SEQ ID NO: 61020 - DNA, 1355 bp, Bovine  19866881518166
  misc_feature (1)..(1): n is a, c, g, or t
nataccctggagtagaagaaatggcaacccactctagtattcctgcctggagaatcccatggacagaggagcctggcaggctacagtctgtagggtcgcaaagagtcagacatgactgaagtactgagcacacatgcgtgcatgttcttaaagaaacgaggccgacttttagtgagcccaggtaagtaatgcaacacatcattatttcttaagaaactgacttccatatttagctaaaatcatatcagaattcattatatggctttctcttcataaatctaaatgagttgcaaaatttaacagactttctacagttgtgataaaattaaatcttagttcattttagaaagtcaacctgaaattgcctaaagcgtaaatgaagaattttttcaatgaaaaatatgtttctagcttacagtactgcagttgtttcaatcaagtaaaaagaagctatgaaacattcttttgaaaagctgatttatcttagaattgaattaatgacttagaactttggtgctgccttcccaatagaaaccagcacattttatcctgagcttgcttctaatccttcattcacagcttagattgtccctcagctcctgggattttgtttaaagatctcctgccccttgacaggaaaagcacaccctatcaccctttatttgtttcctttttttctgtataacactgatcacttagcattactttttatatgtatgctgtctcttttgatagaatataaagcacacaagaaatttctctcatgttttcacagctatatgcccaaggtttataaagtgcatggcccattgcaagttctcgacaaatgtttgtggaatgatggatgaaaaatgcatagacattacagtgatattgctatgcaactacttcacaatcaatgtactaggagaagaaggtgggaaacaggatataagcaaaaccaccagtcaaaaatgaaataaaactcttcaaaacatgttataaaattatttaaatgtgaaattgggttaaacttacatctaatattttagatacatactcaaggaacataatctgtaagtataaaatgatataaactatacagcactgctaaatgtcacataaattgcttgcaaactacagtcaaatgtcactatgtttgcaattaatgtttacaatttgttatgtaaatccttctttaattcaaataatagcataggacttgatttggaaagaaattcagtctctgccctgactggctctatctgccctttgatctctaatctcccatcttcagcatattggaattcactcccatatatatacctttattgcccagatagaatatattttttaagttcagaaaaagaaaaaag

SEQ ID NO: 61021 - DNA, 2124 bp, Bovine  19866881533223
  misc_feature (1)..(1): n is a, c, g, or t
ntggataatgagtgcatcaccccatcaattcaaaatcagccatgttatgaataaacacactctatcaatagactgatgcagaaatgatgagttttgccctctatgaatagactgatgcagaaatgatgagttttgccctaacaaatatttttaaaactatttctgtcactttggagctattaaaaagaaaaaatcatctaattttcaatttaatttcttgaccccattgtagggataaaagggaaaaaggagaaaaaaataaattttaatttgttagaactagactgcacttttggaacaagtactttcattcctaagaaaacactcctgctgcttagtcacttcagtcatgtctgactctgtgcaacaatatggactgcagcctgccaggctcctctgtgcatgggattctctaagcaagaatacgggagtgggtagctatttccttctcaagaaaacactgaggcttctgaggtacaatctatactcgtttgcactaatgaagatatataaacggttgcaagcagcaggaatcctattattactactttgatgagaaggaatgacatcttagtacctggtaatgccctactgagtctttcaaagatgtttaagtgtatttcttgacatggctcatcctggggaattgcagcatccttgtaacctacattgtgaaacacatcagacagcatgtcaagatttattaaatgaatagtccactgtccattttttttctaattcacatggaaatgagagacacatttcaattctccccccccccgccccccccccgccgaatatatcagaggttgtgaaagttctagagacaaatgccatagggataatgataatacgattgttgaaggaatgttactgaggacattgttcattaaaatactgagttaaatgtgtggaatctatacaaaagtgatgcagattaagttatttacaaaacagaaatatactcacagacatagaaaacaaacttacggtcatcaaagatgatagcagaggtgggcggagaggatgcagggagagataaattaggagtttggggttaatagagatgtacttttaaataaaatagatatacaacaaggacctactatttagcacagggaactatattcaatatcatataataatccataatggaaaagaatctgaaaaaaaaatatatatatacatacacgtacatatataattatacatatatacatataaaaaactgaatcactttgctgtacaccagaaagtaaaacaacattgtaaattaactatacttcaatcttaaaaatttaatacccaatttgggtattgaaagaataccaaaaaaaaacaaaaaacactgagatttacaaacggattaccatctaatatatcctttcagaatttgtcagttgaaaacttttgattacactgaggaacttagtataagtgataatatcatctgctttcacttcgattactagaaagtacagaacccaaatagatcaaccatagaaaccatcatggcatatagatccattgatgtccttaccattgttgcactgcttttaaaatcatgtatttttcctgattgtgattctctttttattttttatcattatgtaatcaaatacattattttcacaagctgatttttaggacttgatttggagaatagaaaatatataataacagactaaaagtatgtaaaaagattgctaagtaaaagaaaaaaactaacagatactgtgttgtgcaactaggagccaagagagtgagtttaacagagcatctgttagacaaatattaataagaattttgtaatcattctcctagtcccaaatgtgagcagtttctcttaaaagctgtctacagccccacacatgtttaagcagtggctaaataaccatccatctggcatgttaaccaaagttcctgaattggaagaaagattaaactagaagcactcaaaaatttcttccactccataatttcataattaaatatgttatacttaatgaaccatttgttatctccatgggatgaataacttatggcatgtgtctccatgctatcctccctgccaggtctagaaactaagttaaatttaattctatcaccacctacaattaggaa

SEQ ID NO: 61022 - DNA, 721 bp, Bovine  19866881864757
  misc_feature (1)..(1): n is a, c, g, or t
ncctcctaccttttttggaaatagtaacacaaggaaacatgataggctaagcaaaagaaattcacgattttactcttggtgactagagataatccctggttaactcatgctgtttttatttttccagatagtcatgataaaacatatatcaactcctatatttagaaataaaactatcaccaccaacacagtaggaacgtcatctctttggggaaaagtttttttacaactttcatcagaaaaaggtgttgaggagaccaagcagacataagaaacctggagttgtgcacgcatgcatgctcaatcactcagtcctgtccaattctttgtgacccagtggacagcaggccactaggcttccctgtccatgggattctccaggcctgaatactggaatgggttgcaatgccctcctccaggggatcttcctgacccagggatcaaacccacatgtcttctgtctcctgcattggcaggcgggttctttatcacgtagtaccacctgcgaagcccaaagttgtacattagtggaagataaatgtttgatacttgttccagagcaggagaaagggctcccaatgtcatgtttactgattttccactttactacttttgcagaaaaccttagtggcaagttaaaaactgtttgattaactgctgagctaaacctgagggagcatactcaggagtccctctcggcaggttcttctaacctgtcttt

SEQ ID NO: 61023 - DNA, 661 bp, Bovine  19866882148356
  misc_feature (1)..(1): n is a, c, g, or t
naggagaggcgacttgacacagattgtgtgtgtaacagcaggcatgtgcccaaaggtcatctatcaaagaatacatgcctttataaaaagatgactagaaacctaggagaaaataattttcccttgtttcctgtacacacagtagggcagcagacactgcgcacaaacccttctgcctttcactctgctgcagtgaatcaaataaatttaaggagctggcaagtgctttcagtgccaatcaacaatggagaaagaagcgttgctattgacaactggaagcttcgaggtcctgagttacagaagctgtcttttaaagggttccagctgttatattcctcacatcagtgaagcatattactctgttccatattgtttgacaaagctgtgggtaattgccttctcatcttcacaatgttttcacaagaatcatttatgaagtggcaatgtttagtgggaaatgatagctaaactttcgaactatgaggaaaaaaaagagtatatctggtacataatttctggtttccagaatttggataatcaccaaacatataattcacacataattttactgctttatgcagtaaacaacctgagctaccatacttgccaaccctagagacacacttaggtcattattattattatttaacaataggaggca

SEQ ID NO: 61024 - DNA, 2748 bp, Bovine  19866880533434
  misc_feature (1)..(1): n is a, c, g, or t
nctttttactttttctgccaatatttctggaattaaaatcaagaaaatggaaattagggtaccacacctttgaagtacactaaatacttgacaaactgttaccatcttataaagatttccaagtagagttcttcagtcagtgtctcaaaagattttgtaaaaagcaaatatctaaattaacctccaatattaagctgaaacacattagtaaatattagcatttgagaaattgaacagttccctctcttaatagtcactggacatggaaattattaaatttgagcatttaatttaaaaaatttcctgttactgttaattttgttaccacgtttaatcagcatctcactatccttttgttctccctttctttagcttttgttgttactttctgcttttaatacagtcaaatgtccattttctgtccatattcaacttataataatattcctcatatcccactgttatacagtgataatagtaccttatctttcctttaaattcttgtccccccttccctaacacagtatatatgcagctacttagtacattgtcaagtaatgggtaacttttacattctattctatgaccatacttaaaacttcttatgttttgactctaggtagattgtaatacctgatattaatagtatttacattaatttgcatgcatgctaagttgcttcagtcgtgtctgactctgcaaccctatggactgtagcccactgagcttctctatccatgggattcgccaggcaacgaatactggaatgggttgccattctcttctcagaggattttcctgactcaggaatcaaaccccagtttctttgtatctcctgtattggcaggaagattctctaccacttgtaccacctggtatgattatataaaaatgtttcactccacaaccaaataatagatttctttttaccttcaacatcatgaaccacacaaagaatatctttagtacttagatcacatggttactctttttatacacgccacaagttgctcaaaattgtgctgttttctgtcttattttgagcctgattttattattgttttttcctccctaaagttttttcctcccttttatttcctattgtgaaaataagcatgtatattcttcagtatgccattaatactttgtgacgcctcatttcttttatctgctgtttaaaagctgtgagattcttttttctgaatactttttactttggccacatagatttcattctagtttgggcttattactatctatgattggtgtaaaacttttcctgggattgctttttctttatataaataagattatgtgattcagcctctaagtcagttctatcatctctagcatgtatcttcctcttttttggctttcatttttggttggcttgagtaataactcatgtgccttaggactgggtcatgggaggtaaaatccatggaaatactttatattttctttacatatgatcatttgctgggtataaaattcctggtcagaacattttccaacagattttaattgctgcctagttttcactccctctttgcctccactccacaaaccttagtaaaatagtaatagaaagctgttccttgatatattaagtagtagctgtcccaagccagaagcttcacacaggcttaattacaaaggattcacattctattcatgttatgaataacaaaaggaaccagtcagctattttctcactttttttgtattggtatacaatactggtacagttaaatgagggaaaggaaacaagtatgataaaagaggatgtaaattattatttgcaaattttactttctgtatttatttctgtctgtcctaaccacccactcgtatcctgctctccaaagtgtagccattgttagtaacatatgattaattttaagggggaaatgggagggaatacagaaatatatatttatataaaaaatatatttttaagccagacttttagtcttattagtatagaattataatcaacattttcttgttcaaatatcttctgagtctgtcattgtattcccttttaaatttttaattttcatcatcaaaataaatgtatcctctagtaatgacagtgtgaggaggttgggtgattcccctttgtggaaaacaagtataagaatgctgaagtaactatattaatatcacccaatatattttaaagcaaagaataatactagagataaattataaaggaatgaacatagcagggaaatgtgaaattctaaatacacgtgcacttacaacagagacacaaaatacatgaagtaacactgccagaattgaaagtagaaataggcagttaaatatttagagttgcaattttctgtattcttctttcaacaactggtagaataagtagacagaaaagcaggatatagaagacttgaataaggcagtcaaccaatttaacctgacatctacagaatacaatacccaacagcacattcaaagtgcatatgaaacattcatcaggatgagccatataatggcccacaaacataaagtttggtaataaatataaaaagattgaaattatgcaatgtgttgaaattacatagtggcgatttaatttaaaggaattaaattaaaagtcagtacagaaagaaggacaattcccaatatgtggaaattgaatcacatatttctgagtaatctgtgggtgaaagaagaattcacaggggaaattggagaatatttttaactgaagtaggaaaatatttttag

SEQ ID NO: 61025 - DNA, 749 bp, Bovine  19866881890318
  misc_feature (1)..(1): n is a, c, g, or t
nattctaatccttattctactttagtatatttatgggcaattaacaactatgaaatacttgagacacacccttctcattaagaaaataaatgtgatcatagccataaaatactgggagatcctggaaagcaggcactggtccacactggtagtactctacaggagggagaggaagctaactttcttatttgtcctcgtaccccagtactctactacttcacaagaagtgtagaagagacaaatggagctaacactcactatttagtagatatcttacacttatgcatgcaatacccttttgggataagtaataaacattttacatatgagaaaactgagggtcagagaagtaaagttatttgccaccagtaaatattaaatattttgaatccaggtctacatgatttcaaagtacacattataaccatacagttatggcaggaatattcactggtggtgaataatggtgaataaaagaacaggctatgaagttacactggattcagattctgtctgccttagttaatagttgtatggccttaagcagttcaattcatctcaccaaaccttatatcaccaccaccaccaccaccctggccccctgccccaatttgttaagttgggataatagcatacacttcatcagaccatggtatcgatgaggtaatatatgaataccacgtaagcaaagagactggcacactgtaagcactcaaaaaatgttaaatataattaacaaacctgtcaag

SEQ ID NO: 61026 - DNA, 1240 bp, Bovine  19866880284825
  misc_feature (1)..(1): n is a, c, g, or t
nattgattatattctttgcagccaaagatggagaagctctatacagtcagcaaaaataagactgggagctgactgtggctcagaccatgaactccttattgccaaattcagacttaaattgaagaaagtagcgaaaaccactagaccattcaggtatgacctaaaccaaatcccttacaattatacactggaagtgagaaatagatttaagggactagatctgatagacagagtgcctgatgaactatggatggaggctcgtgacattgtacaggagacaggaatcaagaccatccctaagaaaaagaaatgcaaaaaagcaaaatggctgtctggggaggccttacaaatagctgtgaaaagaagagaagtgaaaagcaaaggagaaaaggaaagatatacccatttaacctctctggtcctctaaaattgacgatgacaatagcactcaccctacgggttgtgaaggaagacgaattaatgcaagtcaagtgtgtaggacctgcctggctcacagtcagcaaaaaacatgtttgatcatcctcatcaccatcatttagtcctcattttgcacaagtggtgcatcaaaatggctcgggttaattctgtaactactaatctgagctatgtgagttctttttaaggtttgaccttgggggcctgaactcttatggagatcacagattctgaccctaaaaagagagactagacccaaatgagggctgtacccacagcacatttatagaagtctgagatgtttccaaataaagctccatgtatcaagaacctgagaagagagatactaagtcaccaaaaacattcagcttccttcaaggtaggaggagggggggggtgatttgttttcacaaatattaaactttccaattttcttataacagtggtggcttcatcaaaaagacggaattgtatgcccagattattatgagacaggccatggcttaatcttcacaatgtttttgtatttgagaataaagaggcattgagcacttatctaaaattgcaacagccaacagcagagaaggcaaaaagccctggaggtgcatggctgtgatctgcatatgtacatgctttacagttcattatggaatcacacagtcaaggcatctcagagctagaaggaacttcagcattcctctctttcaactctttcttcttacagatggggaaactgaggcccaagggaaggatgttagttacccagcttcactcagctagtttg

SEQ ID NO: 61027 - DNA, 2142 bp, Bovine  19866880352096
  misc_feature (1)..(1): n is a, c, g, or t
nttatcacttaggcatgtgacctgccttctttccccaaaggactcttcttaaccccctgccccaatgggctcaagactttacaacttgaggacacactcagccagggaaaaagcagtcccgatggtactctctaagctcactttcaactttagaagcccttccacacccttgacctcattctctccttacagtggccccatgaggtttgtgtgatatacaatgttagtccaggcaacaaagggcaatgggagctgatgtcccccagggaggccactgtgagagtcccagggcccatctgggtactcagaggagtcttgctctgatctccacctccaactccatcatcatctccaacgtgcctcagttttgacctccatgaaacagagtgatgtcctcatttaaaacatcacaaagcctccaaaaatgtaaaaccatgaaaaatacgaaaagttcagactgggctttaccttctaaactacaatcttccctcagcagccacaggggattggttccaggacccactgtggacgccaaaatccgaggatgctcaagtcctgatgtcgggcatccatatccacagttctgcatccacagattcagccaaccatggatggtgttccactgtgtacacttgttgaaaaaagtccatgtacaaacagacatatttcaaacctgtgttgttcaagggttagtcgtactttgctgtttgtacttacatgtcatcatagcaacagtttagcagaaaatcatgttatcttattcatcactatatcctggtgcccagcacaaagccagacacagtacaaaactgttattatgaattgatctttgtttatcagagaagtggggaaaagtgggtgagcgattataattttttaaaaggtcatgttatggagaaggtctcagtcctcctagctgttgacagtggccttgtttgtcttgtggctcaggtttaatctggaagctatgatgggccatgccttgggaaactcaccctcttcccagctggagtcacagctctcagccctctgggtcatgtgttactgtcagctcatcacactggagagataggtatctgtgaggcaccagaggtgtgtgtgtgtgtgtgtgtaaggggaggggaccaggagtgaccctgtgagcctgatacctcctctggcagcactctgccttagggaactgggcccccctcctgcctgcaccgtgagcatccctaccccgactcccacccatgagccctgaatatcagctccagcaggggcaactagagagcaagatgctgacttcctcttctctcaggcacaagcaagcccggtggaggcttccgagtatgctggtttgcagtgaggcctgcagcagaaatcctcagctccaagacagagcaacccgccaataatgacttttccttgcacctgtgcctgttgcaaccatttttatcattttgccacgcttcattgaccaatggattttttttccagctttgcactttttttattactattatttttatcttcatcattacctccgcgcctctgatggcatttagatatgaaccgcccatgaaccttcaagcccgattgtgccatgacaaaaatattgtcgtttacattctgtgccaaagtattatataaaaacacatcaacgaaaaggaaattcaggaagctgggagtaaagatatatagtcagcaaagtatataacttctggcatattactgcttaatcctaacataattattctcatccttttatttgattaacttctaatggttcctcttggtgttaaaggtcccactctgatcatttgattttagtgtctgctataattaccgataatgttctttgcaagacaatttaatgataaccgcataatggcctgtatgaagaaagctgcagggtttcaaagcttttgagtaatataaaatacattagactaacacaagctatcaacatgacagggaatgtttgatttacactcaggactaggttatagcattgtggatttttttcttttccttttctttttcttttttttcccccctctttgcagccgttgacaataaatgacagaacagttggacaatctgcaacttgctgattgcaagaaaaaactgtctggcaaagtttggaggcagccagaggag

SEQ ID NO: 61028 - DNA, 1470 bp, Bovine  19866880359879
  misc_feature (1)..(1): n is a, c, g, or t
ngcccggggggcctcggagcctctgcatgcgggtcgcgttcccctcctgcgggacctttgcgttctgagggacagactcttccgatgaagggagttgacagcggaggcctccctgtccccctctcactttcccttcagaagccctccctccgccggctctcagaggggaaactgcaaggggaaagccagttgtgcccgtttctggaaactgcacaggcaggaagtgccggcggtgaggtcccaggagaggaggaaagggggtctgtgcagaggtgtgccgggtgtggcggggacctctgctcccctcgggaagggcgggccctgggctaggatgaaggcctgagagagagacagtcttaacttcctgttgcttcattactgttctgtcacacctccgggatttcacaatcaatcagggccttttctacactgagtcctgtttctctggccccaagctgctgtaggtcactgggatggcgggtgggggggcagcaggcagccataagcccccacactgagttttgtgaaggtgttccaacgtatcttcttcattcgtcaccccctgaccctggtacggtccttcttccatgaggatatatattctcctttttataagtcagatggcatgacccaagggacaggccatccagaaagccctccttccacgtaggaatctttgcttcttggaaggcgaggttaaacccttccagtgaccaagagctcactccctcacaagggacctcattcccctttaggataattccatgtggtagaaagttgtcttcctttgcttgggcacctggctgtctcctggaatctctcccctattggtttgatttggccaaactttgggtatgatcctttctctacctaacagaactttagaaggtccaaggcctgttctaacacatcttaagccttcttctccaggtaaagatgcacctgcttctttgacctgtattcagtggcctcagcctccttcctgtccgtccctctctactgaaggtccctttgctgtccatacccccactccctgagcacatcaggagagcctgccatgtcctgtgtggctccaggaaacacctaactggccaggactagagaccacttcactcatccgaggtgaagtgacatccgaggaccacagatctgggagctacggagcccccagaagtcagggtccagtgggcccacttccctatcctttccccctgttcacctacgggtgctcagtggacaccgatccccagaaaggggacccaatgatgctagaatacacacactgagccagatcctgacaagcagctgtcctccttttccttgcacaggcccagatttatgacacaagtgctcagtcagccacgcgcttgggcctctccaagctgcaaggcagccaaggggcactgacacttactagaagatcctggaggaacggcaagtcacgttcaagacaatattttaaaattaaga

SEQ ID NO: 61029 - DNA, 3370 bp, Bovine  19866880360458
  misc_feature (1)..(1): n is a, c, g, or t
nagcaagcaaagcagaaaacctggctaaaacaaaagaaccgttttgtccaaatcctcttggtcatcactcccccggctctctccctcttcatcagcatttggtatctgggagcctggcatgtgtacctctttcacttgaaatcaagtaatcactcaccactctggccaaatgcagcataattgatggtgtgagtggatggagaaaatttcctgtcagaaaaaaaaggttaactgtggacatattacaccagggtctctgattccaggataatggcatttggacaaaagtagggccccgtccttttttatagcactttatgccccattagtattactgcaagtcccaggacctgtctgttcgggcacttaatcaaaagcaatgggttgaaaatcatgttccagctctcctcatatttgattcattccttctagatagaagaagtaaaaaacacattactagcatcaaaacagcccatgcattatgtgctaagcagttgagaaggctatcattgggttttatccctttgggtgcttggatggacaagtactttcctattcatccattcagtggactgaagcagccatatttcatttttttttcttcccctgacagacaatccgttagttttccacagatctctcttttaaagacacattcatgtcacttgttttaattgtaggccctaggcagcaaagcccagaatgtgtgttcgcacatagacgcgcgcgcacacacacacacacacacacacacacaactggaaacccactacttggatgtagctcctctgagagccaaatctaataataggagaggaacatttcttaggggaagaattaatttatacacttaattactcgggatccacttcaagctctccgccttaatgctctttcttttggagagagtttttaactaaacgcccagtgttctgacagaccccgaggagagcccgcctcatttagagggagggacctggcccccttcccagtccttgccaccgtggcccgctccccccacctttcccggaggagcgtgggcatgagccgtggaccggctaccctgcgcctggtggtaacgatcgctgtctgagcgagaggggcttcggctcagtgagctgccttcgcgcggctcccacgctctccggggcttccgagtggattttctgctgaatggctcagccccagcgtaacagtgaaaaacgaagcgatttcttctgtctgttcaaaatgaggcaacagccaggcccctcctcattcaggagacctctgcctgcggaatgggcttctcccattttagggaatttgttccatttaccaatatctcaacaaagagtggaggaaggacacagtcgattatgaaattgctccgggacgagcgggttacctctgctggatgaaagagggagtgtagtgatctctttctgacatctgcaggaagatggattggacaaaggggcaccgccgcatccgacagcccggggaggctgcccatgccggctgcgtggattgctccaacagactgggaattttgggcaccagggttcccaaagtgagctccagctgggtgcggagggggcaactccctgctcccccagaagctgatgcaggccttcaattgtccagattaggagggggattgtggtaggaggggggttgtggtaatgtaggcaaatggagcagagacccagggaagggggccacagcatgtgacccacccctgattctgaatgcggacctgtttatgcccccctagtgtatcaccaccccatcagcctgccaaggggcctacaccgggctccactgtgtcaacacttggggctcagccattgtttgctgatgagttttgctgttgcacatgcctgatacctaggatggggataacacagcacaaaactgacatgtcatcacattaagatgaatttaggttcaatcctttagtgacttcatagaatattttacttaaattaagatatcatgttgaaaaataccttttttaggattttatatcctattatatgtcaataaaaattctatatgctacagagataattatttttaaacctcgagaaaatttagaagaaaattaaattgaccatttatcaagcctcaggagagagagatgaaaatgatttttctaagcttagaagcaatataaaaaccctcagaggaaaagagtgacagatttgactacacagaggaacaaaacatttctgtatgttgaataaaagaggcaaacaagagattggaaatatttatggctactatgataatgggttaatatctttattatttaaaataatcataataattgataagaaaacatcagtcccagtaatatgctaaaaacacaggcataattcatataatagaaaatacaactagtaaacaagaatacagaaaaatgttcagcttcactagtagccaaatacatgtatttttaaaaaaattatttttgtgtattaaatgaatttgtcaataatctaatattgacaacagcgtttctcctctactgggattctaacctgaagggctaatcaaaaagatgaaaaagctaatgtgtaaaagtctatcacagtgtgacttacaacaacaaaaatttaaaacaacccaacatcaataagaggtgcattcagtggaatatcagtcagttttaaaatgatggccatgtggacaaggatttcagtattagtttaaaaagtggtacacaaaattgaatgtaactatgatttccagtacgcagaaagcatgcatatataaaaaaggacagaagtgcattaaaaaatcactctatatctactagaatggagaagattaaacaaaacaaaacaaacaagcaaacagatacaactaactataccaaataatagcaagtctgtgaagcagctagaactcatacattgttggtaggagagtgggatgctgagatggtacagactctttagaaaacagttgggcaatttcttatcaagttaaacatgtccttaaccatatgacatagaagtctcactccttagtatttacccaagacaaatgaaaacatatacctactgaaagtctgcacgtgaatgcaagtagcagctttattcatgactgccaaaaagttaactcaaaggttaatcaactggtacatggataaaaaaagaaatggtacatccatacaccagtctattactcagcatacaccagtctattactcagcaataaaaaggaacaaaatactgatagacccaatatagctgaatcaacatataacaacactgttatactaaatgaaaataaaaacagacataaaaaactacgtatcatatgattctatttcaatgatattcggaaaatgcagaattatagggacagaaaacaagtatca

SEQ ID NO: 61030 - DNA, 1194 bp, Bovine  19866880383909
  misc_feature (1)..(1): n is a, c, g, or t
nacccattagcaggcagcgagcgccctgagcagccgctgacacgtacaaagcgtcgccggtgggtggaccgtttgtttgcttttcggcagtgtgaaggttgagttgagtcattttgcacccaattactttgcagtaaatttgccggatggttcttgtcctgcggtattgatccagcatctcaccttgagcttgtttattgacacatcaaattcagaagtcaggcccgctcgattgaccacttcccaattagggcatttatatgatgtcaccgaggctccttgtcatgttccgaagagagccatttgtccccccaaccaccgccgccgcccgatcgcctgcaaccaagttgccatttttctttgacctttccggagacagatggcagtccataaaatacatcattagcaacgtgtcattttatcttgctgctctttctctacgtgaaaggtgcctcattcaacaaaagattctgctgccgatttctccccagagagaggcttacaactgtttatttgctggagtaacggacggcagaaacaagcacttccttttgcatcagggggatgccccttggccctatttggaaaggaggtatttgggcagtgacacagagcagactacaggggtggggaggggatggaggaggagtaaagaacacggccagatgtcaataagacggcacccagtgacgtggtgatttgatcacacccgaacagtctcccagtggagagtctcagtccatttcagactgctgccttttaatctgcctgtgtgtgttgggggtggaaatgactgtgaaattcagaatgtcgtggagtgtgtgctcttagccttgaacttgaggtcagaagattccagcccttcacacagcaaggtagcactttttactccacttctgggaccagctcccagtggaggggcagtggggtgaattcaggtcctccacttcctgacataaggctagaaagagctagtgtggaagctccatgacggcaggcaccaaagacaggagggccagagaaggctttgcccgaatgcttgctgaatattgattgacagaagttcaactcagcatacatagaaaggtacatattgtgcaaatactaaatatatattcgtaacaccaggatccgtagtttgcacagaatttcagaggtcatttatataatgtggagaggaaatacgactggctg

SEQ ID NO: 61031 - DNA, 1748 bp, Bovine  19866880454288
  misc_feature (1)..(1): n is a, c, g, or t
ncagggcacagtagagccctgtgtcctacagcctcattggtggacaggagatttcctcggcctacctagctccctggaagagcaccaaatatgtttcctagtttgtggaagggtccagatgactgcctttgattgtgacaatcatcatttaatattctgatgaagccaccaaattcaattatcggttatatttttctaagtgtagtcacatatctctcagtcattcaagcagaagtgttcttctcatgggacttaatgagattcagaaggtgtcaaagtgtgagtaacaaggtcagactgggagctgtctacctattaaccttccagtttggtaaccaaacagccatacccagcacacaaggtgggccctagaacttgtcactgttaatactgtcactgaggcaaagtggcttgggtttttctaagctattccaggggcaatatcatgcacacacacacagggggccaggaaggtgagggccctttccgcacagaaatcctgccctggacacccggtctttgcttgtgtgggagggatgtaggatcaagtctttgcctgccagagatgggggtgatttagggtcagccttcctcactgcaggagagactggccagaacatgtgccctgttaatccagaagcacccaccagaaggaccaagcagcccctcattggctgcctgttctgcttggccagcctcgcgcagtgctctctatttctccaccactcacatccagaatgaagtggtggtggtttctccctaggggcgatggagtggaagacggtgttcggcagtggactcaagggtgaaggccgccggggtcgggggctggctcttgacaaaataagggctgctcttgctgatgtcacttgtggggcaatctttgaaggcttcagctcatggaatcatgaggattacattctctgtcctctgccctggcatgagtaaaggaccatccctccattttacagatgaaccagcttaggtagggaggccaaactgttctgacttcaaagaatcgaggaaagcacatagcttcgaggaccacttctgggctagaagcaagagccttggacagaatcatccagaatgagccctgtttattcattaaattgcctgtatttgggtcctgatgggatttggaagcatattcactgtgaaatatgagtgattccaacgcattattctcactcttcctgtaaataaaaaataagtgccagagagccatgtcaggctccgttgtttgatcgcttctctcttggtacgtaattttgtttcacagcgtcaagtaagggggacttaagggggtgggaaggaagaagccgacttctgtcaaagtacagtctcattggttaacacctgaggggaaaatgtctcaaaagaatttaattcaaaaaatcctttaggcacataggagcttcttccaaccagtaagagtcagacagctatggagagagagacatcaataaataatcagcaggcttagacttttaaatgggaatcccagcatcactacccagaggtagattgcatcttttccaccagcctcagagcatagcttcatgcttgtaaggactgggggacttcacttgctacagttgcaatctggcccttcttcctaataagatgcacatctattcttgtatgtttcctttatgcttcatagacaaagagcatgtaggaaatctacagcatcctattgcctatctatctatatctcttaagttccctatatattatgtaagaaa

SEQ ID NO: 61032 - DNA, 2457 bp, Bovine  19866880489584
  misc_feature (1)..(1): n is a, c, g, or t
ntctcctttccctatttggaaccgtctgttgttcctgtccagttctaactgttgcttcctgacctgcatacagatttctcaagaggcaggtcaggtggtctggtattcccatctctttcagaattttccacagtttattgtgatccacatagtcaaaggctttgacatagtcaataaagcaggaatagatgtttttctggaactctcttgctttttccatgatccagcagatgttggcaatttgatctctggttcctctgccttttctaaaaccagcttggacatcaggaagttcacaattcacatattgctgaagcctggcttggagaattttgagcattactttactagcatgtgagatgagtgcaattgtgggtagtttgagcttgggagtgctgttagccaactggggtgggaaacccatggacagtcctcggggatctcagggctgcacaactggagagagcagctctacaagactgccttttacatctgaagaagtgattcttggagaaaagacaacacaagacctgtcctaggagcggggatcatgtttcagcagctaggatggtatcggccgtacgaacctgcttttcctagcaaactggacagacttgtgtgtggccccttcctctctggtactttgcctgctgtatgaatgaagattgtattcctctggaaatattttacagtctaatattgagtgtaattaagaatataatcatgttatcaaaaatggtatttaactctgttgtagtttctttaacattcatgtggataaaaagtctataataaaaaaactatgaagtaaaagttgtgttcatgtaattataaacatctgcttaggggcaacactaatactttttagagttattttggcttaaaatgtttgagtacattatttttggaaatggaattccttcagaaatggttattaaagtctaagtttgcctttggccattgtcagcagctggagtcctcccccatcatgatggtatctttgtatggataaggaaaggttataaattttgactatgtcttctaacagtattggtgagggagtcggtagtgtgcctttctccttactgtgatgttgaatcaaagtccgtgagataattttatgccaaaaattctgcctctcagatgaaagagataggccaaaatggtgaccccctggagccaggatttctaaattctgaggttgaatggaagtctagtggatgtgagagtggatgctctcctgccctggaattgctaaagaccatcctaactgaagaggcatctcaccaatggcatcccttgacagacttcagatgaagtttaaaacgcattgccatgatatttaatgcttatcccccaccgtcttcattatcatgaactatcaacacaagcttcacaattagcccacctttgagataaattttcttatccttatctgctgcattaagaaaccaaaggagggaaactcattagtgattttcttcccagcccatgaaggacgggaagctggatcagagaagggatataaacaaagtcctggggtctgaggacaggtccccaatgacactagcaaaaaacaacatgaagatgctgcatctgaccgccaagaggaggttgttcttccaggagcctgggcatggggctcacacagcctttcggacatgacacacatttctgaaactggcacccatgcttggcacgaggagagaagttggtcagtaaagctgatggagaattgcctcctacagaggctctagattacacttagggatggaagcctagcatccttagctttgtactctaagccaataacaccggaggtgacagaaaattaccaggaaaggcacagacctgtcttcatgaccagccaccaggggacagcagaggtcatcttctgcagaaactaagggaccagataacttttcagagtaagagcagaagctccagaggagcaataactaaagacttgcagatgaatttaaagtctttttcttaagcagccatgtaaacaaggtgggccacagtatatagggtctcaaagagtcggatacaactgaagtgacttagcacgcacgcaagcaagactgaaatgtcatttttttctttccagttgcagctttatttgtctcagagttattagtgctaaaataccagcaaatgatcttgcagcaaaagaaaaattagaaccagataaattaaaatatgtctgagagcctagacaagttattcatggcatagccctgaattgagttaatggtcaagctcagagtgggagaccattgacctctgctgctagaatgctgaaactacattagtgccttgtggatctccagctaaattccaggttccatggaagcccagctctgcggctttccttgagtgctggagactcctgttcctttttctcgtggcctcagagtccccccatctttcaaggttttttgttttcttttcaat

SEQ ID NO: 61033 - DNA, 1291 bp, Bovine  19866880507024
  misc_feature (1)..(1): n is a, c, g, or t
nggactgggctggtcctggcaagagagactcaaagtgggaggggaagaacttaacagtcttcactgctgactgtaaagatgcagcagagcatgcagctggcctctagttgctgagagtagcctctagtggacagtctgtaggaaatgaggatctcactgctacaacttcaaggaagtgaactctgtagtaatcacctgtgagcttggaaggggacctcaagcttcagatgaggtagggtgaaaaagcagggtaaccctacttatttagaagtaaatacggtaaagttaacctcctgttacatttctatgcagagccctaatgagaacatagaaaaatcagaactattttaaagaagggtttaaactagttaaagaagggtggatattcagaggccttcgtcacttacaagacatctgagtacctcagtgagattatgtaaagtttatacatcaagcaagatctgagaaatttcacacggagccaacaaacatctctgaagtcactagcactttgcagtatcacagactcttcagtgatcagcattacttctcataggaggtaatggttaattaaatgaaaacagaagcacactattattaaaagaagtttctttaaggtgatgagaattatgttcagttattttagtagcactcaaactatttccctcattgtcaaaaaacaaaaacaaacaaaaaaccccagtgtgccaaaatgttgctattcatatgtcttaaatacatgcaaacttaccacactatgtgttaaaactaaagattcaaaaaaaattaattcatttgaaaatcaaaatagtaaacttactacatattaacataaacaagtttatgaaaactaactatttcccaaagtaaggaaaaaattagtgagaagagttttatatctttgcaaacctcttaatgtctggcttaaggcagaagaattctcatcagagtctatgtttaacttcttgcaaaatcgcaagccttgtaagctctggaacacttcacttgtcgatgtaacaagagaatgagagtgaaaatggcaaatggcaccttagtaccattacgaaaacagttttcacctcataaactccctgagagggtacctgggacaaccacattctaagatcctctgaattatttctgaacaagttaatgggtggtttttgttttagatatcttgctttagattaatagtgtacagatctatgaattcactgaagcggagaaaaactagggagatgtacacaaactgaaaaaaattcatgatttgctaaaattacaaccctaaaat

SEQ ID NO: 61034 - DNA, 5279 bp, Bovine  19866880568555
  misc_feature (1)..(1): n is a, c, g, or t
ncaccccccagattcatcatccaaagactggctggggctgctccacccttccgtctctctgtgcctcagagagaaaggcaggcatcccatcctgctgtccacacctgccatacgatagatggcgggctctaaataattaacgagaatcattttgtaatgtgctgaccccggaacattgcacatcactcattttgatactcctgctctactctgctccctctccgtctctttcattccaacagctcagccttctctcctgggcgtccaccaaacaccatgtcaaggcaagtgcccctctgcatttcctataagatgcatcatgtcagcaagagtgtctggcctctgagattcctttgataacacaagtgattggcataggtggctggaagggggaaggtgttgaggcctttcccttcaacacctgctgctcctgcttaggtcgaggggtgccttggattcctgggactcacccaaaagttctggccttgggggaggccaccctaaagagccattggcctgggagaagaatctgatgacagtctgggtgactctgcactccagggccttatcctctatgtgagacaaaaagccacacacaggaaatactaagatctatacaagttccccgaaaaatttcctctgtccctgaatttcatgccagcctatttgtacagatatctcctgtgtgcccaggtctgtaaggctgatgtggaaaagcatgagagaagactaacccccccttgtctggatgcttgttatccaactgggaaatggggactcaaacacaaaattattaagaaaaattcaaaagtctgaaatgttctagaagacatgtaagacattgatgttcccaattacctctgaagagtagaaaggagagaatagaaagaagtgccttttttttttttttaacaatttcattaagatataattggcagataaaactgtgtatattgaaagtgtacaatacgataacttcctatattaatgtatattttgtgacattattaatactatctagttagttaacccatccatcccttccttacctaggttctggtgtgtgtgtgtctgtgtgtatgtgggtgtgtgcgtgtgttgaaaatgactaagatctactctcttagattcatattcctcaaggatactggtctttaattttctttccttacattgtccttatttgactttggaatcagagtaatgctggcttcataaaatcattttggaagtgttcctttcttttgaattttttggaagagcttgagaaagattggtattaatttttctttaaatcttttacagaattcatcaataaagccatcaggtcctgggtttttctttgttgggaagttctgatgaatcatcaatattctattcagattttctatttcatcatgatttagtcttggtaggttatgtttctaaagtttatccatttcttttggttatccaatttgttgctctgtaattgttcaaaggattcacttataatcccttgtatttctgtggtatcagttgtaatgtctcctctctcatttttttatttgagtcttctttctttttctcttagtctagctagagtttttttctattttgcttatcttttctttaaaaaatcaattctttttttttaatattttatatcattttctagtcttcatttcgcttatctctgttctgatttttttgactccttctttctgctatgtttgaacttcatttgttccttttttaattcttatatgttccaggataacttctgtagattcactgtgacttcctacataaacattcatgtcattataccagttcagtataaaaggatttaattcgggaacagccagatgaaagagacgcataggacaaggtgagcaggaaggagtgcggagcttccctgccctctccagatgcttctctctcatcacctccgcgttttcaccaacccagaagctccacaaagttgtgctttgccttgtcactctttaggctctgtactgccccaatttttttattaatatatcaatgtattacattttataattttttaaacactcttataaaaagagatcaaatcaagactcaactgtaagcttctctgaggatctgtgctgggcgttgtctgtttctgttatcacctggaacattccctaggcagcagagacactgaaccaagaattattgaatgtggaataaagacagtgctgtttgaatgttgagctgaaagtagaaacgaacctcagaagaaagggcaatggtgggatgatgaccataaaagtttcaagaaggaaccagaagtaggatcaaaatggcagaatcagaagactctaagcttaccgctcccaaacacatcaaagctacagctacacgtatagcaactctcactgagaaggacctgaagattagtagaatggcttttctacaaccaatgctataaagaaagacccacacggaccctagtagaaaggaagggcaaacaagagagtcaggacccatacccctagtgggtgacccagaagaggagaggcatatcacaggcttggggagcttccctaagaagcaaagggtttgaggctcatattaggcattccagtcttagcatccagcccagagaagacaagagcccatagctggtttgaaaacaagtgaggcttactggaaggcttgaagaaactgaagttccactcctgaagagcatgcacacagatttgacacttccagtcccaacacagaggacgcagactgaaaactgccttgtgctctggccagcctgccaagatggccccaacacacaccccagcctgctctgcactcctgctccagcccctcctgctccagcatcacttccctctggatgcaaagctggatactgtcatcacttttgcacatgtgtgttcaattcagttcagtcactcagtcacgtccgactctttgcaaccccatggactgcagcatgccaggtttccctgtccatcacaaactcccggagcttgcttaaactcatgtccattgagtcagtgatgccatccaaccatctcatcctttgtcatccccttctcctcctgccttcaatcttttccagcatcagggtcttttccaatgagtcagttctttgcgtaaggtggccaaagtattggagtttcagcttcagcatcagtcctttcaatgaatattcaggactggtttcctctagagttgactggttgatctccttgaagtccaagggactctcacctttcacatccatacatgacaaaacaaaaaggcaaactatgactgggagaagacattggcaaatggcacgtctaacacagagtcaatgaccaaaatatgagcttccccagtgactcagcagtaacgaatccacttgcaatgcaggagacacagcagacttgggttcaatccctgggtcaggaagatcccctggaggaagagatggcaacccacaccagaaattttacctgggaaatcccatggacagagagacctggaaggttacagttcatggggtcacaaagagtcaaacacgactgaagcaactgagcacacacgcatacaaaatatataaacaattcatacaacttcctgctgctgctgctaagttgcttcagtcgtgtccgactctgtgcaaccccataggtggcagcccaccaagctcttccgtccctgggattctccaggcaagaacgctggagtgggttgccattgccttctccgtcatacaacttaaaattttttaaaaatctgggtttcaaatgggtaaaggacctgaagaggcatttttataaagaaaacatacagatggccaacaagctgatgaaaagctggtcaacatcactaaccatcagggaaatgcaaataaaagccacacttagatattgcttcacatctttcagaatgactatcatcaaaaagacaagtgttggcaaggatgtagaggaaactgaaccctcctacactgttggtaggaatgtaaattaatacagccaagcaacagtttggcgattcctctaaaatattaaaaatagcgatttcactcctaggtatacattcaaagaaaatgaaaacactaattgaaaatggtatgtgtacctcaatagtcatagcagcattatttacaatagccaagttctgagagccatccaaatgtccatccaagatgagataagaggtacaaactactagtataaaataaataagttacaagaaggtaatgtaccacatagagaatataatcaatattttataataactttacatggaatataatccataaaaatatttaatcactatggtatacacctgaagctaatattgtaaatcaactatacttcaattgaaaaaggaaccccccagattgtaactatatgtggtgataaatgttaactaggcttattgtggtgatcattgtacagtgtatacaagtatcaactcattatattgcacacctgaaactaatataatggtatatgtcaattgtatcgcaatttttttttaatttggtagagaggctgaagaagttttaaaaatctaagtaaattttgaacttttgtaaacaacttaactaaatagtcttaatctaaagaaaataaaaattttaaaaatattgaaaaagcaacagagtgcagatgaacctatttgcagggtagcagtagagatacagagttagacaacaggtttgtggacacagtaggagaaggaaggagtgggacaaattgggagaacagcatggaaacatatatattaccaaatgtaaaatagatagcaagtgagaatttgctcaacccagtgttgtgtgacaacctcaaggggtgggacgggatgggaaatgagagggggattgaagagggaggggatatgtatacctgcagctgattcgtattgatgtgtggtagaggccaacacaatattgtagagcaattgtcctccaataattgtattttgttctatacttaatattgtacaattataatctttggtaattaaaggaaaaaagaaaaagaaagaaccggaaggataaggatttagacaaggagaaacgagggaaatgatgtctgggttacaggaaaatgttagcataagaatttggggatgaagaaaaggagaaagggagaaataagcaaatagaattccatgagccaaggcaggaaggtagagatggggaaagaggtgttgccagtgaatgaaggagcatggagataaaccagggaggcagcatggagccctcttagggaggcgttggctctgccctaaaggttggaaggatgtgtatgtggttg

SEQ ID NO: 61035 - DNA, 1673 bp, Bovine  19866880586684
  misc_feature (1)..(1): n is a, c, g, or t
nataaaagagggttagacagtgagcagggttgagtggtctgtgtctatctaggccggcgctaagtgtgttgagggattcattccagtcgatgaaaagctgcgtttcaagttgcttcagattcacataacagttcacagcaaatgctccagaatgtggtccacggcatgtgggaagctctcacaggttaagtaaggagctgggttaattttgtcttcgtctggtgctcaatatttccctgtcttgactaagatgtccctcatgccagcattctgagccccaccaacatcatctccgcagtcatctccaatcataacggtctcctcaggttcacagccagtgccccgcaatgcctccatggctttctctaaatcctaatcctttgtttacttgataaccacacataaaagcataatatccccatcatttcatggtcagaaacaaagagtgtgagtgactctttgagctgaggaaggaattgacagattgggagacagaggttactcccctcagagaacaccacgtggaggagctgacccaaagactgtaacctcaaattcccaggacctgtcatcacacacaccaccacattccacacactgccttcatctcttaagtttacagcccagagttgttcaagaagttcaggaggcaacatcattgcccagtggagatgcctagcttcaagcaagcagccgcccctggctgggccttagagaccttttgtggatcggatgacagatgaggaagttaagtcctcctctaggtcccagtgctttgatcataagacagtctgtgactagcctggctaggatgttcaagctcaaaaccttcttgagtggttttcctaaaggtgcatctctgggagactcttagcgttactacctaatttaaggagttagtcattaatttctgaagccgccttggtgcatcaagcctctcttgattagcatcgtgcttcttcaacctgtcactctgcagccacttgagaatattagctcgttcctacctgcttctaggtttggatgtacaaatcttcaagcaggcacaggactcacctctctggcaaagcatccgttctttctgcaagcccttccaaaaggcactgtctgggtgctgtatcagagaaccacacagataagtcatttgttaattgccaggacatcatggtgcaggaggaaaggcaagctgctgacaaaggaccccataaaccatcagtcttaaatgctatggaagaatcaaccacttgctcactttgacgtgaaacaaagaactacttgtccaggcttggaagcacaagatggaattattttaagttttcaaacgagagttttagccccactttactctctagcttcatttcatgtgatgaattatttccaccaagtaatactcctcattttgcttactctgttccctagaaaatgcctggagcaccctctcccaccaagcaaataaattccagcctcttctggaagtctagttcaatatattctataaataacttctataaatttagtcatcactatttcagcacatactcttcttccctccctttaatttatatagcacttagtaaatgcaatataacactaaattataaaggttgcttatggctctctattttacagcaagaatataaaaccggatcaaaggtcctgggatacagtcccta

SEQ ID NO: 61036 - DNA, 1694 bp, Bovine  19866880761335
  misc_feature (1)..(1): n is a, c, g, or t
ntaaatcatatttaacgtttttgcttacttcatctgttctttagacattgccagattttcttctttgttaaaattattttaatttcactttatttgtgcctttattgtcagtttcatcaagactaagattttgaaggtgaaaaacaatcagtctagtctcttgctagttcaaatcaaataaaagagtatatgtacccagttcgtttctctacctcttccaaaaactgtccaaatatatctttcacatctttaaaaaaaaaaaaaaattaaatactttgagcatttattcaataatcagcgccttcctggtctggttgatggtgggatgtaatataacgcaagacaatcctcactgttcttaacatctgtctttatgtacagtcttgactttcatagctgagtggttctgattcacagattgctgcccctccaccattcccccagtatctctttagataattaagtagtctgtggacataagcaacccatgatcttgtctctcactctggtgcaacacgttgaggtttagacataacaaataactgcctattttctttccttcatgaactttgttttactgagccctttatattcctcagctgaatttctttcttgcttgcttctcttgacagcatgtatccctagtggttttgctgattgcccccttcctttccaaccatgttttatctgcatacatcagagtgtttctatcctttgaactttactaaagaccaaaaaggatggtgctgttcacacccagggtcctaacttttttcaccacgaaggttgatgttcagattagttaagtcacttataagtggttcagaaattctgtccagttaaatatgtgtggtgtatgtgtgtgacgatcaaatagcatgaatcatcacattttgtttaaattgtgtttaggattatgaacttttctagcagttgcagccaataatttccccataataccagcccagtttccaccttggagcatattgagttgttgtgtttagtacaatcaagagtaataacagtagagtgtggtgtccagaggttgtcagaattctgttgagttctttttaatatcttccatttcaaagtttttataaatattttgtctgttcagactaccttttgtgtgtggggatcgaggggcaaattttatcttgggagtggaattcctgtgttgggagcctcaaccaggaaatgtgagctatactggatacagatagcctcatgatcgcttttatgataagttgtctgatgtgttcacataatttttggggtaggaactgttttctcttggatattatagctaactttatatatagcataactgccttaagtctttttagtaggaaataaattacataatgtgtatgtatggatttatatatacatatacactcgtataaaaatcttaacagtaggggttgtctgcacacattttaacagtattcaatgattttatttgttagatctcagtaaaaaattcctaagttggcttgcagacatcttcctttcatggacagaccatcagggtaaattttttattctgccagggtcctaatttggtggttctgttagtatgccatttttaggcagcttgacaattaagaatcagaactgaaactgacataaaaaaaaaaaagcttcttgagtggtctctgtgaaaggtactacttcagattacataaaagatt

SEQ ID NO: 61037 - DNA, 1616 bp, Bovine  19866880847709
  misc_feature (1)..(1): n is a, c, g, or t
naaaagaatttctaaaaggcaagaacactaatgtctttcaatcccaagtggtgacatacaggtagcaaagaaacatcacatcactgagcattccatctgcatcagttggcttaaatagagaaggcaagagaggaaaaaaactagtaactttttaagcactaaagccaagtcaaacagaaaaaagtttccactacaaaaattgttgggaagcccagtacaaaatagccggttggaggaagtccttgggaaaatggtgaagggccagaaataccccagcttgatgtacccgggcagaaaaacatctcctgcctttggttatgcccggcaccaagatttaataataaatattaaggatgttgcttgagaaaacgggttatgggataagctcatgggtcacttagagcacgctgtccttgaaatatttttactgattaggtgttaaccccatacccactctgctgactgtatactctaagctctttgttaatacttctataaaaaggcttgactgcagaaataaacttgtcagtccttgcaagagactgtccaagtgtccttctttcaggttcgttgcttccaagtcccggggagaaaatctccaccaaaaatgacattcacactcggaagttttgctacttaaaccacaaaattaaaatgaaagagtgttctactagttttgcttcttacctctcatcacggttcttacagatcgaataaggttcattagctgagatttaattcctggctcttctccgaatcctccaattccctggtctgttccccagccaactgcataacataaagatgataagctgtgttaaaatttattaagcacttgccttgctccctcattagtcaccttctaaaacgtaactttgagtctctgttaaagacataaaatatagtcatatgatttaaaaattttagcgtgtattttttacttttgataagcagcacatttaatttcccttttaattttataaaataaactatagcctagtaaattattccatggcactgaattcagtaaagatgactgttgtgacaacctaactgttatctttctccttttttaaacaaagcatttttcaggtcagaactgaaaaccaaagcatattgtcaagttgaataataaattagttcaactcagaattcataaaaaccaatgtaattattagtataaaggtgttgcatctaagtttcactatgtgttcacctggggaaatattaatacaaacctgtccatagcttggataggtcttcatagcatggcaacagaggtatatatttttaacttgaccattcctcttcatttctcaattttgaggtgaggaatttagcctactatctaatcccacttatttttagtaaatgggtcttttaccttcttctgtcattttcctgataatataaatcattacttctttacctttatttgttcatctttttttttattgccttacacattcttctagaggctcacacatcctcatttctgcaatgtccttctcttgtccttatttcaggtccacttttcatatctcttatgactaggtatttttttaatctcctatgactacagggcttaattaattcctgacacactaaccatttaa

SEQ ID NO: 61038 - DNA, 1995 bp, Bovine  19866880893519
  misc_feature (1)..(1): n is a, c, g, or t
nattctaaacatacaattcatgagttttagtatgtttacaatgttgagcaaacatcagcacaatccagttttaaaacttttctggaagggatagctagggagtctgggatcgacatgtccacactgctatatttaaaatggataaccaacaaggtcctactgtacagcacagggacctttgctgaacgggaggggagtttgggggagaatggatacatatatatacagctgagcccctttgctgtccacctgaatctatcacaacactggtaagtgactgtggtccaatatacaataaaaagttaaaaaactttcccgtaattccccaaaggtccttttgcccacttatagttattcagcatttcacttttagccccagactatcatctataaatttgctatttctggacatttcatataaataggatcatataatatgtggtattttgcatctggtttctttcatttagcatactgtttttgagattcatccatgtttccaggatcaaaccttaagatttattggaccacataagtagcatgaattcagaccaaaatcctgtgtgagatccggcttgtagacatagattctgatggaagaaatttttttccatccaacactagggctgaaatagacaggtttacttgttgacctttcctgagtggcaggtttatttaccgtttgcccttttacagagtatccaatcccaccttcacgttagagtcgcacatgtagacttcttaccttatctccagcaaagccctcaaaattaaaattcagggtcttcagatttcagaagagactctcagggcgagtctagccttggaacccatttagctgccagagttcttgctgtcacattatctttgttatctgtgtatttctttgattttgatactttagtggtagatttaaaatataatttttatattttatccagaattttttatttacatggaaagggaacttcagagccttttttttccctgccatactaagcagaaataaaaggttgggaagggctgcttataagagtcatctgctcaccttttcagatctcagataggtggataatgagaggaaattatttactttctgagcagaagaccaccacagtccctgcctgccaccccctcctcatcctcacttacctgcatagcaatggggagtcgcattcatgggtccattgtgtttagcgatgatctgcagtcccatctgcatgtacttccctcaaggacctttgctaattcttttgccctcctggtcagtaaaaacaattgtttcttagaatggattgggaattgccagtgtctctgatatgcttagctcatgtcaatattgataactgaggtggaaaaggcaggaattagagatggggaaactgaggccagagaggtgaggtggcttccccagtctcatagagaactggaatttgagtccagtgtgcagactctctgggacaatactctttcctccatgccactcttcctcttgttggtgactaagggaaatggagtgggagggtgtagcattgatacagtaattgatataagaagtaatgtttttggagattctgtgggttttcttcatctttgatttcttggtctcattgtcccttgttatatgagagtagtggttgacaacaaacaaaaattctgctgcttaatatttctgtttttaaacattatgaatcatttcacaaggaatttttgacttctcagcatgttagagctgcccacctggtttgaccttttaactggagaaggagggagcccagagtttcaaacccagtccatcaacccctcttcaatgaaattcttaccctattttgagggaaggataacgttattaatgtcctttctagcaatttgaaaaaacagacaagcatggcttagagggaaatccttggtgattgaaaatatcattagaaacaggctcctggtgttcacgctgtcatttccaagtgttctgatgagtttcagttgagcactgcc

SEQ ID NO: 61039 - DNA, 1374 bp, Bovine  19866880929237
  misc_feature (1)..(1): n is a, c, g, or t
ncacaggtacgtggctattttctagaagtaaggtgctgtctcatctttaagttctgtgtgtcttcctcattttattcccagatagaggatgtcctccaccctacactgaaagaatagaccagaaggattctgtagcctcttttagatccagtgcagatgatttaaacatggtcgtctggacactgatgtccctttttgtcatgtcggcatttgcttgaggactgtatggtttagggcaatgaaaacaaaaccccagcgtgtcgcaggtactttttagaagatcaacattactttcatttctttagagatggaaagagctgttggaagacagtaaatgacagaagacttttttcttgttgggaagacctattatctatcttgaaaataacatgaaaatgagtattggtgaggctaatagctcatgtatagataatgaaatgcttctgaaagccatcaatccagataatgatcaatataatgcaaagacccagtataggttagcagtcaaggaggctggctggagggaagatctaaagttagggccctgtgttttgtagtgacattgacttagaagtctgtaagtgggggaagtaattataaaccaagggagatcattgtcctgtttacaaggcacttgttaagccacagactttaacatttcatgtagggaccaggaaaccaaaaggaacgtcaattaaaaatagccagggctgaatcacagagctggaaggggtccgagagagcaagagaggtttcatctgcactctcttccagttcagggttcatagctctagatccgtggctggttgatggatctgggttttgacagaaaaaagcagagactcctaatcactgggccacaggactgttactgacatgacttgattttaatgctagttctagcttggagccacactctcctgggatattgggcacagtgtctttagtttaaggtaaacgggcagggtttgactgaagtgttccattctggtgtcccagaaagtgaaagcaaaagtgttagttgctcagttgtgtccagttctttacaaccccatggactgtagcccattaggctcctctgtccatggaattctccaggcaagaatactggagtgggtggccattccctccttcaggggtcttcctgacccgaggatcgaacccaggtctcctgcactgcaggcagattctttaccgtctgagccatgtcccagggaccacagcaaaatcgtgtcaagttcatgaaaacttaatgaaatggtaactataaagcagcccacactggagctgccaccgagtctgtggtctcccaacacgtttaatatcttctgaggcctttgggttctttgtgtggaaatgcttgggaagcttggg

SEQ ID NO: 61040 - DNA, 1658 bp, Bovine  19866880933341
  misc_feature (1)..(1): n is a, c, g, or t
nctttcttttctcttgatcggcttggaaatcaccaagattggcatggacaaaaacctctgaaaattattatgtaacttgtaaattacctagttggctctagagtatcaaaagtattgagattttgccaaaaaggataatttcctagtttgtgccaagagagagttagcctgagctggggcggtaaagtggatctacatctcaaaaagagaaagatgtgaaaaaggatatataacttagaaacaagtgactgcattgtcaaaatgcaaggcaatggatcaatacttggaagaggacccactttagtcaaagcctatctcttggagaatcttaaggcagcttccacagatgttcagacttagataaactcctctgatgtgttacacatttagtcacaaaatcaaaatcctctagggacccagggatattttctaaaaataaagtgtttgatcaaccttttaaaaatatgtaaaacatattttaaaaaactttccaggttcagagagtacaaatctgggcaagttcccatcctagttaatcccagagcacctccaagaaaagaccgtatatctctaagagctgtgtccttgctgaagagggaacacttctacagcaatggtaaaaacctgtcactgctcctttccctgcaaggaagcacagcgctcagaccatcagagagttgtaaactgcttttttacaagtccacagtgaacgaaacattagtactaaatctagtggactaacatgatgttaattgaggctttgaatgaagaactttaagaccggttccccttgcctgtgtgtgactgcagcgttctggaaaaacagtagagggcacctaaagaccagcacattttaaaagcatttttttttttcttaatctatgcgccccttggtagcgctccagcaagttcaaaggatgtgaatctgagtccagtcatttattgtgtgttttctgttgcagcttcacaatgttcttcaagaactatgactaatgtcttcaataactacggcttcaaatatgatatgccttgaataaacctaatggtagtagcctctacacatatgtacttgcttaaaaaaagtgttgccaaattagcaatggaaaaaaaaagttatcaagacattatagtaatctcagctcatgttgtaaattatattatatcctaatccttggaaaaactttaatcaaaaggttacatactcttatagatgtagaaagaaacttatgcttaccaggggctaaaaatggggagggataaattgggagattgggattgacatatacacactactatatataaaattctgtcctttattgagcccatctttgcgtgaaatattcccttggtatctctaattttttggaagagatctctagtctttcccattctgttgttttcctctatttctttgcattgatcgctgaagaaggctttcttgtctcttcttgctattctttggaactctgcattcagatgcttatatctttccttttctcctttgctttttgcttctcttcttttcacagctatttgtaaggcctcctcagacagctagtttgcttttttgcatttcttttctatggggatggtcttgatccctgtctcctgtacaatgtcaggaacctccaaccctagttcatcaggcactctatcta

SEQ ID NO: 61041 - DNA, 1320 bp, Bovine  19866881032216
  misc_feature (1)..(1): n is a, c, g, or t
ntttctgtatgacttgaatgagccatacctatgattcacttttttcttgtaaaaaatgatcctgttctctgtgaaagacacaagtgtttcactgagtcacagggatgacatttgtataatgttaaacggagtttgggaaaaaagaatgtaaagtaatattgaattggtgttaacatcatgacatttttatttgtggtgtagatttcacacacattacactgtaacatctgtgtaggaactggggcgcattaatgactgaaggtaagaaagaccatcaggaataattccggtgttaaaaacagttccagatgaaaggataatttgcacaacatgttgcaatatttttcaaatcacttccattgtacttgtgagctcatgataaagcgaatgcacagaacagtacaatgtctaaccaacaagggcttgttttaggaggtagttgaaaataaataacctacagtttacacagctggcagctaaacaaatagaattcattgccccaaagggagctatgcctaggttgaagaaaggtttcgatgaatccgtggataatggatctgtaaggagttatcaagggaaaattaagagttattcagtgtatacacctaaattttgaggttggtcttgttaaaaacacaatttggctcttctaatggaactgcatagttagtcccttggtatgggtggacttttattttaatttgacatggaatctctggtgtcctaatgcaggacaaacaagatttgtagggcagtgatatgtggcagtacttgcccagcttattaagtggactgcctgtggttttgaaaagcttcctcctcctaatagtcacactggaatccactgggtggcaagaacacagcacactaccttaaggtcactcttgcgtaagacattaatgcatcagtccctaatttggaaacctgtggtcactcagcaagacagaatttgtctctctcccttggtgtaatgatttttattttgtcatctctcctggggtaattccttgcaggcttggcatgttgagaatcaaatactgcctctaacaatatggttgtgattctctgcttggctgatttagctcagcatttaagtaaccactaatcttctgaaagcaccagggtctacttagagaaatccctgttgtctgcaaggatggaaacaaaaccagcatggaggaagcattacttactaaacacaaatcaatctttttttttcccacctcgctgtacactatgccaccatcaaaggcgtggtttctgggtggtaggtcttcattttgtaggtggagaccagctcatgtgcgacaagtagagaag

SEQ ID NO: 61042 - DNA, 1359 bp, Bovine  19866881033141
  misc_feature (1)..(1): n is a, c, g, or t
ntaaattgctgctccctagatggaaacacaagaataagggctcaacaatcgacctaatggtgatcaatgctcttgaaacgctaatagaccttctttcaagacaatgcataatgcagcattcttaatggttaatgcagcaacaggcaaggctaaagaaggttgggggaaaacatctttaatgtgcaattcagcccctgaagcccatacacaaaatctgacttaaatgtatcgttaaaaagtattatttaatatttatatgtgccgcaaatagatccagccccacatagtgtaccagagaaataaaagcccgagccctaaggagtttatcacctgggggcaaagttgatccaaaacagaacagaagaggagaaaggagttgggtgcagaaggaagatttccaccaaagaacgagtggcagtgtagggagccacgaggaacagaggcgaggcgccacctgctggcgaaagctaaaattttaaacaattttctctcccagagccccttggctgtcatcctcaccgtacctgactggtgattttcaagggcgttgaagatcttcctcacaggccgcatagctgcttccctgcagactagcttaatgtccgagccagagtagccttcggtctcctgaaacacccgcagacggagccattaggcagcaggcagaacgcggcgctggttacatcctcacaggcaggaccaggtgtcagagcccctgtttggattccgtgtctgtcacccatggacactatataaaaggttcccggataaacagtgtctggggggagggaggctggataacctaaggagctgggcaacgaacggcttcctaataccatccaagcaaaggtggggagatgctggtgaaggactggcccgcccaagtcagcctaatggggcctttgtgcccagatcccaggatgatcaaattcggtggacacttttattcttgtaaataagattataacctgtctctaaggaacctcagagaacaccacattcaagagtcctttcaagcaatgacacccgtggctgtgggataacagacaggtgacctaaagctttactgtttgtgaaagatgtgcatttaatcatcacagtaaccctctgtggcctgttacccattttacagatgaagaagctggggctcagagaggacgtgatgtccccgagggcacacagctaatataagcgacagggccaggatctgaccagaggccctgagtctaagcagaggccctgagtctaagccctatgctatttccacttcatcgcatctctttctgctggaatgcttgcaagggacaaagagctcactccttcatgggaggagaggcctgtcgggttgtttgggggtag

SEQ ID NO: 61043 - DNA, 944 bp, Bovine  19866881081131
  misc_feature (1)..(1): n is a, c, g, or t
ncgtgggcagcgcatttaactctcacaacacgcctgcgtggtgggcaccgtggttatctctatggagaagggagcagaggcaggaggggctaggggaggggctagggtcctggaggggcgagctggcagtgctggccaggctctgcgcccctgccactgcccctccttcccgtccgggtggtgtcccagcactgctgtctttggcactctgccacatgcgaggactaagtccagcatctgcacagtaagaacagcgagcggccaacggccaggaggaggggagtggccatttagctttgccccctcccacctaagaccaagctgctctctaaacaagcatcaaaacccgaagctcatccacaccgctgtgtgcttcagtacggggagcaccaagatgatgggcaattacgtgctgataacccaaggcccaagagcccagtaaaacaactgccgaggcccaggatcctccgagtatgcaaatgcacaggacaatcatcacctcctcagtccccttcattgtggtgggtttaacatgagaagaatcatccacgctacaaggcgagatttcattttacagccgcggtaaccaagtacataaaagcctgaatctgtcccagtagtttctgaaggatttttcccacagtgtcagaggcaaaaataatgaaatcttgcaaatgtacagttaatgggacccgggtggacactaacctcaaaaatgcatggtctgtaagacattaaaggcttgattttagtttctgcactgttcctgttaataacaatgtctaattaaaacatctgtgaaatactgatagttttaattttacataaaatttccaaaacaactgttacacagtataataggtatctgcaatgaataggttattaatggaaatattattttaaattaaaatcaggttctaaatttaaattagttatctctggtt

SEQ ID NO: 61044 - DNA, 1234 bp, Bovine  19866881112792
  misc_feature (1)..(1): n is a, c, g, or t
nctcctccaggggatcttccagactcagggatcaaacttgcgtctcttgagtctcttgctttggtattggcgagcaggttctttaccactagctccacctgggaagccccagtatatacaatagatacctaataaatatctgtttgatttaactttaagctctttaactctgtaatgggggaggaggaataaagctataggtaggaggcgttataaagtgtaataaagcgtttggcccttgatgttattgaaaatgtccttttcaggagtgagggcatttcctgccaagtgcaaactttgtgttgaaataagtcctccttcagggttagaaatgctcctggaatgatgctggataggctttggggtgattgaggtccttcaagatgaacagtgggcttagtcttggggttagtggaccaaaagggagatactatgcacagttctgcttcaaagaatgtaatttaaactttttttttggtctttttttctttgtagtctgaggaattttaaaaatctgggtgacctcttgcagaaaatatttgatgttaaagtaccccaagaaccacacgacttggttcccatccctggctcctatctggggtccccttgggagtctaaattattcccccaccacacttctgaccaccctaagggcccagatcccaggatcacgcttcctgaccctctgtaggaggggagtcagggcgccttcagccctaggtgatatggctgtgtctagatgtgcttaacaaattgcctgttcactcaattacattttatttaatcatctgtaatcatataaattatgcctgatggtagtaaatgttcatgtcagttcctaattacagattgattaattggctgggggtgatctgtattactacttatataagaatatatgaagatgatgataaattagggctggtgatgctgagcccaggaaaatggaacacttccaattgtatcccactttttggggttggggaagccattccccttcctagttgtattcatatcagatgcctccaggagggtttgtgttctactgattggttgattttggtaacatctgagtctagaaataacttattattatttagttagtgtatatgtgcatgtaaaattttgccatgcagtgcttttctttttggctgttggcagaaatgaataatgacgagctcattaagttcagttgagctcattacagcctgctgggcctagaaagttcccaagg

SEQ ID NO: 61045 - DNA, 1382 bp, Bovine  19866881132630
  misc_feature (1)..(1): n is a, c, g, or t
nctctctccctctgtacagcactaggacgggcctggcgttccaggaattgcttgcaagtggtcctccaagcctggagccggcctctgctgtccccatgcagagcgcataatgggtcctcccagggacaatttgcataaaggataaataagagaaacacaatgtgaagtttattcatttttaaatcctgcagcgtttgtgattgaaggcccaagctcagatgtttgccggatgcgtcccattaaggctcagggctttgtctaatgtctgctctgttcctgcagggggggtgtaatgtgcaccccttcccgcactggagggtcgtttccagagcctcccgcccaacaagggatggaggagcggcgggctgcgttcccttcttccaggccccctcactttaatttgctgtaacagagccagcgcattaaatacaaaacatattgatgttcctgagaaccctggagggtctttacccttcctcgtcagaggagcctggcatgccgggagggggaagagagggtgtttggcacagatgcggggtggtgcctccggcaggtcacaacagatcttctgctgagagctgtgccctcccagagggcgggggtgggccggggagcagaggtgccatcatacgtgtggagagggagcatgtggacaggccactgtggacacagcagtggtctgtggactaatgacaaggcaggaaggaagagaggaggaagaggagggagaagggggtaataaggagaggggagggtgggcagaacgctactcagcaatagtgtttgacggtgcctcgtcactcccaggtcagcgttgtccagcaagttcccaagatggtacaagagttcgaggaagctggacgggactctcacttttggcatctctctgttcaaaatgccctggagctccaggaatttggcagggtagatctggctgtcatcttgtacatatttcgttataacaagtgatgcaagaagaattgaggcatctcctccagcaaattcactatttccctaacagtgtgtcccccagggctggaggctcagaaccaacagagggagcaatagagccagcactctggcaggacggggcaggaccaacagccagaccccaacgggcatgtattctttgctcaagttggccaagagcctccaagctcgggggtgacaacttcccttttcctctgaaatgattaaccgttaaacaagtctgtcttctcttggtccatgcaaccctcctaacagttacaaccacatctgtggtggctgcctatgctcctgggcatgagttgcttctaattcttatgactccagaagttactgttaccaggacaccgagacagtttaaataaatttcagaaggtcccaaatctaagaactga

SEQ ID NO: 61046 - DNA, 592 bp, Bovine  19866881146778
  misc_feature (1)..(1): n is a, c, g, or t
ngatgagtgcttcctgaaggtgctgagacttcgctggatctcaaaggatgcaaaagaccaggatgatatatgagttgggggttagagaggttacagggcaaaaggctggttagggcaggggtgctggaggcccggcatccccttccttatctccccttccctccagcacaggggtcctttggtagtaaaagaaacacagcgtgcataagactgaaaggagccgctgccgcctttcatatactttcccgtttcaggtttgcatcttattttcctgcaaatgttttttccttccctttgcccctccagcttttgtgggtgtaacctcaatttctcactgcctttcaaagcttttatttcccaagtggaaggaaagaacttttaatgtcatatctggtccttagccaggccagttgtctctccaaatcagtccagggctcagggcagcaggggagagtgggaggctcggccgagagcgggagagagtcaatagcgagaaggaaaacagcaagtgcagcggatgaaggtccccgaggagatttgcaaatctgctgaaatcctgaacaagctttgatttaacccaagcttgaaatgg

SEQ ID NO: 61047 - DNA, 909 bp, Bovine  19866881242902
  misc_feature (1)..(1): n is a, c, g, or t
ncagaaaaagtccaattgcatgaagttagttgactagacctctgcaagtaaaacctacaaacaagtgcttaacccagtacctgtgttgcttcttcatagtcctcattttatctacatttatgtctaaagatgtaagaggaaagacatgttctgtgttccccactcaaggaaagtgtgttaggagaaaaccatgtggttttcctattacttagaaaaaggaaaaatattccatttggtgtaacaggttcaaattgtttctaacgtctgcaggcatccttcttgatatactttggtttcccttcccccaaccctatctttcctgactatatgaggttgatttaacaaaggttaataaggtaatgtttggaaaaagagctcttttctttaataagctatgtaaataaccacagacataggaaaaatcccttgggagatattaattagttctcagaactcctaagaggtttccttcctttaacattaagtaacaaagaaggaaaaatcttggccacaacagacgggtgttccatcttctgcaacagaaatttttattcttaattctcaaaagcctaggctaatggatccttgtagctactccagaaccaaaatgatttgatatcatagtctcagatatctgaagacttaaaaactaatcattttgaggtgccacaaacatgctgtataagaaggcaaattaaatagatgaatgttgcaagtcttctgactgctcctctgactagtcatttccccaactctctccctctccttgggcctttctattccctgagacacagcaacattgaaatgaagccaattaataagcctataatggcctctaaagtaaaaggcaagcgttgcacatctctcattttaaaatcaaaagccagcgatgaagtttattgaggaagg

SEQ ID NO: 61048 - DNA, 1271 bp, Bovine  19866881275847
  misc_feature (1)..(1): n is a, c, g, or t
nggctgtggtggtcagaggcaggcctgagggctgagttcagtcctgttttgttataatttagaccccgacctcactgagtgcagtgtcttcatctgtaaaatgggatgaaaaaatgtcactgcttctacccaacgtggctattatgaatctcagatggaacaaaacatcttttgtcaaatactataaaacgcagtttctagaaaagacaccagctgtgctcatccagtttcccaggtggaagggagcttccaaatggctacttgtaagctgagcttctctcccctgacatctcccctggcatgccccgatcaatcaacccacaaacatttattgaactttgtaagatattatggatgatctttactcccctcttctgatctcacttacaggaattcagtaacaacaaggcaagggaaaatattggcttttcccagtgaagtgacaaaacaactctaatgtaaaaccaattccttaggcaggaatatcttttgtcttgtggttccaggaatctggcttatttgtccgcaaactctagtccactgtgggcttccctaacattctctctgtgattccttttctttccgagtcattgtacttgtagcttccttaaaaagcatggaaataggaatgtaatttcttgtgaaactagacaacaaaacaaattttaaaatgaaaataaaatataaacagaaagtaacaaaattcagacaacacgtcctagctgaaggtgaccctcacctgtcttgtgctgctcagtgggtgcaggctagcagtttccatggccttttgttttgttctttccctgggccagtgaagtctctggttttgccttgtagtttgggccttccagttctaagtgagtgggacactcagactgaggttaggaatggaattggtctggaatagctgctggggccagaggattctctgtgcttcctggaccattttggacttagttcccaggcccacagcctaacaaggaaggatatctatctagccctccaagactcttctgctgcacccagaactatgagccctgaaggagacacctcttcctctatatgactggggctcttcaccacctctaatgatcgctgtctctttctgttttgaaatctctgccaattcctgtttctggtctgagaggtctcttgttaagagttcattggctaagcaggtacttgacagacacgagactaaacattttctgtttgaggtacaccagccattcatctcccaaggctcacctctctgctttatcacttaggca

SEQ ID NO: 61049 - DNA, 2471 bp, Bovine  19866881302138
  misc_feature (1)..(1): n is a, c, g, or t
nctttcccgtgtgtctgcagaaaatttgtgggcttattaataggctcattctgctggtaaatgtcgatgggcttccgaccatcaaacacacttacaggaggggaaaagtgaggaccaaaaaaacccccggtctgttacccaggagccgtgcctctctggctcatcactgactccagctcgtccaggaagatggtggagggggcgtgatagcgggcaagttcaaataacacctgggtgggagaaaaccaacatgttcaaatccatatacttaaagttctcagatggccccagagattaaaagattaggatggctgtaatattaagcatctatgctgcactttagctcacaacaaccttaaaatcattagttatttctccctagcactaccccatggggttggatggtccaattatttgcatctatcagctgataaaatgagagtcagagagagtaagtggtgagctcaaggttactaattataagtgggagagcttaaggtaaaactcagttcctgaacttccagtcagctagttaacccttgagaccccctgccaatgacgtgttctatatggacacaaagccgtagaaaatataaaatcatgtaacaattttttttgcttaacatttagggacaataagaaggttattctcggaagaaagaactgcagaaaaaaaatagagttccagttgtgagtaacagggctgaagaattctgcccttttctgctccccaaattactccccaggaccccccacactgctgtttggtaggctcaggtacttcgaggcaattcccgattgaataaaatgttccactccagagtaaaatattatagactgaacaggaacggtaaaacaaccagcaaaagaacagacgtacaaaaacaaactcaagagctctagagggagatgtggtggtgaggaaaggagtataagaaactataccttttttcaaaaaaccctgaaactgatcgcttgagcaccatatacagtttttccctggttgatcagagaaagcattagagatttagaaaagaatagatgttcttaaataggcataggggatttattctccatgtcaattagcactagcaaaccatcacagagtaaagaagaggggaagggctcagaagaggccagactgtggttttcgtagtagtagccagtcgtcttttcaggcctcgctgtcactgaatgggcacagcctcaccttcaccactgctgtgtgtgtggtccctgcctgtttatgtgtgtgcgtgctaagttgcttcagttgtgtccaactctttgcaacgctatggaccatagcctgccaggctcctctgtccatgggattctccaggcaagaatactggagtgggtcgccattcccttctccaggggatcttcccaacccagggattgaacccacgtctcttatgtctcctgcacggacagatgggttctttaccgctagcgccccttccatgctcatatgcactagtgttttcctttcacagaatcctattttatgtggccaggacaactggctcagcccaaggagcttccaagaacagtgtcaatgctgggacactcatcacaaatgctctttagacagacaacagagaccacctcattagaggcaggtaatctctcttcctgtcacaaatagaaaagttcaaatagacctgatactaaggataattacagcagcagcaacctacccaataaaaaatggactcttttggaaccatacacattttaaggactccccaaattgcagagaggccatcaggttcaataagaccaaacatcccattggaaggagaaccacatttgaagcccatgtctccacgtggaccactactctcccatggccagagaacatgaggaatcctgggtaagcactcgggaagcattagtctaaaatttttcagaagtacttggaggaagttaaatcatgcaatggggtggggcatggcggtgaaacattgaaagatgtaagcaccaacaggtgtgtgcatttgctaacgagaccactcaactactcaatagcatcaactcctcagaggcctaaacattaggagggaagggagcaacaaaagggttccctataaataactccttaattggagtagaaagagaagcaaatggtaggaaagcatctctgctttaggtgaaggtcttgaggggctttctttatctgaaagcttcacaatgagaatcttgagagcatgaccaagatttgctaggtgtggttctttccaggagctcagaaaatagaggaatttcagaaagcacagacgataggttccttccaggttgcgtgattgtgtgcacacctagttgttgggtcatgtccgactcttcgtgaccctatggaccatagcccgccaggctcctctgtccaaggaattttccaggcaagaatactgggatgtgtagccctttccttctccaggatcttctccacccagggatcgaaccagggt

SEQ ID NO: 61050 - DNA, 1653 bp, Bovine  19866881405108
  misc_feature (1)..(1): n is a, c, g, or t
ncttgatgtggcattttaaaagtgctatgcaagtgttagaaattatcattgagaacattaagttagatggtacatgaaaagttcttagaatggtgaatggtacatgttaaacattcaaaaaaaatttgctaaggtacctggacctaagggtggaacttcaataaatgttacttctctttcttcccatccctagtgtatagaatggggaacccctttcctttcacttagccagcatgcacagagagcctggccaggtaggcaggtggagagatgctcttttggttaaaaaacaactaaggagccaagtaaaaatcctaccataagcgttcttatttttggtcaatatgctgctaggaagcaaaaggaaatagaaggctagattaaagcagcatttataaatactttaataatgatgaataaatgattcatcacagttgcttggcaaagtaaattattccaagatgcacagagacccgctggaatgattgtaaactagttaatagatgatattgcaacttgtgaagaagcactttagagcagcagctcaagcaattatttatgcctccgcacattctagcataatttaagaaaaagggaaatttacttatcagctcttagtaaagtactcatgatatttcagtgtgaaatgttgccaaaattatttagtgacttattgattcagttaagattttgtgttacgcttggtattctttcttactaaaaccaggtggcaaagttaactaagacagcatggcctttgatttaaacagctgtcttttctggaagagtctcgagatctcaggaaaaattgcagggggctggggtaagggttggggggttggaggaagccctggcaggctgcacttcaggggatcagatggtcggcctcaatgtccttcataaactatatggatctagggatggtgagagttcaaaggaacttcatacttcttctcacaacaaccctatgggatagatacaattgttaatcacattttacagatgagaatactgagtcctagagattaaggaatgggcccaagcaacagagttagggcttaaatcgcagactgtgaatcaaaggcattgctctcggtggctgtgctgcctgtcctacccctggggtctttcctgctccgatctgacagcagtgtcctagagttgccgtctctccgtgaaagggttggtgggagacatcccaaagcaggggggtaagaactgaggtcaaggcagctctctccagcccccagcacagaggtttgcccagagaggaaataagggcagaatcagacacggaatttcatctggagatgcgtgtcacagatacctgtcagccacccccagccttgagcagaagggaagtcagtgcttgggtctgcagctcctgtagcccctgccccgcattgggtttcatttccccctcggtggagtcctgcccttccttcgtatgaccactgcgctgccatgctgtctcctgattcaagaaaacaccttctactagtgagtctgcatctcagcagactttgtagaaaatcagagaggttgactgaaccaagtcattcacttccactccttcattttacagagaaggaaactgaagccagagaagagaagtgtatccccgattttacacagaggtcagcagcacacggg

SEQ ID NO: 61051 - DNA, 2303 bp, Bovine  19866881469734
  misc_feature (1)..(1): n is a, c, g, or t
nttcccagcttcagggtcatttctaacgagttgtaccaggtggccaaagtattggagcttcagcatcagtccttccaaagaatattcagggttgatttcctttaggggcttccctgctggctcagacagaaaagaatctgcttgcaatgccagagacccgggtttgatccctgggttgggaagattgcatggagaagggtatggctacccactccagtagtcttgcctagagaattccacagacagcggagtctggtgggctacagtccatggggtcacaaagttggacacaactgagcgactcagctagctagtgacaagctaactgcacttcctgtgtagaaagctgtgaaataaaagttgggcagggagacggtccacttattttaataacaagatgccctccaccttccctgtctggacaggactcttctccaaaaaccttcactttgagcccctctgtaatatgcctctgtccaaccacactctcctatcttggcttccattcagccaggctcatctcccactgccaccagcatggctcccacactgtcaggaatgccttcttcagcccactgtgctaatgcgaagtctttccttcaaagacaggtgagaggcaacttctttgaagtttcctctgagcaccacagccacaagagtgactgtgacctcccaggcaagttcagtcaccagacgtgcactgagaggcataaggagaagtctctcaagggaattccagagccccagtcttcaccccagccctgcttcatgactgcaaacagatcatttccctctccaagtctcaagttcatctgctcaaaaatactttgcatgtttcaaaaattaaataaaattacacatcatagcatattagggactcagataaaggaaatatatacttaagatacattctttggttcaccaatatgtagtacaggtttttgtcctaaaattggttcctatttatattggctttgtcatcacaactagatggtaaggaaatacaattaaactccatgacaccaggaattttgccccttttattccctaaacaacccccccgtgcctcatacaatgcctggcagacagcaggcactcggcaaatgtttgttgaataaatcagcaaacttttcttatatcccctaaagagttcagatcccacagtaataacaggaagtcttctgtttgcataaggaattacattattcaaagcattttcacatataaaaaatgtgcttgatactcagacaatgctgtgcaggaggaagatggggtactattatctgtccccaagtcctaggtgaggaaactgggatgcagaagccagttttcaaggtgacaaaactaggaagtggcgaaacagggattaaagccatctcccaaatccaggttgagtccacttttcgactgccacatccagtaagtgctcctggaaggactgattaatttggattctaattttgatcaacttggtgaagcatttgatgactgtgacgagttccctgacttccagaaaaaagacatctctgagtgtggtggccagataaaggggagctggggcagtgggagggaagtgaattagagaaactgttccttcagcaagacaaatttgtccggggaaaccatgcctggctggggaagccaattggaaaagaatgatagagggccggctcctgaggttcatcaaagtcatttgttgcaggtaagctcatttttcacaggccaaggggatatttacctggagtacacctttaaggaatagccgacagattgaatggtacgatgctttattatatttcacaccctggtgattcaatatgatggaggcagaggaggggggacagcgttctggagggagagcaaaggagaaaggcggaagaaagagatattaaaatgtccagcaaaggggtgtcctccttctcgggtgcctggggcagaaatcgactgcagtggaaagtgtacaaacggcacgccctgtggatgacactgatcagagagcgggtggcccacagcagttgacctcacccctctctcctgaccgctccctcagtgcctggtcaccccgagaccattttccaaaaggtcttcacacaattcttggaaacccaaagggctgtgttctgtcctggttctgccactactatagccaggcaaactgaggcagcacatttaaccttggcaacacggttgactgtctgtacagagaccaattccctaatgatttctaggctcccttccagccctacattttatgattccaagttagccccagagatcttttttttttatttttttaattttct

SEQ ID NO: 61052 - DNA, 1000 bp, Bovine  19866881538248
  misc_feature (1)..(1): n is a, c, g, or t
ngctagcttgttatctcaaagcccaaggagtgagaaggaagagttcctctcttccttgtgacaagagcaaccgtgcctcgctgattcagtcaagtcacatttatagtacctctagtacgttccaagccctaaggacattgtaatgagtgtaaaacaccccctgctcttaatttgcttccagtctgctgggggtatacaacaaaaaatgggctcctagcgtgatgtaatagtgggagacatataatgatgaggcaggtacaaggtggagatggaagaaggtaaaaccagcagtcactgtagcctgcagtgtggtgggggagccaaggaaggtgtccccaaaaggggggtttctaagttagtgtctgagggactaggccattcatggataagaagttggcagaggagtaggcaggaagatgagagtagaaagactcctgctagatcaggaattgggaggtccagggcttcggttatacttttgtctctattagccgtgtgaccttagcaaaatgtctttctgtaggctttaaacgtcctcatccatgcaatgagagtggcccatgacctctcttccagctcaaaacctctctgattgtcagaagaagtttcttctgaaagggatttatatggaggtgcttaaggaatgcatatgtttagttaatttagtagtttagcttcctgtgtacaaattacggctacctccagagagagagggttctattcaaagcctggcattcgttttgatcacgctcagaaatactgcaggaaatcatcaacatcgcgcacgaaacctcctctcactcacaccccagacagatgacaaagtgatatgcagaactaattccctggggcaatatttcttcccaaagcatagatatgggtgaattattgccattcttaattgcctaatgatttttttccctatcatgtaatctttttcggggggttgtatttttaccatcttgcaaattcatattggcagagtgatatacattgtcga

SEQ ID NO: 61053 - DNA, 1696 bp, Bovine  19866881546801
  misc_feature (1)..(1): n is a, c, g, or t
naacactggagtggattgcctttccttttccatgcatgaaagtgaaaagtgaaattgaagtccctcagtgtccaactcctagcaactccatggactgcagcctaccaggctcctccatccatgggattttccaggcaagagtactggagtggggtgccattgccttctccgtaaaagtgatgaagaagccactaaaataaaggcatgatctaagaacagtcatgcatggtcatttgtagacaaattttccaaggaatggggaaaggagaatgtgactgaatgtaggtagaagtgctccaaagatgaatttggagatactcaaaaggaatggaggaaggaaatgtaggtgggctttggaaatggaagattacatggatttgtgggaaggatggccaaaccacacttacctgaacagagtcagaaactctcgggcagtaagctgaggggtcccagccctgttgtcacaaaacatgctgtccacaggagccctcctccactcctttgccggttcactcttaagtacacgtctaggacatgttaagtacacatgtagtacatgtcaagtaccctgtatcttaaatacaccttaagtacacatacagtgcacctgcttttcaggtggaggttccacccacttgagattttatgaaatcagaaaggatggcaaaagccacaagcgaacgccctaacagctgtaagaaatgtcagctgacagccgggcaaagaaaacaacccagaagcacagaaggcagctcttggaaattgagcagtacagcagtgaggccgttgaacttggagacctctgtatcccagctgtcagcagtgccgctcagggcctatctagtgaccatgaagaagtttcagctgcgcttctgctaagatgaaatgtcttcttggttcttttaaagtcgttttataagcgtatattttcaatttgattacattttccatgaaatgatgtcttaagaggcatttgagaatattctattcaaaatgatcaataccccaacgtgtttttttttttttaaagggtgagatcctttggactatttagccaaaatgtcctttttttcctggaagtgttttctgaatgagtctgacttgtagggatgaagaaaagaaggcaagggagacgacagaaggtggccaccatgggaaaattccaggtgggggtagggacagcattacttagtgaaagccttcaaaatgtaccaggatctgcaagctgatgcctcagattgtgggtttctaaatgagatgtttccagctgtttccaaccccataagaagattaaggaggagcctaagagcagggaggactgttccagaagctcagatatcccaccctaagctttggatccaacaaggagccgtggcaatggaaagagaagggctgaacacacagggtgtgagatgtgaagacgttaacaggggccagaactcaaaacgctgcaactggtgggtggggaaagtggttgcttatccccactgctatcagctcgtctccagagatggccttccctggtcgctcagatggtaaaaatctgcctgcaatgcgggggacctgggtttgatccctgggttgggaagatcccctggagaagggaacggcaactcactccagtattcaggcctggagaattccatggactgactacatggggttgcaaagagtactttcactctgagatgggcca

SEQ ID NO: 61054 - DNA, 750 bp, Bovine  19866881606510
  misc_feature (1)..(1): n is a, c, g, or t
ntaattcttttcttaaatggcttactgaaatctgtactcaataacagcttatatgaaaataagatatcagaaaaatttcatacaatgtaaagaatcaaaaaactaggtagataagattgataatagatttatcacatgcaacctgctcacccacccattaactgtataccccaacaaggagtagaagaggcttcctttaccaaggcactgggaaataccacaaagggaagagccagcacctttgaagggagctgcaatggctcttatgctttatgctgagtgagtgctatagctgaaacgggatccttgatttcactggggatactaatatccccaggggaagagaccaaggagcgacactttaaaagcctccagaggcaagttggtacatgtattatttaatgttcttaattgcaacataatccatgctggttggcttaaacagaaaagggattttataaaaggatattaggtacccatgcaggatgcagagcctggggctgtggggaggctttagtgaggcaccactgctccttggcactgggaattctcaggactggacaccagatgctctgcactctcaccatcgcagagctggctctttccaccgtgtgtttgccagatgtcgggtccactgcacttaggctcctcttcattttgctcacttctgaatccaattttcaggcagatctgtctgattagtcagaatctaagtcacatacctgcaaactaatggcaagagaatttgag

SEQ ID NO: 61055 - DNA, 724 bp, Bovine  19866881650444
  misc_feature (1)..(1): n is a, c, g, or t
nctacactagcccctccttgggcacagagtgctcgtgcccagtcccttggcctctccgccgggcaccagggagacacagcggtctgttccgggggcctgagccacatccagcttcctgtctctttttcttttgttaaagccaaatgaaacaatgtaattagcttgttacaattaaagtgactcgactggataaattgtaatcacccagaatcaagtcaggcatccctgcaggtcccggacatcgcagctgagctgcctcatttgcataattaaaatatacaaatgataatggattttgtactcaatttccagcggctgtgaatttgaggaactctgaaattagagtaacagagatgaagcccgccttgaggtaatggggatgacaagttttgacggtaggggtgtttataacactagtttctcgccacaaaataaataagtacaaaaaagattagaaagtgatattagttaatagttccatgggcagtgggaagtggagatagactctgattacctcagtgaatttaccctgctttttttttctgacaagctctcacctaaccttaggggataccatccccctgattatgagaaattgagaatgagttaaatgcataaaaagggttgtcacagatcgactcaccaaaggaaaaggagagaaatgaaattagtcctgctgttcttgcttccagcgaggggtgggctgaaggcaagtgtgtgaaag

SEQ ID NO: 61056 - DNA, 864 bp, Bovine  19866881824905
  misc_feature (1)..(1): n is a, c, g, or t
naaccctagagaaaacagcctctgcacggaagcattaacaaattgctttgcaaatctaagctaaagcgaacattcaatttgaggaggtcaaattgagcttgggccccaaaacccaagcttggtccagcagcccaagttggctctggatggacgtgaccatgggtttgaccttgctttagctggtgccacaccccccccacctcagcctctaattggctgagtcctttagggcccttccagctgccacgtgcctctgcccaaggtttgggaaatttagggcccaggagatgctgagacttgaggccctctgacgaacagcccttgttctgctgtgcaatcacttaggtgagaaggactcgcagaagcaaagtctaggctggtatggacaggggcgacggagcacttgcttctgtgccttcactttacagggcaggatgccaagaccggggggagggttcagtggctgtccagcatctcccgacttgtccctgccatcattgaaacagtaacattgattgtcaacagtttgctaagcatcttgctgagtggtttacattttctcgtgtaaggcttctagtcatcctctgtgattagacttttttttttaaccaattgctcatttatctaagtaaggaagctaaagcccagagaggttaagttacctgaggttgggcagctgaatttgtgcctggacctgctcttcatgattcttcattagaaaccagcgccgttggcttactcttcctggagtcctgctctgagtggtcctcaccacactcacctcgccttgtctttcctctcctgtcagagacggctctgccctaacccgccagccttcagacctccctgcccttgcatccactc

SEQ ID NO: 61057 - DNA, 2336 bp, Bovine  19866880158402
  misc_feature (1)..(1): n is a, c, g, or t
nactgcagatggtgactgcagccatgaaattagaagacgcttactccttggaaggaaagttacgaccaacctagatagcatattgaaaagcagagacattactttgccaacaaaggtccatctagtcaaggctatggtttttccagtggtcatgtatggatgtgagaattggactgtgaagaaggctgagcaccgaagaattgatgcttttgaactgtagtgttggagaagactcttgagagtcccttggactgcaaggagatccacccagtccattctgaaggagatcagccctgggatttctttggaaggaatgatgctaaagctgaaactccagtactttggccacctcatgcgaagagttgactcattggaaaagactctgatgctgggagggattgggggcaggaggagaaggggtcgacagaggatgagacggctggatggtatcactgactctatggatgtgagtttgagtgaactccgggagatagtgatggacaggggggcctggtgtgctgtgattcatggggtcgcaaagagtcgaacatgactgagtgactgaactgaactgaacagtcatcctcatcagctgagtacttccttctgtggcaggacaagacataccatagcactcatcacactcatgtataaattgctgtgctccctcagtccagactttgcatcaagtactatcaaggtattgctatgcatgtgccagccactattctaagccccggggatactgtagttgttcaggaaagaaagggtgagaaactgaactataagcagagacagtaaaaaatagaggaaaggggggcaacttgatatcaaaattagaacccagtgactgacttggtgtatggtctgagtagatgtatagtggcatccattccctgacattagaaaacaatttggtggtgtggaggatgtttggaaaatttggcttagtttgcactgtctttggagcaagacagagcttcccctggctattgactgtacaactagagcccagaggaatggctagtgcagagaagtggctttgggaattaccagcacattaacagtgaatgatgttttgggtttgaatatactgttattctctgtttctcagatgaagaaatgggctcagaaatattaagtaacttgtcaaatgtcagattctgactctgatgattttttccacattccattcttgtgaaattgaccttaaagtctgagtcctctccaagggtcacacatttggcctgaaaattgcaaaaacacatgcccagggattttgtaatgttttccttgtgttgtgattttgctgccctttattcatgtttatcatcattgtctgaaatgattctctggccactttagccagaagtttccttccagagggaaaggggtgatccaaatcttttacttatacttaaccttaaattgagtagaacaagtacagccttgagctatgctgttctgccatgaacttcttaatggtctgtggttccagtcttccttccagggagaccagttcctgctccaacctagttaacaggagaagctaggacagggtccacttatgcctcctcaggaggtcaagggaatatgagtatgatggccaccattaagaggtccattctggcgcttccttggtggtccagtggttaagaatctgccttgcaatgcagggaacactggttcaatctctggtcaggaaagattcccacatactgcagagcaattaagccagtgcaccacaagctactgagcctaagtgctgcaactactgaagcctgcacatcatagagcctgtgctctgcaacaggagaagccactgcaacaagaagcctgcacactgcaactagagggtagcccccactcacagctggaaaaatactgtatgcagcaaagaagacccagtgcagccccaaataatatatatataggcttccctggtggctgaagtggtaaagaatctgcctgcaatgctagagaccagggttcagcccctaaaaagagatccattcatgcattgggtggtggtgctggatgtgggggtgggatgcaggctgactgcacaggaagcaggaaagagctctaggaatatctcagtatggcaagttattcaagaggcttcctataacagtatgtaggaggaactccattcaatctaagggtttcagagaatttcatgtaattacattaatgataaacagatatttctctgaagtatccaattattgggcatcgtcagagagaagtaaaggggccatagaccctcttctgttctgagcattttatctgatttttgaagattcatgtgggcattaaattctagattccggcca

SEQ ID NO: 61058 - DNA, 1201 bp, Bovine  19866880362491
  misc_feature (1)..(1): n is a, c, g, or t
ntcgggcagatggagggttaggcgcagggcaggagatctgcaagcgggctgaggccggcgtggctcggtcggcttgcctagcgctacagcgtcagtggccgggcaaagccgcaggtcttgcctcgcctcctcctccgccgccgcctcctgtcagcagctcagccactgcggtgactcggcaactccacttccgggtccgggacaccgcctgaatcctgcattattcatgaggaggcggtgtctggagaccgagcccctcccgcatgcaggagttctagtggcgcggccgctggtcgtcttgcctgagggggcggggcctaatggagccggtggttccccgagcgcccagccccgccttcccctcgagccgggagggggcatcagaggcgcctgcgccttggctgctggttagttgctgggtaaccgcgtcgagggaggagacgattcccttctgcaagggcgcggaggacccacaacatcggctgtccccaaagaacccctgagactgggaattgaagtgaaagagaatctggattttctgtgcattattgaggggacggacaaacttcttgtcctcaggcagaggagcgttttgtaggtgctccaagtgttgagatgcttcccgcttcttcaaagatgccccacaaacaaccgccgcctcctcgtaagcaggtaacacacctcgacctgctctgtcttgatgacctctgaccttcgctgccagtgaccaccgatcatacctctgctactgacgcttcatcttcctttccctgttgactttctccctgactcctggcctgtgttcccagtgacctctgaccccgtcctgctctctccctctaatcctagcgtcctctcccacactgccccgaactgctgtttcctaccactctttcacttgtcctcctttcaccattccattccctcactccatgacccatcctgaccagcccatcctccttaagcccccaccctctctcttaccaatatgttcattgtcctcacagtcttgtcccaaagaatttgtttttcccatcctttgctgagtgcccagtgctgggctaggtggagacacaggcctttgggagctcacagaagtgcaggagacctgtacaggagacacagattatatggggtggtatgcttcaggtcttctgtgttgggagacttgtaggagagagcactcagacaaagaggaaag

SEQ ID NO: 61059 - DNA, 2711 bp, Bovine  19866880759324
  misc_feature (1)..(1): n is a, c, g, or t
nctctttcaactgctgacacctgcccccatgtgccaccaccaaggcaggcgccactgcactaaccctctcatgccagcctggcctattccccaccatggccagggaggcaagggctgggattttggctgggcctgtaattgtagccagctgggggaggggtggacttggctataaatactcagaaggctgctgagtgcctgcagctgtggcccagaggctgtggtgggctgggggtggggtggggtgggggttggggggtgggcgtggtcctaaactctgctaagccctgctagttggccttcagcagccagaggaaggcagtacaatttgtggaacagataaaatctgttcttgatttagtgaggagcatgacccaggcttaggctggtagagttggatagccccgtgggtgggatggtggtgaccctcggggctgggggccagccatcacacgttgaaggcagtagatgtggtgggaggcctgccttgcccactctgacccagggaggcaaggatctcccacagtctcaactcctcagagcaagggtcagcatcaatatctctgaggacctgaggacatgggtacctgggagtcagagaacctgagcaggtgacagctgggggctggttcttgcatggactggcagttcctgtgaaactgccacctgactctatcagcagccaactgactcaggccagaggaagtcctatgggctgccccgctctgcaggcggcagtctccctgatctccccaagagggctgggccacagaggcctgactgcccagcccgaggatcgtcccatgactggtgtcagagcccaccaaaagtcaaggcctactttccccagctactgtctagatggcaactgtagctcggaaaggcaaggaacttgcccagagtcacgtagggagttagcaacgaaaagccaggcttcctgactcccagatgaggtgagggtgagaagagaacatgaggttaatctgggagagagagagggaagggagagagacatctttgtcttctgcctcacgagtgtcggagtcagtggggcaggggcaaaggcgctgagccttgaggggagggggagacagatttgggaacaggtgcaggactcatgccaggaggaaatctgagctccactgggtgtcagcagccaagaagggccagaaaagggcctacaggccccgcctctccccccacctcacagccatggccagatccaggctgggtctccagcaggcaaggctggggcaggtgccagtgagccctgggcacaggtggctgagagggcagggggcttgggtacagagggaaggcgagaaatggcagctcccccagcccagcctgcaccccactgcctggacagaagggagggtggcactggtgctggtctgccaaggagctcacaggcctgggagttgcacacacccagtggcccaacactttttcacagggtccagcttcccagcgaaaggattagagtgccctataggcaagtgtgtgtgtgagtgtgtgcgtgtgcgcgctcagtcacatctcttttgtgaccccacggaatagtgcgccaggctcctctgtctatgggatttcccaggcagtaagttgccattttctactccagtggatcttcctgacccaggggtcgaacccatgtctcttgcatctcctacatcgtcaggcaggttctttaccactgcaccacatgcgaaaccccgtggccaggggtgggggggtggggtcattaattcaagacccgctgttctcggggacagtcccagctgaggacatctggaaccacatgggacatgccatctgccctcctgacatcctcccccacctggggataactgagacagcaggcctggccccaggtggtaccccactccctgcctgagctggaagtactgggtaagagtactaggtgagggcacctgtggctttgtccacactttccctccacaaacacacacctcttagctccttgttaggactcagccagagaccttcctgtagtagaggtctgagactacagctcttcctgggattgccccacccctccccgcccccaccatcagggtccagaagctaactgggcaggagagggcgcggcagcgctggggtaagctaggctgaggcaacgagaggttgcccgtccctcaccagtcctccctggtgtgtgcttctcttctccccaggagaagaagggccaggaagtacagaaggggccagctgtggagatcgcaaaattggacaaactgctgaacctggtgagggaagtgaaaaccaagacctgagggcctggcctccgaacctggcccatgtcttgaacctagtacttgtagcccctgaccctggtaccccagtccagccttgtacccagtatgtgtctgacactacccctgatcaggttccagcgccctgctctggccctggtcccatcacctcaccccaggacttggtcctcaacccctgttaccctctcctactgggcacaaataaacctgtgtctggaagtccacccacatcttgaattttgctacagcagggcacccaggaagaggagagaatctcagggtagagtcttagatccatttattatccagcaaacagtaggaggaccagaggaggggcccagcctggacaccctcccattattgccatggattctagtttgcttccccaaccttgagggccgagaggcgcttggc

SEQ ID NO: 61060 - DNA, 1551 bp, Bovine  19866880769728
  misc_feature (1)..(1): n is a, c, g, or t
nggatggaggccccagaacacgctgaggggatgggcaggataagtgggagaaggctcgcccaccagtgagctgggatggctggaggggcggggggtgcccaggcggggccattggtcgcctcctccccttcctggaccacttgtccagtgcaaggtgtgtcttcctcacaggaacacaaacacgcagagcagagacgggggcacccctgctgggaagggtgaccacgtgacccctagcccgtctgcatttgaggcagcacttcaggtggccacattagcccaagttctgacctcaaaactcctcgaatgaggctccaagtgtagggagctccccccttagttgtgtcctgccccctacctcagctggcccaggtagaagcagagaaggcggggcccaggcacatagcaagcccggatgactgagctccatgaccctcaaggctgtgggttcacagagttcagtaggtcaaggctcccgtggcctcttccttgtgaacccaatgctgaggcccagagagatcctggcctacctcagggctgctccccagtgggtagggactgaagggaccaccaggccagcccatcgagccccacctgcagtcggcatgccaggggctcctgtattgacctgaccagcccaggcctgccggtggcctctcccagtggcctggcccctgccctgtgggggacgtaggctgcatctttgggtgtgagactgtccttgtgcactggactgtgttcttgtgtgggtgaggctgtgtccctgtttgagtgcatttctctgtggttatatccttgtgggctgtgccctgtgtcctgtgtccaacgtggccagtatgtgactgtggcctgtgagcagttgtgtcctcgtggctgagactttccaccatgcatgactgtctctctttgtgtctgctttctgtgtttgtgtctctgtgtgtgagaccacgtgtctgtgtgtaactgtgcctctcgctgacagtgccattcctctacacgtatgtcatcatcacgtccctgcatgggacggtgtcccagtgtggccttgacctgtggatggttgtcctgtgtgtgtgtgctcttctcatggtgacggtcctcatcctatatgtgtggtgatgtgaagttgcttaggacaccctgggggggaccgtttccggcatgtggtccccatgtgagcctgtgtgcacaggtgtgagggagccgtcggctctgtccctgtgcgttccccgtgtccatgacctcatcctgtctctgtctcttatcctggcttctaacaaccttttcacagctgattccttcggagcatttgtcactgcgtcagggccaagaaccccatcctccccctgcggcttgatttaatttctgaaatggacagcacatcagtaggggcacccatggggcggggggtggggggagctgtccagagacaaagggttgaatcacggccatctttggagctgtggcgtggccatgtgtatcgctgctgttgtgtcattgtagcagttgtgacgccgtgagggtcgcctcacgttttcccctgcctctgcc

SEQ ID NO: 61061 - DNA, 822 bp, Bovine  19866880784061
  misc_feature (1)..(1): n is a, c, g, or t
ntcctggacaccgagcagcagggcacagggaagacacggggagacacgggcctgccctcctcatcccgcccctcagcctggaaggatagatgcttccccagacctgaagttctgtgcagtaagggtgggaggggcagagcaagggggcgtggagggagagggggctgccggatccctcgttaacactccctgggtctcccctctagagagccaccctgctgagttgggggattttcagaggcaattcctgttaacgagccaattaagttgggccagtggcctcttaattagacttgttaacaccactggggccgcaggaggtaagggatccccctacgctgccaggcccccttcccctgcctcacaccccctccccagccctgcttttctctgggctggaacatctgtccccagttgctgcctctgtggccctccccaggccaatccctgtgtgtctgcagggccccgtcctgcccctctctgagcctctctgtccctgtcaaaggagagggaagcaggaaaccccgccagccctgaccactcgtccgtggggcctgggaccagccgaacagaggatgaacaggcggaagggccggcggctgggggggaccttggaggccgcagctgtgaggctagagcagagattgactgggggcctccctctgaccagaggcccagggtccagggctcaagccatcgagccccccccagtccaccagccctagcccccgagcccccctccagcctcccttccaaaaacctggagcttccaggaagcaggccaagcccctctctctgcacaccgccccccaccccagcaga

SEQ ID NO: 61062 - DNA, 1074 bp, Bovine  19866880885442
  misc_feature (1)..(1): n is a, c, g, or t
ncccttgtctgacttttcgggtgactcttaaaagaaaaagaattaaaagagtgtgacgctggggacatcattttttttcacatcccaaaatgaaacaaaggaaatataccatttcccagtctctttctgtatatctgtctgcattttatacacttgtctatatgttcgtcctgtactccagtttttcacctgaacatttcatttttttacttatttcgcacttacttcaggtgctttccatgttctatacctcctgtcccctttctcaggacaagtttgtcagggggcttaatgtgatacgggaggaataatggaatgcattaaatggttggtggccctcagccaaggacttctgcttactaagtccaccaatcagaaaaatcccccatttttggaggtcagaagaaatccagtgaggtcgattccattttatctagcactcaacccaagttagatagaaattcttaatttttcaactagaatatacagaaggggtgggctagcagggcattatttctaggctctgagaaagataagtactataaagagtaactgaatgtgtcttatctaagatttaactagtgtagccatggtcatagcatttccctaccgggcagaagctccttttatgttctgttaatccatggtaactctctttcacttgccagatagttaggataataatgaagatggaaccatagatatataagagataccctaaatcccacagaacagaagtcgggatcagcatggtctaaaacctcattagcatgaggagaccaaccattcctatatgtaggcactcagggtcctggtgcctaatgactctccatgctatgcctgtggtctctacctcacagatgacggaaccagccatcagactacatcacaaagccggcctgtttcacaaggcaggtgtggtgtcagaagacatacctgtctagagaagctcacgtggtgattcagtctgtaaatgagggcatcttgttgtaaggactgaaggtgttgcttgcaggcagtgtctttgcttccagtctgtcttcactttccacagcctccaccagcctgacagct

SEQ ID NO: 61063 - DNA, 2398 bp, Bovine  19866880900064
  misc_feature (1)..(1): n is a, c, g, or t
nctgaataatgaatggtctattatgctagctagtcagcatatttaccttatgccagtttaattcattaggttagctcaatttaacacatattaagtgattattatggaccagacactgtgcttttatggatgcatgatcccaccactgagagtcatacatacctatttcagggcagggaaagtagaataacacagaggatgtagaaaactctgcttctggaggaagacgtcagccaagggcacatttccaccgtgccttaaaggatgggttaagtttttcaaagttaaagtaggacagtgggtgtctggaaaagcctgaagaaacacacagaggtgttaaagtacatagtacctccagggaaaacgagacagcttgtacacaaaaggaagcagcacccagaaattaagcattaactgtttactggtgagtaactgagttacagtaagcagtcatcttcttaccggatttgcatggaggaggagaaaaaacaggccacagagtggtgaggatgtaaaccctaacttacctgaataaaacagtttatataattatatattttaagataaaatcataaggataattttaattgttttctttttgtattaacagattttaatcttagaaattaagactagaaatgttgatgagaatcaagcccatgagaggctgtgttaaaatctatacatgtacaaaaatgaagatgccatgctccctatttgctaggacttggtgtttaacaggaaaagggattttgtggagaagccattcttctccagtgcaggagaggtcagatgacttaaatcctctctccagaattctgaaatgctctctgcagagaccaagagaaggactccaaaaggtcagagccttgtgccatgacaacatggtatctcagagggcagaggcaaattccaagtttcccaagcaaacgttgatatattcctagcatctaccaccaattatggaacagtgaatacttgaggtgtgccctgccatgagagttttcattctcattttacctcttgagctgagggggagctggaaggtgggaccggtgctagggttataggatgggatgagcaaggcttcatctccctgcaacatcctacatgaatcataggctctgacacttcactcagctcttgactctgctgagacttaagaatcctgaaggtctttgtttcagatcaactctctgcccctggctctttgttgcaaaacttggtcagcacagcgaattcatggttttctagagcaggcagcttgtggaagaccaaagaaaggacttgctccacctcagcccagaatgtgggcacattaacctcagcttcccacctgtcactgctgtgacccttttgagtcacattccttctcctgggcatcctcctacatggctctcagcccaactcccaccaggaagggaggatatgcctgtcacaagacctcttatgacctttggggatgctttaggaaaactctggaagatgtggttcagctggcctgggccttgtgcctcctcgccctgggggccacaaaaggggctgggctgccaccccttaggcacagagtcaccattcagaggtgggacacatccatgcttcttcccatcctgccttttctgcatccagctggcagtcgacacactgtgctaagtactgggtcctatcagaggaggagactcccggccccactgctggttgtggtatgtggagccatcctgaatttccttcagaatcagtgaggcagggcatcccacagcccccatagcacaccgtgaggagaccacagccctttctgcccttattctcccctctggtaggtcagaaggtgggaatgcagaggtgccaccttctgagagaaatgaagtgtccagaacagagccctcccatccgctcagggcaagctttgtctttctgcttcctacttctctcctccagcccctgaaactccctggcccctggctgacaattaggatgccacacttcctcccacgtgaccactaacctcaactgtgctttcctgctcaccaggattcacatgctactaccaatttcttaggccctaacaaaaaaaaaccttgccatggtaacttccagaattcctcttcatctctggctttggctcttggtatcaaccccctgcccccagccatgatctttcctagttccttatcaccccttcaggtatttgccttgctcccttaaccatagagaaaccattctttgcatgagacacagagtccttcctcactactgttactttttctctacttaccaccagtgaagcatctgtgcttttagccaaggccaacccctcaacctgggacttactcctattatgttatacttctgcaccatgaccctgcctctcttgcagttctctctttctctcctgcat

SEQ ID NO: 61064 - DNA, 2004 bp, Bovine  19866880943287
  misc_feature (1)..(1): n is a, c, g, or t
ntgtctctaattttctggaagagatctctggtcttttccactctattgttttcctctatctctttgcattgatcacttaggaagactttctttaatctctccttgctattctttggaactcaacattcagatggatatatctttcgttttctcctttgcctttcacttctctctgtttctcagctatttgtaaggcctcctcagttaaccattttgcctttttgcatttcttcttctttgagatggtgttgattactgcctcctgtacaatgttatgaacttctgtccatagttcttcaggaactctatctatcagatctaatcccttgaatctatttgttacttccactttataaagtggaagtgtgttactatattaaagatagagcaaagatggttaagtagaaacctttgaaattgttgtttcatcttccttcctctctgagccaagatggtaatttagaaacaatatcacattcctggagaatgactgaagaccattgctgtcttaagggatttgatttaggtcatacatgaatgatatagtggttttccctactttcttcagtttaagtctcagttcagttcagttcagtcactcagtcgtgtccgactctttgcaaccccatgaatcacagcacgccagtcctccgtgtccatcatcaactcccagggttcactcaaactcatgtccatcgagttggtgatgccatccagccatctcatcctctgttgtccccttttcctcctgcccccaatccctcccagcatcagagtcttttccaatgagtcagttcttcccatgaggtggccaaagtattggagtttcagctttagcatcagtccttccaaagaacacctaggactgatctcctttagaatggactggttagatctccttgcagtccaagggactctcaggagtcttctccaacaccacagttcaaaagcatcaattctttggcgctcagccttcttcacagtccaactctcacatccatacatgaccacaagaaaaaccatagccttaactagacggacctttgttggcaaagtaatgtctctgcttttgaatatgctatctaggttggtcataactttccttccaaggagtaagcgtcttttaatttcatggctgcaatcaccatctgcagtgattttggaattttgcattaaggagttcatgatctgagccacaatcagctcccagtcttgtttttgctgactgtatagagcttttccatcttctgctacaaagaatataatcgatctgatttcagtattgaccatctggtgattccatgtatagagttgtttcttgtgttattggaagagggtgagttctcttggcaaaattctgttagcctttgccctgcttcagagttaactgattgaaatgcctttatcatgttctcagtaccgtgacaaccactgtggccagaagtataaaactctacaattggctaggtctgggtctcatgcctatgctatggccaggaagtagaatactataattggcagtcccttgagaactcatggagtgaaggaagggaagttctctgaagaagagggggaaaggaatgtcaagcaaatcaaaaacaaaaacaaatgtccactccatcctgtcaaccgaaccacctctttccttaggactctagagctgttgatttctctttgttaaattccctctcattcattagagcaaattaattactaatttctgatgatttgtccttctaaatatttctcatgtttgtcttcctgtccattacaaatgctatctccctagcttagatttttgtgacttcacacctgcttgtgttaatgaattccaaattgacttccctgccctctctctgtaaaagagtccccctaattctgtagctaaatgcaacttcttaaacctcttaatgagataggccaagaaccagctaccaataataatgattgtaacaagaactaacaaaatgcatgtgttaagcatttattatacactagatatat

SEQ ID NO: 61065 - DNA, 1040 bp, Bovine  19866880956685
  misc_feature (1)..(1): n is a, c, g, or t
nataaagcagcaacatcctattagaaactagcaggaggcagaatggtgtggcttataaaacaggctcagaagagcctggaagaatagaagcctagactcgatcaaaacagaaactaatttcttttttaaaaaattatttatttaatttatttatttgttctgtgccaggtcttagctgtggtatgtgggatctagttccctgcagggattgaacctgggtcccctgcgttgagagcacagagtcttagccactggactgctagggaagtcaccaagactaatttctaagtcagagtttccctaagaatattccacaaaacacaacggttctgtaagatgttaatagatataacaaggaaaaagttccatagttacataagcttgagaaacactgggttaaacacagctggaaagggttctttattgcagggcttctcagagtctttaaaatgctagcaaacattgtgataggatagagtgtataggttcccaaaggaatttgtctatagactcttttatccccccataaagtacctcaaaggaccaatattcctaagaatgtactataggaaatgctggtctaagccaggcttgcctgagagcttcactaattcctttgtaaggataaaactggaaattaatatgggaactataaatcatttatagtttatacataattatgtttaagttaactacattataaaatatatatggttctcacaccacagtttgggtgcaattaattcaatcaatcttagttaaagtaccccttcaggtactgttccaaatagatagatggggtggactctggttatgacagccaagagtctggtgatgaaaacagggaaaaccaggccaggaaccacagtagctgggctcatttgtgcctgggtgtagcctcttgtcatacttaatattctcagggctagaaaggtcatccagagagcactctttatacccactgtgtgtgtgtgtgtagtcgctcagtcgtgtctgactctttgtggccccagggactgcagcccaccagactcttctgt

SEQ ID NO: 61066 - DNA, 1530 bp, Bovine  19866881042275
  misc_feature (1)..(1): n is a, c, g, or t
ncacatccatacatgaccactggaaaaaccatagccttgactagatggactttgttggcaaagtaatgtctctgcttttcaatatgctatctaggttggtcgtactttccttccaaggagtaagcgtcttctaatttcatggctacagtcaccatctgcagtgatttcagagcccaaaaaataaagtagggtggcataaaggggtcacaataaaaacgaccttgagaggcaccttgcgcttaacaattaaaatatctgagtacttaccatgtgccaggaattgtgtcagacataacagtcaccaagacacatgccttgaccaaggtcattatcttatggggtagaaagtctcatacgcacaaaccgtctaatcaaaatatacttggatgtccaatgtttatctcaaaactgtttatccctgtcccaccacccccaccacccaatcatacatactaaacctgctccaatcactgtatttgccacattagttaatggcatctgtcttttgccagttgttcaggccaaagataatggtgtcatccctgacttacgtttctaacaatcagcttccagtacatcagtaaatcctattgtccctgccttcaaaatgaaaccagaatcagaaacaaaatgaaaccccttcttgcttcctctgctacgatgattgcagcagtagtttcataactaatcaccctgcttcttcctgagaccatacagtctattctcaacacagaagccctatgtgctcagggagggtactggctacagatgatgggtggacagatagaggaatataaaaccatgaggccagataaggtcaccaaaggaaagagtgtaaatggacagatctgaggactggactctgggacattttgacattaagaaattggaagggaaaagaagaaccaggaagcagaggagactgagaagcagtaaccagggaggaagaaggaaatccagaagagtgtggcatactggaggtcaagagcggggaatatagcaaggacaaagttggtcaactgcatgaaaagttgcaaatcggccaagtaagatgaggatgcagagttgaccactagatttaacaacacagagatcactcgcagctttgagaacagactcacacatgatggaggtgacggcatgactggagtggattcaaaagagaatgaaaggagggcagttggtgatagcaagtgtaattaattccttcaaggaggtttgttccacagaggtgcagaaaaacaaggatatagctataagagaaaatgcaacccagggaggttgcgaggggttttttaaaagggggagcaacccccctaggtggctcagatggtaaagaatctgcctgcagtgtgggagacctgggtttgatccctggattgggaagatccccaggaagagagcatggcaacccaccccagtattcttgcctggagaatccccacggacagaggagcctggagggctacagtccatgggttcagaaacagtcggacacaactgagagactaagcaccctagacttaatgt

SEQ ID NO: 61067 - DNA, 770 bp, Bovine  19866881092485
  misc_feature (1)..(1): n is a, c, g, or t
ntccaaacaagatctcttcagcagcaagtgtcccgggccagcctccctcagaccagtcctgtcacacaggccctctcagacccactcacctccagattagccttccccatcagagtgactgtcaggtaagtcccttccagcctccctcctcagaccagctccatcagactgctctgctcagacctccctcttctctgccctcctctgagaaaaggggtgaggactgcactccagtccttcctgccccccagtctttagccccagggaggtgctaccccgtgaaggttctgtctctacctgtccacgttcagtagctctgggcatagtgaacacatggacctcaagacacaaagacacgcaggtgccggccccagggctggctttggagccagtatcctattctttacatgtgaggataagctttctcagagcaccagcctaaggaattagtgagctcactggctctggggagttctcaatgccgggggttgcatggaggtattcctgcctgcagtctcctgaccacctccctctcttggctggctgctgggaggcaggcgtgggatgcctgcactgatcactgcctgcccgggaagatgaagggcaggcaggcagccgagagggggcagcagaagccaggacagcccctggctcaggccagggaggcatggcagccaggggctggggtctggaccaggacaggaacacggagagagaggcagacagagggaagggatgccagagtctgaagaaggaagagagacacacag

SEQ ID NO: 61068 - DNA, 479 bp, Bovine  19866881095819
  misc_feature (1)..(1): n is a, c, g, or t
ngcgcagaggggcgggggcagggaaggggaaggaggggacgattctggggtcgcagaactgagtggagctgagacggtactgtagctggtgggaggaagtcctggaggccatggacggtcagccactgggatcaccgaggtagggcagggctgagcagggtaaatgtggctggggggctggggtaagccactggacacactcggacagacacacagacccatagaggtccctgctcagttctgtgggtggagggatttgggctctccctcttctagagcccttgcctggggccctttccccatctgccccttctcctgccccagttcccacctccccactgcctttctcctcctgttttctcccagcctgagtccctctcttgtagcaccccaatcccccacacatacacagttggttatgttttcagcctttgtgagatcctgctgccctagcccagcccccaccgcctcccggtcct

SEQ ID NO: 61069 - DNA, 1043 bp, Bovine  19866881140809
  misc_feature (1)..(1): n is a, c, g, or t
ngtgtatacacgcccctccctcttgaacctccctcccactttccccctttcctacccctctagattgttacagagccccagttccaattccctgagtcatacagcaaatttccattggctatctattttatatacccctcaacttttgactgaataagttggaccacaagatttctgggacctttaacggagtccttgttgttgctgaggctgctgaaacctctgtccccaccagagaagcctcctcccggccctgtctgctctcccctccagtaccccttctgggctctcctcagggccctgtcttgtgtttagagatgagccatctccagaataaactcaggatgaaagagcaggaggcaagctttacctaggggccaactatggcagtgcagactcctcatgccacttgtgagctgggcattcctggaagagggtggtgaggaaaacctttacagagctatctggggtgggtggggtcagagaggctttgctgaaccgattgcaagtcagggctatagctcagggcgagaccttccagaatggtggcttatgaggaccggtggcccctgtatctccacagagtgatgacatcaccaaagtgacccaagcagctaaaatcgtggagcggatggtcaaccaaaacacatatgaatgatgttgctcagggtaagatttaaagtgccagcaactgctattattactttattaaaaatcgctcatacaaagtgagtatttgagtgtcccatgctgggtcctacaggggcaagaggacctcctctgtatgtcacaagggaaataagacttacacagttcaaacaggaaccatggcataagaaaaaatgggtgtggtgatgtgatctgacaatggtgcataaagacaccagcacgctagttatttaatgtcatcttccccgcaatcgtgggaggcagtggagcagagattttatcccttctccacacacgaggaagccaaggccaagggcacccaaacctgggtcttaagcctcctaattccgtgttctgttctcgctctgcccagc

SEQ ID NO: 61070 - DNA, 1177 bp, Bovine  19866881231837
  misc_feature (1)..(1): n is a, c, g, or t
ntagtgactgtctgtacccgtgggcattgtcagctgtgcacctgtgtcattttagtgaatgttgttattactgtgtagtggtgtccttgtgtcgtcgtgggacatgatggtaagttgggggccaggatggtctcttgatgagtcacctgtgtgtgtgtatgtggcgacactgggcttctgtgttgggagaggtgctgggcttctgctcacaaggggtttgggctgctgggcacttggtagtggggtgccttctgctctctcctcactgctgggtctggggctggaggccaggctggccctctggaagggtctatggagcctgggccagttcacatagccctcatctggggctttacagcatttatgctctagatctatcccagagccgtgggtgtggacttggaaaattcctgggaaagatgctctttgccctgggatgggtgacctgaggtgagctagggcagggcagaggtgtagcctggatgtctctggcctcagcttccctacctgggaatgggtccagctgggactcggagggaagagggaagtcaaagtggcctgggacttcctgggcctgtaggtggggtggggtttccagccactcttatcccctaggggctaggctcttggctttatgggcagaagccccccagccccctggaagccctgcttttgtctcagatccgccagtatggccgcactgacagcatcctccccttacactgccggagctgagtcggcttagagagatgctgtcagtgggcacagagaccctgcttgtgtcttgtttctgtcgctgtctccaggtcatgtctctcccgctgcccttggatctctgctagtatcgtgtgctccctgtgttttgctgtgtctcttcttccatttctccctgtgttggtcttttcttgtccctcagggattcggctcacagctttccctctctgttcccctctccctgggtgtctcccttttccgggtgcccccaaccgtgcagcatctgcttggtaccccatccccctgtctctgcagctctctcagcagcacccggctcccatggctgcagcctctttggcccagggcccggcccttacagtaactcatcgggctgatggaggcgactttgatgaagaagccacccctccccctgtggggacccgcatgtgtgtgtgtgtgttgc

SEQ ID NO: 61071 - DNA, 3321 bp, Bovine  19866881262324
  misc_feature (1)..(1): n is a, c, g, or t
nactctccaaccaaatgccctctatcaattccttggcagcatctctccttggtgttccgtgcctccttccttacattggggaactagaatccacatcctggaaagaaaccaaagggtcctctggaccacactccttaaagccctattacccctgaatatccatccccttctttgcctcctttggaccctgtccaagtagaaggcccttagaaccgcagatcccttggcccctttaactcccttgattttgatcgattttggaatcatttctatgcaaagtctcatctccaaagtctgtgttggctgaaactgaattaaataagagacgggactgcctccttctccactgcctaccctcataccatcttcttctgcctcaggccctaccagttaatctcttttttccctcattttttcctattgtggtaaaacaaatataacataaaatttatcacttcaaccattgttgatctactttttaaaagaattttacaccttcacccctttctccattaagtgagatggcctctccctaaagaggttgaaataggagcggtgacgggggagcaggaagtgggactcaaaaacattttggttcaccagactgtagaggctaagacctgtgtctctgcccagtccaaggtaagacaggagcctgcttaatatctggctcagaggatgagcttggggatagggatgaagttcaaggactaggccaagtcaagcctcccggaggaaccaaggtttctcaatttctggccctgcccctatctcctgggtcaggaggctcatcccttaggcctttttgcagaggcttcccccaagccactgtttctatctaattgtccctgagttaggcatttgccctatctcccagacaaaggctttttgttcataggatttccaggtgcataggaacaacagagcatcaatctaggatgagcagccctaaccacagagaaggcaaagcaggattctaaatcattttaaaaattcacaggtcccttgtctcccccaaatgaatctggggcttccctggtggctcagtggtaaagaatccacctgccaattcaggagacacagtttaatccctggtccagggagaccccacctgcctcagagcaactaagcccatgcaccacaactactgagccctctcgtgattactgaagcccaaatgccatggaaccatgtgctcagcaacaagagaagtcattgtaataagaagcctgcacactgcaactagagagtagcccctgctcgccataactagagaaaagcctacgcagcaacaaagacccagcatagccaagataaataaatgtaattttctttttatatgaatccaattctttgccatcccagtgctagctttgtatctttcaccatgcttttctctcctgtttctgagtagctatttttgaaaactaaataataggtaagggagtgggagctgcctatctttctgaaataactccaaagccattttggttcattgtctcaccccaaatctgaaagcaagagagacctcctcggtgaggtttgcctcctggacctgcagcttcagtcccattgcctgcagctgatgtgcacgggccagggaccagctgaagcatggcagccagctacctgacagtacagtgctccatgtagagccttggccaagctgcagtgtaatagtcttctctccttttgttcttaatcagtagcttcaagtcaggaatattttgtctggcaggtgatgcccagaggaaattctattctttgaaagaagattccccagagggaaccaggcaaataggactagagaagagctctcttggaaaacagttagatagatgtgatgacctgaaataccctggtacacagtgaaaaataaaatactaaaaaaccagctatagctattggttgtgactagaagctttgtaaattggaacaatcctctgggaaagcagtttggcagtatgtatcaagaatcttaaaagcattcacactttttggtttataatagtgcaatattgcaaaccctaaatgtccaaaataagtgaagggttaaaaagttattgtatgtcccctttatggatatcatgtagccattaagctgatggttaagaaaactatgtaaaaatatggagagttgaatatgccctaatactaattttttaaaatatagaatataagatacagtatgtttttcttgagagtcccttggactgcaaggagatccaaccagtccattctgaaggagatcagccctgggatttctttggaaggaatgatgctaaagctgaaactccagtactttggccatctcatgcgaagagttgcctcattggaaagactctgatgctgggagggattgggggcaagaggagaaggggacgacagaggatgagatggctggatggcatcactgactcgatggacgtgagtctgagtgaactccgggagttggtgatggacagggaggcctggtgtgctgcgattcatggggtcgcaaagtgtcggacatgactgagcgactgaactgaactgaactgatgtttttctttaaatgttgttctatgaataattattagcagatactttctgattatagtaacaaaatccaactcaagctagtttaagctaaaaaggtaactagactgtaaggacactagattttctcctaatacaagaggacaggcatgtaatcaaaccttagagggacaggacaagttctagaaccagaacctgaaacctagggaagactttctagctcttgtgtttcttctttctgaacatcagctttattcttgtctccctgccagtgaccttctctgctacctaatctatagtcttaagcttcacgtctcctcatagaagccccacttcccaattctgggggatgctctgatgggctccacctggtgtaagcaaggacgggaccccacagacccaacaatgtacctacctagaggcccacacctgtaaccatgaggacaggcaaaacaccagctcctagagagggaaaccccttagtgttgctactgtagtatacataaaagactcagatacactagaatgttaacaaagattgcctcaaagtggtaaaactaaatgtgattttttaattttagcatgtgtctctttataatagaaaaatctattaaactcgccatggctaaagttgtttctagccatgggtctctgcattttggttctcccaatgacagtcaccacaaagctactaaagcttggtgggtggtgcttcttttggggaatgaattccatcctaggagctgtttaaggaaacagaaaatcttcagctatacacaagac

SEQ ID NO: 61072 - DNA, 1108 bp, Bovine  19866881317984
  misc_feature (1)..(1): n is a, c, g, or t
nccatgtccctggctggttatctggttgatctacctgtttctctggcttgtgccccacacagtctctccagcctgtgtgtaggctcgctctttggggctctgtctcttgttgggggcagagtctttgctgtgtgtctgactgtacctctggtagtggccctggttgagtgtctgggagtggtctgtctctggatctctgcttctgtcttgttgacagaactttgtctctcttcaagactggagtgagagagatttggaacctcttgggcaggagatggttgtttccctctccttaggtgtaggtgtgtgctggggtggagcagtgtgagggcagctggacccatcctagaagcaggacaacacactgaggggccactggatccatcctggcttccggaaacacgtcctgactgtgctgtgtgtacccatgtgggagtgtgcagacacatgtacatctgctggactggggctctcaggctcctgggctggagggcgataggctggggtccctgactgggacgtatatctgaaaatccttcatctttctcatggtcactggtgtccactaaagcagaaaccacatctgaccggctcacaacgtaccactgccctgataccctgctgctctgaacttcccagagccctgccgggcaaggctcacctgggggtggagggggggcaggtaggcgtaacatggtagggcagatcccagagtctccccaggagcatggcaggggccttccgttcaaggcagcttggagatgtatagacctccaatcaagttaaagcattaccctttcagtttgcagtgtttatagctaattagctaacctcaccagtaaagttattttttttctagaaaaatggccctagcattaccagtgttctataactcatctgcggttgactacatcctgcagccagcttccttatcgaacaacaaaccactgtaggttgccttctaccatctcagcaaacctttgcctacagatgccaataaggttattttctgttacttgaagagggtcctgagctccattaagaagggcgcttggggtcaaggtgccctggccctaggcctgggatttcccagtcttccctgaaatgg

SEQ ID NO: 61073 - DNA, 1192 bp, Bovine  19866881324237
  misc_feature (1)..(1): n is a, c, g, or t
ngatgacactcccgcagaggctgaatgggagggtgggggacggtgatgggaggccaaggggaagctggggggctgcagagcagaaacaaacaaaaaagagagagagacagacgcagagagaggaaaggagccaccaacagcaaggagaaaccgagagagaggttctctgcaagggctgagtgctagcctgggagacagcagataccttttatttccaaaaacagtttttcatccactttgttaaattaaaaagctgtttttaaagcggtgctgaaggtgctgctggaggagggtggacagaactgccaagtcctccctcacagcctcctcctctgcccccacagaagccgcctcagcctttcccccccgggggtgttctccagctcccctgctctctgtgctcctcagggatccccagggacagggtcagggcatctgagctactgttcattggcagaaagtccttcctgctgtctggcctcagtccctcctgctccatggagcccattctcttgcctgaccgctagccttctgtgctccgaccccagttccggctccctaaggtgtccccagtgtgtcgggggtgattagcacagctcaacagctcagtttcccaaccggccaccaagctcctcccagatgttcccctcactgttgtgccaatctgaacttctgatagacaccccactccaagtcttcaggtcctctgggaaccgggagactgaagcataaccctctccagccttctaaagtcccttttctactcttcagaaccccagctccattttaagtcccttttatggccatgatgttgtcagcctgggatacactcggcttggaccccaccctcaacaacaccccactgctagttctgaagggtcagccccccacccccaccccacttccaggccgggaaaatggccagtctgtttgggagctgagatgaaaagccctgcaggcctttgtgggcctctggcgggttttcgacaataggcccttccgttccgctccagtgcctcgatttcttgagcacccccaccctggggctgccaatccaggggccttgcctggcctgaatgaaaggcagggagagtcaggcccaacccccaaggctggcctcagaagattttggactttctgaccctccatcccatctcctccaagctcagcggctccccaccaattaaaccag

SEQ ID NO: 61074 - DNA, 1543 bp, Bovine  19866881340475
  misc_feature (1)..(1): n is a, c, g, or t
ncagctcccttctgccatttacaccaacccaagtgaccttcccaggccctttcagcctccaggaagccttccttcttccccggggcctcctagactgcccacacctctgccagcatcaccagatatcccattttctcccccaaggccctcgcagccagcccctgggagagcatgcactggaacgaggccaacccagctaggagctgtgacctaggattcctcccaccaggctgcacatgggccgtgccctgccagccctcctgagcccatcttgtcataggggacaggatttctgagtctcaaagacctccagtggagggtggataccagtgcaaaatgccaggggtctggactcagggggcgacactgggctcagaggtcagaacagtaggcttagacaaggtcagcggacaggggtcaggacctccacaccaccaggaaggggatgtgattggggcccgagggcctgggcctcactggctcccccactgaatgcagcgggggtcacgcgaggggctgggagtcacacttacagcccacatggagaagcacctggtggcgcaggtgccaggagtcccggtggaagcaggcgtacaggccgccgtggcccagctccaggctccggagcacgagctgagagccgttgagcaggtcgggggccaggtctgtgccattcacccgccacgtcaccgctgcgtcccagctggcagtcccacacggcagagtcacgtctgagcccaggcgctcgtactgcacgtggggagtctctgtggcgggtggggaaggcacaggcagaagtcagaggtcacagcctggcccagcactcccagatgatagcgagagcaggccccctgaggctcagggcgcgagtgtcttgaggagacaagggatctgcaaaattccttcatggcgtgcaagggcacaagtatgtgagtgtctccaaacttggacgtgtgcatgcgtgtctggggactctgtgtgtgactgggtgatcctgtgtgcgtgtatgagagagagagtttgtgtagagtgctgggacagaagacctaggtcacctccagtcaccaggtccttttgaaagctttcctgacccccataaccccagcctcctgccaccaagaggcccagccccagtcactgacatctgctagccaggcaagctgagccaaggggcaccctcctgaactccttcctctttctcttcccttctcttcatcctctccatccttgtctttgtgtcctgcctttctccctctccccgacaactctgaacccccgacaaggccctgtgccccagcagtccagggcagcagaaggaggaagagtgggcacaggagccctagggagcgcctggcagctgtcaacgtggtggtgaggcaggaactgcatagggtgcgggtgggggttggggggagcgcagggactgcaggagctctgaccctgactctcctgcccccaggaggggcctgtcagagcccaaagcaaagcccagccctggcctcagccgcccaggcatgatggacagagcccaggagactggagt

SEQ ID NO: 61075 - DNA, 1380 bp, Bovine  19866881391601
  misc_feature (1)..(1): n is a, c, g, or t
ntcctataggtctagggctccaagtcctgacaattgtaatttagagagttatattctcaatgctttcttgatctccccattcctatttccctacgtcatttcaatccctcacctacactctcaaatgccttcaatccctccttctacccagccgcccaaatcatccttctaatttctgaatatgatcacatttacccctctgttcaaaatttcttcagtggctccccactgtcttctggataaaatctaaactcctgcagctgggtcacaaattcactcatattacactcagatgtgcaatattattagtcttctctctttcctagaactgatttgatcttgttcacagtgcccccaccctgctgggtaacaggagcaggggaaactaaaattaatcctctctggtaaattcagttgggtctgaaattttattttagacatgtctaagtaactcaataggtttggatgactcagactttcaggttgttttacccttccttgtctcattttcaagatagcacttggatttatagagatgtcattgaaggaagggggtcccttacccatgtggtccctgggggttgtgtcatttggcatttattgagatgcagcatttgctgagatgtgtctggtataaataccatcctcagaggtagctattacagatgaggaagctgaggctaaactattttacacatgaggaagccaaggctaaaagaggttgagtaacttgcccaagatcacaaaattagttaagtggcagaaccagaaatcaaccaccaccctgattctggctgggtttgcatctagaagtccagagataagttaacattggatttgggagcactcagaagtcttcacagtatagcttcagagctgtgcttacccatgggagaatatgtctagtggaatgagaaaagggtccattcagaacactgaggaatcactggcatatgaagtcgggtgggaagccctacttgatggctcctgcccaagcagacttttctcttaggagagcttctaaatggaggagtcaggagcttctaggatggacagtcgtgcctgattatattccagccggggctaagccatccctcaaaataccccattcccctctgtcctaggctcccccatagaaggtcagaatacgaagccctgaccgatactgggtaggaactcaacatgtgtcaaaacaacttatgttgtcagagctgctcacacgtcctgaggccagggaatgtggaaccaaccacagaccctctgaagtggggatgcagggttcacattcaggtgagagtggacgtgcggtggtataggggacttcaacaccaggaggttcggtctcctccccggatgtggtatcccagtgccttcctgcag

SEQ ID NO: 61076 - DNA, 678 bp, Bovine  19866881520636
  misc_feature (1)..(1): n is a, c, g, or t
nataaaggctaacaggtgctatcatacactattgtgggcacgccacctcatgcagggttaactggcaatacctgccaaaatttcaaatgcgtatacctcgcaactcagcaactatgcttttttgaatttttcctatataaatactatagtatttatatatatactgtatatatatgcatactatatgcataagtatacttatgcatactataatacatatgcaaaagatgtatgtacaaaattgctcactgcagccttttggtaatatttcaaaaatggggaaaaaaatctaaatattcatccataggggcctagtgaaatacgttatggtatagccattcaatgggatattatgtatatttttaaaagaatgaggtaacttttatgtattgttatgtaaagcctccaagctttttttattgttaaataaacaagcaagttacataaacagatgacccatcattttactttaagaatgtgtgcacacacgaaatttctggaagaataatgtagattctgttgagagtggtttggtccagggaatgtgactggggagttgcagggaagggaaaaaactgcggtttaccttatactcatcctcatggttttaatattttaaatgtaaatgtgcattacttttataatttaaaatgctaattaagaattttaaaagttaat

SEQ ID NO: 61077 - DNA, 669 bp, Bovine  19866881828430
  misc_feature (1)..(1): n is a, c, g, or t
nttccctaaatccagtctatttccttccccaaatcttgtacatgacttttagagtgtccttctccatctcaaatctcatcatgttactcccctactcaaggcttcactggctcctctgccaccatcttctgagtaaagaacaaaatcaaggcccatcttccaccatcatctgagccctgctggccctgcaactttatttcctgtcactgttcatcatcataccttctaggtttccactgtagcaaaatattgactgtttcttgaatgtgcaatgctagtttcaggcttctgagcctttgcagatgttccctgaacatccttcctctcaagataactgggaaactgatgtttggagatcttttcaaaagtcctcctctgggaagttttctctgaccaccctccctttgtccctttccctctacatttatggctcttgttacatttactgataattaccgggagctccttaagaatgggtctatttctatatatcttgatgagccccaggctgaccgctgataactgagggaaatgcagcgtaaggaagtgaggagagagaggagacagaatgctccctgatcaggcccctcctcaccctgttgagtgagcatctcttccacagatatctccccacataagccaggccccaacctgggtgggacaggcctg

SEQ ID NO: 61078 - DNA, 1327 bp, Bovine  19866880454734
  misc_feature (1)..(1): n is a, c, g, or t
nattaaatgtcattgttattatagttcatagtaaaaggtatacatctatatttaaggcacaatagctgtacaaattgatgtactagtcaacagttttctggaccatattctggtgctcctgttaaaagacaggcaggtgatagaactccacagtgctgacactgggtcctggaacactgtggaagtcagtctgttaatgttttcattggcttactgcaatgctgaggtcaggcagaactcactggtctcctgcttctgccgacccagtgattgacagtaatgcaatgttcttttagaatttatgactctgggtaaaggacagagtgaaatatgtgactcaggtcaaaaattaggacaaagaatatcagagatgagatgttcattttaaatacaagtgtagagtcattagtttttaaagttgtgttttccaattcaaacttgagataattgaaaacagatatattttccccctatggaggctaaagtttctcttaataagtcaaaaacatattcaaaatttaaagcacatatgtgaaaattaagtttgctttctaatttttcaaataggcattttggatcattgggatattcatctatttcttttttgctttgtggggtatttattatcttagataattctccataatttaggatctgttgtgaatttattatagttagggctggtgtgttggaacctttgtatttccattgtcctatagaataacccaattctattctatatgacaaaatgtaatctagtcagtgattgcatatgctgtattttcacataagcaaaatttagatttttaaaaaatatattacaatatatagtatttattttgaataaaaattttatatatgtatattattctgtaattgtgatgaaagcattgtgatagctgtgcactaaaataaatgaggtggtcacatcatagttctcagccttactagaatcacctggctagcttcaaattatattgtgattggtctcattccagaaagttgtaatttaatcgatccaggatattgtctggctagactatttagaaaataaaaaatgccaaccatttcttgatctatataacttcaatttactggttaaatttttgcaaatctaggggctaatataataaattttaagatttttttctctattatttagcttaatcatttatttaattcttcagtttgcctaagtataccctaaattataatgtatttgtgtgtgtgtgtctatatatatctgtgtggagtatgtgtttgtaggtgtgtttatgtgtggagtagactaatttctcagaaataggttttaatgcaaacatttcag

SEQ ID NO: 61079 - DNA, 1148 bp, Bovine  19866880614520
  misc_feature (1)..(1): n is a, c, g, or t
ntgtacaagttaatttttttattttaaatagttaatgagaattcaggatttggagtcatttttgaaagtaacactttaaagacaaaaacataaaagaaaagaaaaaatcctctctccctttctcccagtgcccacaaagaaaatgacttgccatgttgtgacataatctttaattgttgattagcagtgaggaagtaaatagtctttaatgaatagaacccaagcataatttggattataaatctcttttacaaaagtgaaataaactgaactttacagataagaaaataagtactttctgctcagatagtttacttgtattaggggtgagattagacccaaactggctgtgtttcatccaaatttagctcttctggtggtttggacctagttttacttttttcccctcttttttaagaaaagggaaaatccacatgggacttttaaaagagatttcaataagactgtttttaagggttaaaaattcaaggtgctagaaaaatatcaagtactttgaggaaccttaaaaagcacactatgccttttagtcaaaaggtaagacagaccagaaaggaagtcaatagatgagtttaacaagttgatcagagtgaagagcagcaggccatcacaaaatcttgacttccaaaaaagttatgaattgggaaatgggtacacacacccacacagaatctcaaataactgaaagtgttatttcaacctagaaaaaaaaaatctctttaagtatgattctaacttgagaagaccttctttctaaacagtaagaaaacccaggtccatttgatgcaagggaaagacagatatagtaaactgtcatacaggatgttattgctctgaaacaatagggagaaaaaaaaatccagtcgttttgagtatagattgatacggattctctgatttaaggagagtgtcctggatgttttttggttgcattcaattttagcttgcagaagctagaggaaatgagtcataatgtccagaaggaagaattcagagtaataaggggagggaggatcaaagataatggcaaacaggaggaatttcattagaagagcaccactcaaaactcggtctccagaggtgtgcagggaaaaggagagtatgtgctgaagatggtttgcaaacaagaa

SEQ ID NO: 61080 - DNA, 2687 bp, Bovine  19866880814923
  misc_feature (1)..(1): n is a, c, g, or t
natcccagggacgggggagcctagtgggctgctgtctatggggtcgcacagagttggacacgactgaagcgacttagcagcagcagcagcagcatgtgcttggtattaccgtctgtgtctccccagtgaaatcactgcagtctggcagtagcagttggtttcaatctccagctgttttttgtgttgctgttttttttttaaattctaagaaccatcttcatcttgactcctcagagatgtgaagagcagcctgatgttcccctatctctgctgctgcttagtcgcttcaatcatgttcgactcttgtgaccctatgaactgcagcccgccaggctcctctgtccatgggattctccaggcaaagtaactatagtgggttgccatttccttctccaggggatcttccccacccagggatcaaacccgggtctcctgcattgcaggcagattctttactgctgagccaccagggaagccctttctgaacttacccctttctctttcctttctttgcccacccccaaacctactcctgggataccagtactagtagggcaccctccccacaggtctgagtccataggcttcccctataaactgctaagttctgtgaactcaactgaagtctcgtcccttggtttttcacaagaagctgcttacagtctctgttttgccatctatttagcccattatattaaattatttctgtggaaatacctagtgtgatttttttttccttgctcgaccctgagtaacttctatggctcatctttcacctattgaggttgggagctgcaggaaaactggattttgagaccagcaggcagttggaaatactgaactgtaattcaaaaaaatgttaagactagaaatatcagaataatctgcttctgcttccttctccacataaacctgggcttcagtataaacaatcacttctagctttgactttactgacatctagaaatgtattgatgcttttgttataaagttggtttttgctatgagagtgcctgaacagctcactttggaatatcttaagttatggaacaacgggacagaataaaaactcagcaaaaaatctccaagcttcatgctatcaattaaaccaaaaattttacatggtatactgtgccctctaaagtttttagggtggcaatagaaatgaaaatgtcccattattttgagtggtttgaataaaattggagtgaagatgctaaatgctgtaatcttccacaacagaaggacttggagtggatgagcccattatcatgctttaagaggctctcttctttcttctatcagatttcacaaaaggaaatctaaatactattggagagttttagatattaggctaaagcttttttagatccttgagaatggaagacaaacagaaaggttgagaaaacaaaacactacaaaaaaactatatcatactattattaagccatcgaaaacttttcactatacttgagacttctattccccttatgttgccaaccaattgaagtagccatcttagttcataagctgatgtgagatgatacttttgaaaaagatatcgcttttgggaaagacctctatatgtgcctttgtaagacaataagttcaggggaaacctagctgagatactccaatggtttcaaggcagtttaaatgtaataaaataggcgtgaaatgctctaataagtgctcttaagttcggcttcctcagtctgatatttagaggtttaaagtagaaaagccttcttcaagtacaacaaaacatgaggcaggatcaagaatggcttatataaaaccagcctgagtactgctttaaagtttataatgggccacgataatgaaggagcacactctacagttgtaacaggttttcccccccatttcttatttgttggacttttacttttcttgtcctttctgttgcctccattgtttcctgctcatttgttcaacagggaatatttcaagtactttgttatgagaaaaagtgtgtcaatttttctttgagactgtattcgtatattattttctactggttctgtttcttaaaatgtgattagttctattacacatgagaataaaaatgttcagctattggtaaggtctataaatcagatttgaagtcgtttgaccttaagttcttagaagtttgacttgaagttctatgttttcactttacatatttttgatcttttagtctgaatttttaaatttaatattataagcatcttccatttcctaatttttctttaaattttagagataaagtgaaaggacagaaacattaggaataagatccttgttttaagtatgaagtgaacccatatttggtaaaatgcgggctgatggactccttaactatttcttcatatctaatcttcagtatggaggcttccctggttgctcagacagtaaagaatctgcctgtaatgcaggagacccgggttcaatccctgggtcaggaaggtccttggagaaggaaatggcaacccactccagtgttcttgcctagaaaactcttagggacagaagagcctggcaggagacagcccatggggttgcaaagagtcaactgaggatgcacacatacacaatcatcagtatataataactatttcacattttaattcttggcccagaaggaatgtttttaaaagaacagccttactcatataaaaatatca

SEQ ID NO: 61081 - DNA, 943 bp, Bovine  19866880839209
  misc_feature (1)..(1): n is a, c, g, or t
naataggtgtgatattttattgcaaatagttaaggtggagcttgcaaatttgcatttcaatagttggggaaaactggtcggaagcttataactctcagctgtgataatgttattggctttttaaaaaatatcctcagtcctgtttctcacctttctttcctcctcttttcttgccctaccctccatcctatcctatgccaccccaccgaaaataggaagaaggtcctgcttaaaaaggattttgatcgagtcactatttttaccttagaatgctttctaccaaagtcgcctgcttaggattattgaaatgacccatatttcaagtataagctcttgctaaaagagaggctttctgcctagccagtgaagtatgaccattatttaccagtggcggctgtcagccgatagagaaatgctgctttatttgcgcagaagaccaggccaagagaggggagttttctcaccagttcccagacgagccagcgtgggtctttgcttgcctctccctcccaccgccgcttccaactcgtttcctacgcgccccctccccttctctctcccccgactccgaccccccagaccttaggagggtgacgggttagggtggagaagcgctgcgggggctcggtcgggaactgccttttatgggcaggggtccgtgtagcgtgctccgccgccccgtcggcggtctgagtttcgtggacgtgcgggctccacacctttcccgctggcattgagccgtagctcctgtgctagaggcagaacctagggacggagaaatggccctgctcgaaatcagctggcttctcggttcgtttgcgggtatagagccaggatttggggctccaccctgtcccctctgctccccccaccccgccaccatgataccctggctctttagaaacgggatgcatttgtacgcacgagtgtaatgcctttttaa

SEQ ID NO: 61082 - DNA, 1231 bp, Bovine  19866880976159
  misc_feature (1)..(1): n is a, c, g, or t
nggaggagatggaagggggcttctcccaaggcttcctccatttaggttttgcacttgcccatctttcagctccatggacctccaaagtctgctaccgtcatgtctccccagttatgcttgccagacccccaacgaggcacaggctgtgtgcgtctgagtctaacccattctttcagggtgttttctacagcagagccttcaggtccctaggggcacaaggcattctatttcacagtagtctctttcccaggacagagcagggacggccagacgtgccccactcaggcagagtctcctgatgcacaggcagccatgactccttctaatatttcaactccactacaggcatgctctctccactaacaggtgattttctcttggggagcttccgtctcttcctctaactgagtctctctggagaaacgcacaatctttcaatcagatttgcatttgcctgaaccccaaatacagtctgggttcatgtcttctaacacatactcataattccagaacttaaccaagcagctgtttcacgatcccgggctttccgtgacaagtaaggagttctcaaaacagtctatgccatctagaggctgctctgcccagagcattcaactagacctgccggaaaatgcctcactaatgccgcttgccagccttatggagtgtgatctctgacccaggccgatgccattctgcacagagtgtgataaattccataatgcaagtcttccaaaagtatgataggaatgcagagatgaaactggatttgagacggaaagaaaggtccatcagttgagtcctgtaggatgaacaccatttccagacaagcagctaaaggaagaaacagttttcaatttggaagtggcagaacaggaaaaaaaaaaaacaaaagtttagagtctggagcttaaagagtcagaaaagaatatattatataaaataaggagaagaaagaagacaagatacaaaggggaatttttacataaactgcacagccacacaatgcagatatttaaaagatagaaacagagttacaaacattaaacattatccttctagtgagttttaaacatatgtgatatactgttaagttaacatggtttaaaactgctgtgtacacaataatctcacttatagaaaaatttgaaactattcggatagaaaaaagttgaaagcagatgttaaaaattgctatctctgattgctagaaatataataaaatttaatt

SEQ ID NO: 61083 - DNA, 1094 bp, Bovine  19866881063739
  misc_feature (1)..(1): n is a, c, g, or t
ncccatattataaatatctggctccttctcttaagtccaagtattgtgttgctgttgtaaaccttcttctccactctgctctcaacactcccgcccccgccccactctttggctgctctcagctgacactaaagattcagaaggtgcaaacacttggctgccctgaaacctccccttacctgccttctatgatccaaataactggcaagattaacgtgacactaaaaatcagctctttttcctaattccagggtctacctttcttcctaccttattgaactttccccctgtgacggtcaagggacttttcaaattcgcctcctttagactggcccatttgcaaacagacacctgggccaagccctttttaatgcactgcctgtggtccataacccaactgtggccacaaagaaagaaaatgccctccaggtaaatgtgagggtaaaatactaacctcaaatcaagctttattttcaaagaagggaacaagtttttatgatggatcatgttttatagaacaagattctatagggctgtttattatttaagggaaaaaaagccttatgaacatatgtcataacacaaggacatacacttaataatcttagttatctttacccttaagccttttgtagatgaaaggtgagttgattttctcttctctggatgtgtaaaacattaatgctaagagaggcttttatattcttatccgattgatagaactctgattccatttgctatacatgccgcacagaatatgactgtgtatgctatttgaacttataccctaaaaaaatgtttaagcagtccaacattttagattaagatacagtcccagaaagggatatagttacaaaaagcatcagtcacatctctgaataactgaactctttattgataggtttgaaaattgcaatatgggtgcccgctaaccactgataataaaattgattatgtataacaacactgattattattataatcaccttgatttagggccttaacaagatcattctctaggagctgaggaaggagtatatttactagctgcgatcaaaatgccaagagatctctaatgtccctttgactctaca

SEQ ID NO: 61084 - DNA, 2154 bp, Bovine  19866881134262
  misc_feature (1)..(1): n is a, c, g, or t
ntcttccagcttggggtaccacatgcattccttggcttatggcaacataacttcaatctctgctctgtcttcatgtggccatcctctccctgtagacgatgtggtgtctctacattatcttccttctctgtatgtctgtgtgccttcacatggcgttcaattctttctgtgtgtctatgccgtgatttccctattcttgtaaggacatcatttatatcggactagggcccaccctaatgacatcatcttaatgtgatgactgctgcaaagaccctatttccaaataagttcacatccacaattacccaagattaatattttgacatatcttttggggggacacaattcaatccataacaatcaaatttacaatgtaaatatctatcaatgaatctactaaatttttggcacctggtacacattggctaaataaaatgttctttcttatatcctactgaaatcctcacattgtcatttaaaattatctaatttactattgattcaggaaaacttagaaataaatgattactatcatatgaaaatatttgaggtacttgaaagttgtattgtcacccttagctgtgtatttctccaattaaactattcaaatacttttccctataaatcctagtttctagctcttcaatcatctttgttactaccctctgtattccaacatgaacttataatttatccaatcagaaatacattttgggctatgtcagacactcaaaagatttactatgcaatatcatttttcctaaacccctgtttccttttctttgtaacattttgtccacattgttaacatggagacattaaatgctttataataaattttgggtttgaatttaatcatttttaatgagaaattatcaaaaatatggctagaaaattcatctgtaaacttgatgatttttttatactttaaaaagagaaaaaaatcatattgaaaattgctgaagtatgacctgacatgtttcacctaacctccaaagataacttttctgttgtgttttattaaattctgtgaggcacagcactctctgtcaattcagggctctctgctacctatgggtcttattttacatcaagagcagctgaacttcacacctatatttgccacccttctggatccttcctcctgagcttattaacaacatccagcaactacctggaagacatactgcaagaaaaaattaatgttttctgcaaggagcaaaaaagctttctattcccatatgtcagcactgcagagcaggcctattgccaaaaactaatagcatttaaacaatagttcattcaggtgagagttatgaaaatgctcctcttctgagatgattcactagatcttattattcaaaagtgagaataaaattggttgattttgcatctaaaaactgaacgcattgaaaacgaagccagagatctgatccttagtccaagatccctagtccaagtttctcacataacttgctctttgacaacgaattttcacatgacctcagcatctccattttctcacatgcaaaattaagagaaaacaacctcttacctactgattatgaggataaagagaaatcacaagcagaataactcagactgtaaggcgctgagcatatttcagatgttaatatgccaacttggaattttaaaaaagctaaaatctataaatcaagaaaacgacaaaagagcatcattgctgattaacggttactcaccactctgtgtctgcactttgggaaattatctttttatgttctctttgtgtgtggactttcaacccagaatatagtatgaaaatttcatattattattgccttacattttttctgataaatcttttctcccacagtactttgcaggagagaactatatgctgtggagttcaaggtcatagaaagtcacatatccaaccttctgggctgaggagtaataaactcagtacagcactttctcctggtttgagacttaacatctgttgccatctagaaatgaaaatgcagttttgtgtatagaattcaaacacgtggaaccagctaagactgtaataaggaaaagtaaaaacgattgttaacatggaaccctgttttagtacaaaattatcaataaagttgatgaaggtcacctgacttgagtaaatgttttgacata

SEQ ID NO: 61085 - DNA, 951 bp, Bovine  19866881651403
  misc_feature (1)..(1): n is a, c, g, or t
ntagccccaagtatcagttggcattttttccctaggtttattttactcacttcgtgtggcaaatgtttgaattggaaaacaagagagaaaccccccagcgtagattcacttctctgttctcctatcaggcgggagaccctcacaggctgattagtcatagaggcaggcttctttgttgatttaagagttcatcaggcgagacgcaacaattaccttgttgcctttacttgattctctattgttgacttatatctggaatgcctccattgtacaaaattcgatccaaaaatgaaaaaaaaaaaaaaaaaggcaaaaaggtaatgatggcaatagaggtttctgttaactgacttttgtgtgtagatggtacatacctcacaaatgtatgaaaaacattacaagttataaagttttgtatatatttgtgtatgttataattatgtgctaatgatagcattatttaatattgtaattccagaaagaaatgtttgaaatgtcacttcatactacactgtaatactctccttccaagaaaataattagcaagcttcaaaatgatattcagggcgctttgtaataagaacaaaatctgaaacttcatggaccaaaatcccatcaaacataatggttcctaactaggttgctacaggtcaattctataaggagataaccttctgttttgcacaattgcattttatttcagttgtgcatttaaaatatgtattctacatatgctattctgaaatttccagtcacatcatatcagcaagaaataagtcctagataatgcctaaggatgactatgattaactttttgtggtttgacagtattgtgctcttctttatttaaatgtaaatattaatatattaatattactagatagcttcatcaccccatgatttacaagatattcatataaagtgaaagagtgaatattacgttctataatg

SEQ ID NO: 61086 - DNA, 1157 bp, Bovine  19866881658675
  misc_feature (1)..(1): n is a, c, g, or t
nttcaaataggcctgtgttaaaatttcagttctggtattttttagctaggtgatattggaaagctctctgaccttttctaaattctgatcttttaaaatagattttttatttgcaaactagaaagcgaaattctctcttacaggagtaggcgacttaatgaaatatacctaaaagtacttggtataatattgatagatttaagtgttcaataaaccatatttgtgaaatgatctttgacatgtaggaaaagttttggaaggactgctactcaatttaattcacatatagcaaacctcttataatacaattctttctgctatttcttctttcaaattctttttgaaattgtgccccatctctctccctctctccacacacacacacaattttttattttacactctggcttccattatggtgggataggtgtaacagcttcctaatgtcaccctctgcctatccagctttactgagccctttcaaatccgtcttccatgctgactcctttaaagtttcctaaaacaaaattctcatctcctattttaaaaactcactaacttctcattgtttagcaaatgaaatccacctttctcttactccttttcagtgttcccattgtaatatggtcatgccttcctactgccaagatcagctgtagtcagccatagtctttgccacctgtttcttcagcttaatttagtgatactctttcttttatgaagcttacttttcccagcttcatccatgccatgctctgctgatggcattcctataaactagtcatactgcctagaatgctctctaatattctgttattattattttctttgagtccttgcttgggttattaatcaattaatgaaagtcaacttccaagtttgtctgtttcaccctgttgtagacccaacatcaacttcaactgatcccaccgggatctctggagctaaaatgacccatcacagttgtcttgagttagggggaaatggtctggcctttataatcttgcttcagtctatcagttaatatgcccccctctctgaaaggtttgaacttggccaaggtggctttctgcagccaaagcaaggaatgaaggggcacacaggtgaaggctatttgctgacagcactctcagtagctgagactacaaattcttatt

SEQ ID NO: 61087 - DNA, 739 bp, Bovine  19866880454048
  misc_feature (1)..(1): n is a, c, g, or t
ntttgaacagaatcatcaggtgattctatctacactggcatttgagcagagcttgccaagcctctctggatcagtttttcctataatttgcgtcttgagtcagatcactaccacatccccatgcaatagtccacatggatgttattactcctctttagagaaaaagggaaactgggttcagggagccgactcactggccaaaggtcacacacatttaaagcggcaggggcacccaggttccaagcctcccagtaattccttcttctgaggcgctatcaggcctgatcaatagtttccgtgggccatgcagccagagtctagggctacctgttcaccagcctcgcattattctttaagagaccacgggttttaacaacatccttgctccctttgtttgtaatcagggaaaactccttaatctaggtaatttatttaatgagtagctccaaatactggttcccaactaccaagcagtttaatacaaaaattacaggctagcttaattgcacttaaccaagtaagcttgtgaacaattttctctcattatttctcattgaagcatacactctcagcacagttctctttattaataaaagcaaagagcaactgtttgaaaaccttcatgttccctgatgtcttaaaatcctgatctacctgttaaatccagccaatgggataaaggaaaaatactatatataatagttatttcaggcgaaggctttctcacataaacttctca

SEQ ID NO: 61088 - DNA, 1766 bp, Bovine  19866880497896
  misc_feature (1)..(1): n is a, c, g, or t
nttgtgcttattttccatttctatataactttggagaagtatctttgcaagcccttcggatctcctccacacacatgtagtttccctgtcagccaggaaaatgaggaggacagattgtcttagtccttttatgatgctctcaattccagtgtctccctattacactcttggctggttggctgctcaccttaaacttggtctaaaaaagctgaaggtttttataatctatcccaaatgaaatctgccatttttagctgtgactgttcctggtgtttgccacccccacttcctccatctctgccccaaggccaatcagtctcctttgacagcaaagttgttttttcattacagcttgcccaaggtgatatggctgtaattttgcccagctgagctgggggaggcaagcataggagcagccccagagaaacgatacagactctcattattcttacccagagctctctcatttttgtgtttcagagtaaacgtttcttaattttctgcctttgggtaggtgtttacatgctgaaacaattattttttaggctgtcttgcccatttttatgcttcatgaaagggaatcatgtgatcccttcatgtagcgattactagaagatcaagtctgttttcaaaacagatttgttagagagtgctattgctgctgctaagtcacttcagtcgtgtctgactctgtgtgaccccatagacggcagcccaccaggctcccccgtccctgggattctccaggcaagaacagtggagtgggttgccatttccttctccaatgcgtgaaagtgaaaagtgaaagtgaagtcactcagtcgtgtccgactcttcgcaaccccatggactgcggcctaccaaggttcctcagtccgtgggattttccaggcaagagtactggagtgggttgccattgccttctccttttagagagtagtgttcaataaatatgtgttgagcatagttaactgaaaggcaggttttgtgctgaagagccttcagagagtgataaactctgcgtctcaggataccagatgattctggtagctccataaatgtttgttgaatgaaaaaatgatctgaagcaacaaccaatgtttcctttgcttttataagagtgagaaattggagaggactaaacctaaaattcctttgaagctttgttttgataataaatgtattgatttacctgaggccttgtattagattcagctaagataataaaaatccctttctcttcttgtggctcaactggtaaagaatccgcctgcaattcgggaaacctggcttcaatccctgggttgggaagatctcctggagaagggaaaggctacccactccagtattctggcctgtaagtttccatgaactgtatagtccatggggtcgcaaagagtcagacaggaccgagcgactttgactttcgctttcaagataataaaaatccctttctcttctatatcttaaaaaatgcttttcagaggttaatactacttttaaataaatctccataaaaaagcaagtagaaagattacaatctaggtaacatttccctgtgatatctcacgcccctttctagttcagacttctgcacaagctcattagaaggtttggtgtgttcagagaacatgttaactggatgtttaattttcaaatgtttctgggcttcccctgtggtccagtggttaagaatctacctgccaatgcagggtacactggttcgatcccttgtccaggaagatcccacagggacatcgaagcca

SEQ ID NO: 61089 - DNA, 1240 bp, Bovine  19866880505703
  misc_feature (1)..(1): n is a, c, g, or t
nccctgtgctgggcactgtggggtctactgaaatgcgcaaagtgcaggccctgctgtcaaggaatttaatgtcccaggctgggttacaaccactacacattgtattgaaagctgctcctaacatgaaaaaaagcccttcacaatggccagactctccaaagcacgacacaaacattcctcttttgtagaacacactgctccttttggaaggaaagttgttctttcatccaactgtcaatagacatagtgtttgctaagtgtagggcgccttgctgggcataacggggggcttaagatggcaagacatgggtcctgacctctaaggctttatctgtgtacatctaaagccccttaatgtcagaggaaatatatagcaactgcaatattttttgttaacataaactcttctaggatgtctgttaacccaagtaatgattcttaactacaactcatacagtttcagacttagaaaggagccttgaagtcccccaatttcacaaccatttataaagggtagatccagagacattagctagtctgcccaagaatgcacagattgttgttgttcggtcacacactcagtcgtgtccaactctttgcaaccccatggactgtagcacgccaggcttccctgtccttcactaacttctagagcttgctcaaactcatgtccgttgagtcagcgatgccatccaaccatctcatcctctgtcatcccttctcctcccaccttcaattttgcccagcatcagggtcgtttccaatgagtcggctctttgcatcaggtggtcgaaatagtggagcttcagtttcagcatcagtccttccaataaatattatgttcattttccttaggatttatttgtttgatctccttgctgtccaagggactctcaagagaatgcacagatggctggtggcaaattgagaactgggtcctatgtcatccttgttcctcatctactacttgctctgtgcagcctgtctctgatatcaacagatgcaacaatacaaacacagaatttaaagacagagaaagacccaggagcttcataggcataatgcgagaaaatccaggcatctctagtgaggcctttctttaggaaaatagatcgcaacagttacacaagggctatgtcattgccaagttcattaacaatgtgctgctgctgctaagtcacttcagtcgtgtccgactctgtgcaaccccatagacggcagcctaccaggctcctccatc

SEQ ID NO: 61090 - DNA, 925 bp, Bovine  19866880660568
  misc_feature (1)..(1): n is a, c, g, or t
ntgcagcaactcaattgcccagaaaagaacaattgtgagtttatagctggaatgctgtttgcttcacctctcaaccgtgggctttcacaagttttttgttacttctgtattgatggttgatgagacactcattcccttgaattattaaaattacagattgagctggaaattactcctcttgaaagaccgcagggaaaggaggagggaagggccatgggtgagaggaaacagctgtctaaaatagtttagccaaggcttggaacctgctgtggtgaaattcctccggattcttgttctggagagattatcagtgtaaaaatggcaagaaatgacagaatggtttttttgtgtcccttgtgtggtattcttggatcagagctgggcttatgagggacagttgttgttcagtcgcccagtcgtgtttgactctttgcaaccccatgaactgcagcaagcaggatagttgaggctgagttgaaattgtgagcttctctcttgatagaagactgagttttacctcgaaacgaaacctcatcaagtatctattctgttcaagtcttaagtttatagttaaagaagcttgtaaataatgaaccaaacccaaatgaaattttcctgccctatggaaagaaagtgaaagtgttagtcgtttagttgtgtccaactctttgtgaccccatggactgtagcccaccagccttctctgtccatgggattctccaggcaagaatactggcgtgggtagtcattcccctctcctggggatcttcctgacctagggattgaactcaggttccctacattgcaggcagattctttaccagctgagctaccagggaagctctttctgccttatggtctactgaaaactaaagaaaataatagtgttttgggagagaaaaaaactttcttaccaagttcagag

SEQ ID NO: 61091 - DNA, 1866 bp, Bovine  19866880674243
  misc_feature (1)..(1): n is a, c, g, or t
nccgtacactaggcttccatgggctcaggaggtaaagaatctgcctgcaatgcgggagactggggttcagtccatggattagcaagatcccctgcagaagggactggcctcccgctctggtgtttttgcctggagaattccatggacagaggagcctggtaggctacagtccatgggatcacatagagtcggacagactgagcaactaacactttcacttcacttcaccatactgttaaaaatgattaagatggtaaatcttatgttacatgtttttcaccatcataaaaataaaataacatgaatgtgtgtgtgtgcaagaaaagattggactgtcacaattatgaatgtttaatgaatgatctgagctgtgcgacttactccgtttccatatgcctctctactctttttcactccctttatgcttttacaagcaaaagtgcattttgcaataagctgaacactgagaaatctgatttcattttattgcttttaattttctgccttcattttccccctctttctcatggctctcttccttcttgggaacaatccaggatatgtgacttctgaatgtaaatctacgtgcccacttacctatctcattttagtattttccctgatgcatacatttttattaatttttattgggtatcccaggtggctcagtggtaaagaatccacctgccaatgtgggagatgctggttcaatccctggctcaggaagatcccctggagaaggaaatggcaaccccctcccatattcttgcctgggaaatcccatggacagaggagcctggcaggctatagtccatggggtcacaaaagagtcagacataacttagtgactaaacaaccacaaaaaatagttgctttacaaggttgggttagtttctgttgtgtggcaaagtgaatcagctatatgtatacatatatcccttctttttcagatttccttcccatttaggtcaccatagagtctcttcagtgggccagtggtaaagaatccacctgcaatgcaggagacccaggttcaatccctggatcaggaagatcccctggaggagggcatggcaacccactccagtattcttgcctggacagtccccatggacagaggagcctggtgggctacagtcatagggtcacaaagagtcagactcaagtgacttagcacgcatgcatgcagagcgttgagtagagctccctgtgttatgcagtaggttctcactagttatctagttatacatagtaatgttgagtttatacataataaactagggcactaggaacagtttactatgtataaactacatactataatctgtgtagtttatacacagtaaactagggaagcctggcgtactacagtccatggggtcgcaaagtcggacacgactgagtgagtgaacagcagtatgcgtgtatgttagtcccagtctcccagtctatcccaccttccctccttgctaaccgtaagtttgttctctactcctgatgcattttcagtgtcttttgttgggttccttctggttggctgtcttgcggtccctgggactgagttcgcctctctgctttcacgtgtagggaaacttcagacatgccagcagccaggcccccgtgtcccgggaggagctgatgaccgtgctgtctagactgcaaggtgtgcacctccggggcctctacttcactgagacgcagcggctcaccctgagcggggtggggcttggaggaggcctcggaaacaggaagtggacgtcgagcacagagcgtggagatgtgtgcctgcccccctgactacacaggtgactcatgtcaggtaggagctgcccctcaaccatcgaatgccctggagggctcttgggg

SEQ ID NO: 61092 - DNA, 1524 bp, Bovine  19866880681685
  misc_feature (1)..(1): n is a, c, g, or t
naagggcaggtataagaggaagaggcagaggtctgcgcgcagccagcaggacgcccagggactacgatgcccccggcagtgaggtggtctgcccggagtgcaggatggctctggatctttggggcagccctggggcagtgtctggggtacagttcacagcagcaaagggtagtacttcctccatctccgggtcaaaaccaacagcaagcaagttatgtggagcttaagcccagccaggtaacggcccttttacgttttgctttgggtggggaagggttcccagctccctgagatttcaaggcagggtgatgagtgagaagtgggtgggctgggggaggggccgatggctcccccatctgctgactggcagtgttcatttcggtgcctgacagatcgctctcctgggctgttaaccacaaaaccctataaacatcagcccacctggaaatgccgaggcagctagagtttgaatgcctgtgggatgttcatgtctaggaaacttcgtgccctttctagacgaacccaaggcttaggataagagtctggatgcttgtaggtttccaggctctgcttgggagaaaaattgcccataaagtaaactctgagcatcagtggaatccctatttaagattaagaaaattgatgagatcaattttgtgtaatacctaacagatgtgcttcaattagccgggcattaaacattcataaattctgctttcactgtatttaaatttcctggatagtacctgtatattcacagagaaataaacgctatggctgctaaagtgacccaggaaacttgatagagacatcatttttatcatttgtactacaaaagtttattggaaaagttatcctgaaaaattgtgacttaaaaaattattagttgcaaagtctctttactgaagtaacatgttgggacacattcgttttcatttagaacaagtcttcaatacagcctgaatagttgaacagaatcgtatgttaaatgtagagtttgtgtgctttacagaggtgagaaaataattatattcccataactgacaaatgttctgagagtcacatgatacatagttcttgtggagtgtttttctatttctaagcaaaagcaaattaagatgggtgatttacctttaatcaggatagaccgtcctcacccaccaaagaatatttaattaaagcttttactgggcatgttgtcataaataaaccatatatatttattatttagataatttgttctttattaaatcggataattttataatcatgtaatggggtatatggtgataattataaggcccttgtgccttcttagtagagattttttgcagatacgatcataccaccactggctgaattaagttcaaacgtatctctcagttgtgctttcagctcaagaacattccctttcatgtttggattctccttagacaagcccattcagtaatcctaagttgttgtagtgcattcttttgcctcgacatggttcctaatagctgaagggaaaattatattggaaat

SEQ ID NO: 61093 - DNA, 3761 bp, Bovine  19866880758385
  misc_feature (1)..(1): n is a, c, g, or t
ncagctctgtggcctgtgctctgtatttgcaaatccttcgtatgttcattggcaagaaagattttgatgctaacaaaaaaatcccaaaactgttgaacttgatgatacctaagatcattcctagttctaataaaggtataaggcgccaaaggggctaccaagtaatatctactaaactggttgtgaaattatgcccacactggctctgaaatttacttaacaacttggaataatgggacaatggtttctattatataagtgtaaaaaatgttttcgttctgttcctctttacaagagattctattactcaacccaagtgactaagaaactcctgattcttttgaaaaattttcaaaacttgcacattttactgcccagtttctgtttcttaatggaatccaagatgtcactttaacacactgtatttccatgatgtgtgctgtgtatttggaagagtaaaggcactgtctaaatatccttgatccatgatatatgtataagcaaagctcctataattcacccaaacaaacaactctgaacctatttcataccaaaatctgtaactctactttccctcttacagaagggacaagtgttttagctggataaggaagagagtttgcttaactgacatcgacctgtgtgaactgtatagaaatattttaaccttaatttccaaatagtccatttgctttgcacacatgcagccccttcagcttgaacttggtcaaaggaaagtacttttctctcaggcctggggacaactcgcagggtgcggtgagccccgctctgtagtccacacatctgccagcaccccacctccatccacacaccccagcccctcagcgcacctcgtcttccagtcctcctccgacttggacctgttcttgcgggccgctctctgtttctcctcgagtcgctttttttcttcactagcttgatctagaatcagcgtagcagtgaaaaaacggttattgtacaagcagaggccacccgggacagcccctgcacactcactccatggaggcaggtgtcagcaccgccgtcctttatcagaacaccagcaccacagtcacggcctgtcgacactgaacacagccccaggccgccgagaggtggcgctggcatccggggcctctcacctgcttccacagcctgtgtttacccaaggagcctgcttattctgaaggcctcagaagtcatgttaaaatgcttccctgagggtccagaggctctgcacttgcaaggcaggaggcccaggttcaatccctggtctgggaacgagatcacatatgccgcaactaaaagattccacgtgctgcaactgaggtctggcaaataagcaaacatgtgcttagtcccatcagtcacgcctggctctgtgcaaccctatggactgtagcccgccaggctcctctgtccatggggttctccaggcgagaatactggagtgggttgctatgccctcctccaggggatggatcttcctgacccaggatcaaaccccagtctcctgtgtttcctgcactggcagcaggctctttaccactagcatcacctgggaaaagtacaggttgctcagtcgtgtccgattctttatgaccccaaggactatagcccgctagtctcctctgtccatggcattctccaggcaagaatactggagtgggttgccattcccttctccaggggatcttcctgacccaaagatcgaacccaggtctcttgcattggcaggcaaattttttatcatctgagccaccggggatggcttgtgctaacacctaaaatgctaatatgtaagatgcttgtgcgaacgtataaaacgttcagccctaacagactaaaacacagacagtgactgggagtaaggcaaaccatcctcctcaaagaaatccaccttccctggagccgccaggcacgttacctatctccccgttctccatggctctgatgtcaggccgcagcctgcagtctgtcttaggaatcacgctctccatctccttgtctacttcattcaaaaccattgcaaagctagtaaaattgtacatctaaaaagaagaaaatgttcaaattaacatgtactggaggttaatgcagaatgaaaccctgaagctagaagatttgacagggatcccccactctgctccagggtgatgatggccggcctctctgcgcccacacatctcccatgttttcacccgggtctgtgccagctgtgggagtctgtctcaagcaaaccccccaggtgacattcaccaccatcagctccagggagaactacaagcaaaaccaacagtctccattccacatgaaaagtctcacttggatctggctgcgtcactacgcacttaaagagagtcaatcttactcctcagtaagtgtagaggaaacccctcaaaggcccacacccgtatgtatggaggaagccccccaaaggcccaccccaaggcatctcggccagacaccaggaggcctgggaggcagcaatgccaagtcctgggggggaaccacagagggatgactgaggagcaattcgatgacccgcctctcacccccgccctcctcctggttctgaccaggccggggaaagagcgccatcagatccaagtaaacaggaggccttacctgggctgagttcggaggccgtggggctattcgccacaggagaacgctcccggggatgacgaacacgctctcggaatccggcattggcatttcatccgactcctcagaagcgctcatctggaagaaccaacagaggaacaaaactgaaatgtttaaaaagatagtacttacaaccgtgaatattcactggaaggactgatgctgaagttgaagctccaatactttgaccacctgatgcaaaatgctgactcaccagaaaagaccctgacgctaggaaaaactgagggcaagaggagaagggggccggggggcagcagaggattagacggttggatggcatcaccgactccatggacatgagtttgagcaaactccaggagttactgaaggacaggggaagcctggcatgctgcagtccatggggtcgcagagagtcgaacatgagttagtgactgaccgacagcagcaacaaattgtaaaatcagcagttctcactgtgtggcattagaatgtaacccgtgagtgccagggcactgtatctttctcattctcgtgtcctcacctttcaatccaggccaggaagccaataaatgtgggtcgagcgaccgagtccatgctgtgagcctgcgttgtgtcacttttaggggctatgagcacgtaaggccttaccagcaccactgtcgtcatcacgccttgactgtcgtgttttaatatttttaaagctttttttaaaatccaaaataactcatttaagtggttcgtggaacactattagggcaaggaaaggttaaattcttggagcatttaactaaatttatcaatgacccaaaccagcagggatcctgaaagtattcaatcaaaagatgttaagctaaaaaagaaagcagcatttccactagctgcctgctccctccccttccccagcagagctatgccagcagctctctgtatatttagtccttacgtaactggcccataaagttttatatataaagaatttaagcctctggaaagtgaagtcatattcccaatgtcattgttaccaaatctagaactactggctgagacatggaattttacaaacagcaaccaggaggggacgacactggtgacgagcttcgcctggcatctga

SEQ ID NO: 61094 - DNA, 831 bp, Bovine  19866880840733
  misc_feature (1)..(1): n is a, c, g, or t
naaatatatgaaagcacttaacttaagcaggacatcttccttgaaagttatgattaaaaattcttaggaaggttatgcagtcattatattgactgcatccttcatattgatatttatgtagaaatcttagggtaatttgttattggattagaaatccaatgtcatcgttttctgaattgtccctgaagtatagcataaacttggccttattaaacccacagctgcacagcaacgtatgttgttctttaaaacatgcctgccttcctctttctgccgtttgcctctttatctggtcctgccctattgatcccatttactttatgggtttgagcaggtagcaagctgttggtcttttatccagaaattgttggtctgtgactatggctctatctcagtatacattgtgtttaaaattttatattcactgacctggtttatggtctcagctgagctccattttaattctgctatttacttgcatttgaaggccagtcggtcacttataaccttagtagatttcttatgtctgttggtgggcttccctcatggctcagtcggtaaagaatccgcctgcgatgtgggagacctaggtttgatcctggggtcgaaaagatcccctggagaaaggaaggataaccctcttgtggattctgccagaagaattccatgaacagaggagcctggagggctacggtccatgggcttgcaaggagttggacatgactgagcgacttccactctatgtctgttggaagcagacaacaatatatattggttctccatttatgtgttcatttattttacatcttctgcactttgtaagcaaggctt

SEQ ID NO: 61095 - DNA, 1850 bp, Bovine  19866880876667
  misc_feature (1)..(1): n is a, c, g, or t
ntttttaatttaaggagaattacaatgttatgttggtttctgccatatatcaacatggatcagccataggtatatatatatatcccctcctccttggaaaatttactttttatagtgtcaagaaagatgatttgatatccagaataaaatatatgatgtatttacatattatacatagaaatatgtgtaacatatatttctataatagaaaaaaagtattacctgattctgagtcatcctatccaatgtgtgggacccaaatataccacttgacaaatacaatccacgagaacatctctatttaaccttttctcaactcacaatgataaatttctgtttcgtaatctcaccaacagtgaagaaattaactaacaaactgcctgatcttttgagtaaaattgaaagtatcaaccaacagctgttgccactgggcaacatctctgacaacgtggaccgcatacgggaactaattcagcaggccagagatgccgcaaataaggtgggtgtgtcccctcattgccaggcaccaaggctcattctttgataagttactctattagaattaatgaaactaactctgttagtttcactaattaagaagtgaaagatatccaggtacccaagaatcagttgtctttcttgcccaaattctttgggtgctccccatgtgaaagttcattttctcccatcatctttcagaagttcatatcatcttcatcccttaaatgacctggtatgccgggaacagtggtttcctttctgctggcttatgcaggcaggaagcagggttctcctccaggctctaggcagtaaagtgttattgcaagttcaagtaagggttctatgatcagaacgtgtagatatgatactgcacaaaccctatattctcacagtaactcgggaattgtggaatccatttttagtgaggatggaggagtggttcctaccactcccacatgggcagtgttctgaatatgagattacagcagttttccttcattgggaagttccatcaacctttcttctaattttaatctgacattatttacttgaatttcttctctcactatttgttttatcctaaaataatgtaaatgaaatattttgtattttgtagtcaactcccctgtgagatatttggagattagagggatggaaaccaagtcagaatatcattgtctttgaggcaccatggttgatttctaggcttatattccttactttgagcctcacaatctgccttttcttttaagaaagagaacttcccaacacaaaacctttagcagagaagcaaagagcctaaggcacagtttggcagaaaccaccctcttcgtacccatacgcgtcttataaaaagcaaatggaaaagagtatgcttctagcttttgcctctctacgttcttccactaatttaatgaacaaaatatgaagtgtataaatagcgcagaggtttagcgctgataaccaaggcagactgccttgcttctttgttttttaatgtttatttgtttatctgactgcatcaggtcttacttgctgctcgtaggatcttcactgcagcatgggtttctctctgtagcgtgtaagcttagttgctctgaggcatgtgggctcttagttctccaaccagagactgaagctgtgtcccctgcattggaaggtggattcttaactactgaaccaccatggaagtccccgcactgccttgttttgatccctgctctgtcacttacaaagctaagactagtttcagttcatagatagataatgtttcacaaaagtattaaagcacacatgagaagctgtgtgggaatccagatccagggtagaaggacctctagaagggagag

SEQ ID NO: 61096 - DNA, 1493 bp, Bovine  19866881025561
  misc_feature (1)..(1): n is a, c, g, or t
nttatatatttgaaagtactaaaaaaggagatcttaaaaattcttaatgtacagaagaaaatctgtaactgtgtgagttgatggatgttaactaactgtggcgatcatttcacaacctatacatatatcaaatcattatgttgtagactttactacaatgtagcatgtcaactatatagcaatacaactgggcaaataaatggtgaacctatgcaacctgttgcttattttgtatatgggaaaaggaataataaatagcttttatttactgagtgcttgctatttaccaggaatcatgataagggattcataagcatttttccaacaactatatgaggttagtatagttattactaacctcagtttcaccattgtacaaatgatgaaacaggcttgaagaagcaaggtcactggcatgagatcagacagatattagttggcagagactggatttgaccctaagtagccctgctggagaagggcatagcaacccactccagtattcttgcctggagaatcccatggacagaagagcctagtgggctacagcccatggggtagcacagagctggagacgactgaggcgacttagcacacacacacagccctccttccacctcctcccaccttctcccaccagcgctttcccatgtcacagtctggggttcacagatctgaagctgaaccccacaacctggaaaggaggagccactttctttactcaccatcacattcttctccgggaccactatctttgggttcctggtttatgcagtctgaaatgaggagtaaacaaagaaggcagtgctactaaacttactcttcatgtactttttaacttggcttttaggaaagctagtttcagaaaatttcagtcacccaaccacccagtatcgccagctcttcccttctccctccttcccttggggccactgttctgagagctgtcttggatcccagcagtctggctgcaggaatgtctcttgtggcctctctgatgatatattgcttcttctctccaaagggtcatgtgattcctatgaagttaacactccaacttgttactgttgccttcatttggtggcctcttatacaactgctgatgtctcttccaatatcattcgagaacattcaatagacactcactgagtgcctttgagcactccctaagttccatggcccagtgctaggggcaggaatacaaagatagaagacaaagtctctgctgtcctataggcgcgggttcaatctctggtcagagaactaatgctccttaatggtcagggaacgtaatggtcctgcaggggaggtagacacattttacagcagtgtgacagatgctataagggagatatgcacacacagtggactagctacggctaaattcttgaggttctcagctacagacaggaaagccctaacggtcatccttggacattcttcactctgctaacttctactcctttccccataccatgcatccttaatactga

SEQ ID NO: 61097 - DNA, 1918 bp, Bovine  19866881095618
  misc_feature (1)..(1): n is a, c, g, or t
nctgctaaggttaccaggatacctaccttaaattggaatttcagataaacattattgcataggtcatacttataaataaaaatattgtggtttatctaaagttccatttcagctaagtgagagtcactctagtcatgtctgactctttgtgaccccatggcctatgtagtccagggatttctccaggccaaaatactggagtgggtagcctttcccttcttaaggggatcttcccaacccaggaattgaacccaggtctcctgcattgcaggcggattctttaccaactgagctattagggaagcccaaagtgaaagttgctcagtcatgtccacctgtttgtgacccgatgggctgtacagtccatggaattctccaggcctgaatactggaatgggtagcctttcccttctccaggggatcttcccaatccagggatcgaatccagatctgcattgcaggcaggttctttgccagctgagccacaggggaagcccaggagtaatggagtgggtagcctatcccttctccagcagatcttcctggcccaggaatcgaaccagggtctcctgcattgcaagtggattctttaccaactgagctatcagggaagcccccagttaaatttaagcgttgtttatttcttcctactaaatctggtccatttgtacatgctctttcctctgaaggaatgacttcttcttgctccaccctactcttccattttgatgcagaattgtcacttacctttcaaattctggctcttgttaggtcctctctgaaccttatttcttccagggagagtttagtttcataagttttgaaacataccattagtctgcacctctcacgctggtaaattttcagagccatttctagaaatcctcatattctcatttaactttctctctacagtatgggggaaatttcttatatgcaagtaccttggacatggttactgctcagatatttcttgaaaactggtgctcaaaaattctagaactgtttttttgtaccaattagagtaattcagtttttgcccctaaaatgaggagaaaactttggaaatggctttttcaaaatgtagttgattctttaaataactgttaatttcagttcaacagtatgtttatcaatatgctttaagattttttttttagcatttacagagcaaataaaaataatatcagtttatttatattgttgctgcttttaaggtgaaaatggttcttgccaaattgtatgagaataagaaaattgctagtgccacccacaacatctatgcgtaccggtaagtgatcatcaatcactgcttcaggaatgtgcagtttgtaaaaaaaaaaaaaaaagtggggaacagatccatgatttaaaacaaacaaacaattatgtgttttttttccattgtaaaagtaataatcatgtgtgaaatatttggaaacggcaggaaaaaaaggaaaagttaaccgttctctgccattcagtgtaactgatattgtgaaatgttttctgtcttttctatgcaaagtttattttttaatgcttcattctagtatccaggtttttccttaagataacaaaagcatttttccgtgttgttatattgctttataaacattattttaatggctttatcatatttggttgaggttccataccacaatttatttaaccatttcttttttgttttagtttttcattttttaaaactattacaaagaatagtcctgtgaacatctttgtatactttttagattattttctcaggataggttctggttatttcatattcttttttgaaatgaaacagaagtacgtaaaaaggaaaaaaatgaatagattcctggaagtagaattatcaaaaaatgtgaacatttttgaaattcttaatccatattaccaaattttttctgaagtt

SEQ ID NO: 61098 - DNA, 1151 bp, Bovine  19866881102239
  misc_feature (1)..(1): n is a, c, g, or t
nttattttgaatatttttatgatgtcatgcttgaatgttttagatttaactttgaaatgtttaaaattctcctatacaaggtttatatgctcaaatatagaggtgtatgtcattttgtaaagattacattgaaaagatggcttttctttacactaatcctctcaattttgccccctcccatccctaaaaagaaaaaaaaaatgtctgagtgttcggaagagacattcctaatttgaaaattcgaagctggaaaaggtatttcatttgcttattttagtactctgaatttacttttacaattttctataattaatgtcattagaattaaaaggtgtttgaattgtatgtttgaaaatatgtataaaacctagcaattcacaaaaataccataaaaatagaggttttaggcaccatcattacataatgacaaacctttttaaatccttcaacttccagtggcaaatgccaccagagaaactcagttgtattcatgtattataaatatcaaactatataaaaggaggtcttgtgcatttcaggtttgcaaggcacctgtgtacttaagatatgtacggagacctactgtacagtagctttgcccctttaattggggcacattaatcacatggtatttatctacccaaccccagactgagattttgctcctaggggccttaggtaactgccagtaagttatttcaatggctgtctcaaagttaacaagtgttataatgaaataatctacctgatgctaataaaggctttagaatgttctaaacagtggtggtttcatttaaactttcaaatatactcataattgcaattcgcgtgatcctgaattgtcaagcatgtccttacaaagaagtcccctgtggtgcccagagtttgcgctgagtgtcttctgggtaagtacagtagaagagtaaggtgccactgtattcactcggtgtgaatgccagatagggaatgattaactggagacccttgctagcaaactgctcgagtggaaatacatattttttacagtgtgtacctaagacctggttgtgttgtttctatatcccgtaagttacaaaataagcaagatgacaaggctttatgcttgcatgaagtttattgatatagtacgcttggtggcagactccaccttg

SEQ ID NO: 61099 - DNA, 1879 bp, Bovine  19866881110033
  misc_feature (1)..(1): n is a, c, g, or t
ntgatgtatggagaaattttgttgacatctctcagttaagctgagagtctgatagagggggattgttataaaagaaataataggtctcaaatggagtcacttgtgctaagccccatgtcagcaagccccatgacttgattctcaaccggaatgcagttacaatctcccccaggcatacagtcttaactggtcagtctgaaattgtctggtcagcatcagtaatctgccccctaagcccccttccgtctcctgtaggtaggttcctaagcctgaaatcatccattcttttcccccttctgctataaaaatcttctattttgtataactccttggagctcctagatggggtgcaacctattaattgattagtaaagtccatttgatctttaaatgtcttctggttgaatttctgttatttaacaggtgacatattcactcacctactaaatacaatgcactttctaggtgctgggaggaccatgacagacaggatagagaccttactctctgagggtggagactccagggatgcaggggaaatggggattaatcagtggaatagctcacaggagagaacttagcatcctcttctctggaggacagactctcatctatcttggagtgtttaatgagggaagttgtcttattttagaaaatagaaaaggagtagtgactgggaaaggtaatatttttaaagaggaaagttaaagaaaaaggctgtaaaatactcagaatgtaatgaatgcatagtcaattgtcattaagagggagactaaactggcaggggattattatttttttaatgcttctctgggaagaaagagtgtggaataactgaaaaattatgcaattagacagagcaggagttttggcatcttgcttgaagcctgctgagctgttaggcatgtgactgaaggtcgaggagggtatgcaagtagatatggattaataaacacactggagtgtcttactgagatagtaatatttggattataaagcacttttaaaaactatttgagcccatgattaattgaggctcacaaatttcaagcagtgaaatgtgttttattgcaattgctattaagaacgatcagctatccgattccttgatttccctagtgaattttataatctaaattaaacagagaatggtataaattttcccttttttgggtagctgattaaaaccaatatcatctccatatacgattacatagtagttatatctcactccatggaacaatttattatggatctgattactttcagtatttttatgaattgatcataagccaatttgaaaacttactgatctaaagtaagttcagtaataacagaatatactgcctgtaagaattattaatgaaataaatcaggatgcatggaaattagcattgctccttgtataaattatgttgtcacgaggctgtaaatcactgcctgtaacatatttctagctccagatgtaatcttatactggggctttattaccagttcataactatgcctgaataaggggaactattttctgaacagattcttctttgaaaatgttttaagaagaaagaaagaaaaaaaagaaagaaacacaagcagaaagagattatataattgtaaaaatacctaaaaacaccactattcttttaaaaatcaaaatagctttacttacttgaagaagcctatatgccattttacgtgtgatagaagtttacaaacggagagttttctcaagtttttctggaaaacaatccttgcacacaaattgctgaggcaattcatcctaacaaaatccttgagatggagaagaaaaggacagaatattttcgttccctctaactacagctgtcttcttgcattacagacagaaactaaacagagg

SEQ ID NO: 61100 - DNA, 899 bp, Bovine  19866881116138
  misc_feature (1)..(1): n is a, c, g, or t
naaactgatgccagaaaaaagatacctatctaattacttatgttggtatgtctctgtggatgaggcattgatgtcacttcagatgagggcctctccattcatcactgatgctttaaccttacctctaatcaaggaagttagagattacacatgcttttaaatgaaactacagaccagggaaggtatcactatggttgcattatttaaactctgaaatatatagtgaagtcataaagggcagtaaggcaagcaatgcatgtctcccctcctggcagcagttttcaaagagaatgacaatctgatcacagcataaacatgttaaccaaaaaatatatacgtaggcacatgcctatcattacagcctatttacagagatatttgatcattattaccataagagagacagtataagtagcagaagaatattactaaaagagtaacactatttgcattctggacagaaatctaaattcaaaacctcatattaagaaaaatattcttagtaaaacctgagtgatcgagttagctgtactggtcaagttacattttctacttacctctaaggattccttcaagtctacagcagaaactgcatcgtcttcttcatcatcagtcacttggtcttgggaacagtagtgtgtgctgtaagcagaatgctcttctattgcttccagccagtcctgagataatccaaggatttaaacaggtgaaatacacttttaactcgaaacacgtattatgacaacaacctgaaaagcataaaatttacatggaggaaaaaaaatgttagggcttcaaaaaaacaaagcagaatatacccaacaacgaagtaatgatgcacgtctctcgtttataacatgtctagataaaaaattttcccaatcctttaaaaaacatca

SEQ ID NO: 61101 - DNA, 1174 bp, Bovine  19866881119421
  misc_feature (1)..(1): n is a, c, g, or t
ntattcatgggaaggactgatgctaaagctgaaactccaatactttggccacctgacacgaagagccgactcattggaaaagaccctgatgctgggaaagatttagggcagaaggagaagggggtaacagaggatgagatggctgcatggtatctctgactcaatggacatgagtttgagcaaactctgggagacagtgaaggacagggaagcctggtgtgttacagtccatggggtcacaaagaatcagacacgactgagggactgaacaatgacatgttctatgcagcatcttcaagaagagctcattgtctagagagattaagtctaggcctatctaccagcagatggtgctgacgatcactcacagagtgtcacttttggccttttctaaactaggagatgtcagaatggtctccaggaacctcagctgcttgaaaacagagaagcctccatgtcttggaaagtcaagggtcaggtagatagagatgaaatctcttacggcctgaaaagaatcagaccaagaagcaaacagcaggaggtcgaacagcttagcgttcagagaccccaggaagacttaacatttcttttaggcagaataagcaaagattattaggcaaacagtagttttcaaagaataaaactgacaacacaaacagaatgggtaagtggcaatttctcccacattctggtggcatcttaaattctggatgacttgccttaccaacgcacactcacacagccaaaaaaagtattgggttggccaaaaagtttgagtttttccgtaaaatgttatggaaatgaacttttttggccaatccaacagagtaggaccgagggaaaggatgtagctaacatttgcacattgtttttcagatacattgtttgcttataacgactcagttaccccaaaattgttcaaatgaatgaacgtatttgttaacatctggatgcttgtcataggttacctggttttctgcaaaaaacagcaaacctctgtccacagtggtctgaatcgtctgtccaaaggtggggaagggggcgtttggttgagttggaactcgagcatagcctgtaccttcaaaataatttttatctgattcttcttttctcctgtcaacaccaatcaccattaagtgagaacacagcagcaaaagactgccaagaaacaatg

SEQ ID NO: 61102 - DNA, 3884 bp, Bovine  19866881158230
  misc_feature (1)..(1): n is a, c, g, or t
nagcttgagaggcatggaaaccccccccagaatacctgattacatagtataaactcaatttcttttcaaagtacattctttttccctgatatcatccttttaactcagggcctggaggctttaatcagacaataatctgaattgtggtccatcttatcatttaccctcaaaattattgtgtcttttctctctggttaactaaagaataacaacccattgagaatcaaactgcaatcagcaacaatgtagttaggatcaaattgcattaatagctttctttttctttattagttcttcagtgtccacaaaattgcccccaccagcacatgctggcttgaagcactcatatttggatcagcatgctgggcatgtttgcagttcgtgaccagcctgtgctcagttctttaacatcacctttcagtcctggctggaagagtgggccttctggccatgtctaaaccagatagccttgatttcccaacctgattggacgaatcatttataatcatcaattatacacacttgcctaatgttgagagaatcagattctttctctcaaacactaactgtgaaactctgaaatagctcaagaagtggtgatcactggaatggaaggtcttagaggttcagggccctagacagccatgacactgctctcaggagcatctgtgtgggtgagaggggagcagtggaattttataggaagaggcattatcttctcagaatgagggaggcagtaaagtcaagaatcaattaagtgagcaagtacagtataaattaaaaacatgcccttcttaggaggcaagcatgtggataaagctgttgtttctaacaatagagggtaaaaaatgacatttgactattttgaggtttaggtaccacattaaaataaactttaaacaatgtcttgtatgtagacagtagattcacaaagttaaggagtatttagcacagagatcatctggtacttcactcatggctcagctgataaggagtctgcccgccatgcaggagacctgggttcgatccccggattgggaagatccctggagaaggaaatgataacccactccaatattcttgcctggaaaatcccatggatagaggagcctggcaggctacagttcatggggtagcaaagagtcagacatgactgagtgactttacttctctcttctcatttggtgctacaaaggcctaccacttacagttagactctgtagcatggcctcataagcttctgtcactgggaccaaatctcccggcctcaccactcatgcccgctttgtgggcaatctgtactctgctcacactgggacctgccatttcttgaatatgctgtgtattttgtcctaggtcttagaagttaaatctcagcagaaatggtaacatgtgggtaatgagaaaatgtactctgagttggtctaagtcaaaagctaaaaactcaaccctatagtgggcttcactgaaagacagaagtgattagctgaataagcagatccgagtttcaaggaacgattctaggctaaaaccacaagtgtgcccctgtgaaccttaagacacttctactcagagaacggcacagacatctcattttctacatattatctgcctaacacagacacgacatgtcttgaaaaatccataagaacaatcataagtgctgctaactaaatgcttgctttgatgggacaaaattgaaatatctatcattctcttctctgtgggttctcccaggtcatttttgtcagttgtctgatcctctacaccagcttgaccttcatttcttcttgggatgctgatgttaattactactctgagcttactagatggttctaaatagcctctttccaatagctcctcccactcctgtcctgctgtgaaattgcccagctctgtagctcttcagtttcctcttttatttaagtagatctccacagacatttgaaaaggacacacagtccttttagagctgtatatccagtttctaatttactacttaagagctgtactctctgggtgaatgtgacaagctgagttctcagcccttaacaaatcatttcagtattgaaacagcgctccctaccctagggattaataagtgtgcttcctgtttctaagtaatcatttatttgtaaatatcaatgtttgtagtgttttggccagtgaattttttttttgttccagaaatatatttaaaatatctgtgtagtgtaatattgagatgcatttgaaaatgaacacatttctttttgacgagagatgaggctcaaagaaaatgatttactccagaattcactgaaaccatagttaattatgtacctccttgtgacaattctattgtttatttctttgttatttcatctgttcattcattcattcagtatctacctgttgccatctgagcattagacgtatctctggacccatggttgtaatagcaacaacaacaatagcaatgatagcaacatagtaagaagagtgttcactgagttcttaatatgtgccacacactacactaattattttagaagcactatagcaatttaaccaaaaaaccccatatcacagacaggggaagcaccattgcctgatttgagatgaagtaatggcaccccactccagtacttttgcctggagaatcccatggacagaggagcctgggaggctgcagtccatggggtcgctaggagtaggacacgactgagcgacttcactttcacttttcactttcatgcattggagaaggaaatggcaacccactccagtgtttttgcctggagaatcccagggacggggaagcctggtgggctgccctctatggggttgcacagagttggacacgactgaagtgacttagcagcagcagcagcaaagtactcttgcctggaaaatcccatggacagaagagcctggtaggctgcagtccacagggtcgcgaagagtcggacacgactgagcgacttcactttcacttttcactttcatgcattggagaaggaaatggcaacccactccagtgttcttgcctggggaatcccagggatgggggagcctggtgggctgctgtctatggggttgcaaagagtcggacacgactgaagcgacttagcagcagcagcaatgagactcaaggtcacatggttaggacatgggagagctggtgcctgctccagagctcttagcttccaccagcatacccatccggagagggccagctcttggcctgaaaccagcccgagtccagctgttggcctgaaaataagcccgagtccctttcacacggacctgactgggtctcagccatcaggctcagcagcaggttacttcctctggcacctgtgaaggtccagggtgagggtgtacatctgggtcttagtttcttctgtcttgctccctgctgtgtattttggggtcattagaccctctattccaatgctgatgctgtactcaaaaatatttgctgatttgactgcttttgtgaaaatttgcagatgaggttcattcattttctgagctccaccttttttcttatcctgcatatttaccatctgaaggtgggaactatcaggatcctgaaagagcactgggctactcactgtcgggataatttccagtgtctattaaaattctcaccttccttagttcattgagtctggagacaatgatgaagtcagtgtatcagggtgaaggatcatcaactaatattgaatctgtggctaattttccatattttgagccagatttcatcattcttttctctcctcctcaaagttaatgaagcatttctcctctttcatttcttccttaaaaaccttttatacttagaaaaaaagataatgagtcatgagtaaatgcttatacccaaaagatgcttaaaacta

SEQ ID NO: 61103 - DNA, 1374 bp, Bovine  19866881241679
  misc_feature (1)..(1): n is a, c, g, or t
ncaaaggtaaaaatgccccaaaatccccagtctctctttttccagtgacccttgtcctctgtgtgtactctggagcctgaattcaagaggttttgtgaaacgattgtcctggttgataatatttctggagggggaaagtcataactgaatcaggaggaagtcataactaaatcagtgagcagttgatttttaagtaaaattacacaaaaaattccgatgaaattgctcatcatgctttatagaaactcttcttgtttgagtgggaaaataactgttgatttcacaactgtgttcttaagaagtttagcagtaacttccactgagcccagcatcagactactgtcttaggaataacatgagggaaattttccaaagacagcatttaataacattcagttgacattttaaaaacagataagaatttgatgtttggggaattgaaaaaaaaaaaaagtgaatgtgaagccgttattaggcgcgtaaggagttttactgtgggaagcagacagtgcggtgtgattaataccgtagtagcaccgacagcttagctaatagtctctctctctggtcttgcaggaggatttctctggctacgactttgaaaacaggttgcatgtccgcattcatgctgctctggcctcagtgagggaactggtccctcagtgacagaccccaagttcctgctgtgtccttccccaacacaggttctgcactttaaaagcagagcacaccgctcttatgaagatcagcttttcttcgaaaaccacctggacccaggacacgtttcctcagttaggctgatgtattcaagatctcctcttttaaacacatagcttaaaaaagaaaagtgatgatgatggtagtgataataactaaccacctggggagagggttaagtgaccttgttcaaacattttagttttgtgatttattatttttaaaataaaagtaaactaaatattcaacctgcgatcttgtaggaatgcatacctgaagcacacatctgactgggtaacacaaagtacctgtaaaattattaacagtatcacaacatagtatttatattgtgttttgaaaaaatagcagtgctttccagttttactttatcctcaaactattcctgtgaataatagcacagatattctaatctccattgtccagaaaatgagactcaggcacaagaaagcgaattgacttattccaattaattattcctcttattatagagtcttgaatagaatgcaggtctcctgaccacagaccaaataattcttttattgtaaaaacaaatatgttaataacccagaattccaagttttccttattaaaaaaaaaatacttctcagctgaaagttgggtcatcaaaatatttat

SEQ ID NO: 61104 - DNA, 690 bp, Bovine  19866881293048
  misc_feature (1)..(1): n is a, c, g, or t
ngagtgtgtatgggaggagcacaggctgattattttcaagattggaaacactgtcagcaaagtccgcctctctcacgggttctgtccctcctcttcagattagcgctgctctggtatcataccgtggtccgcccattttttgccttggatggaagtgataacaaagccggcctggatgaagcgaaggaaattctcctcaaaaaagaagctgcttatccaaactcttcccctctttatgtttttcaagggacgcatacaacgactagaggtactgtgccttctcccagcttttttttaaaataaagcctcttgcttgaatctataattctcatttggaagggggctagctcataaggagcccgaatgtcacagggctgacattctgtgccttgcattcgtcattgccgtgggagcctcttcaaggaacctagagtgtttattcagttaccttctgttcacagctatgggtgaagcagggtcggggtccctcagaggtgagacaagatgctgtgccctgagttgaagacacgggagcccttgcgaatgtcttagttaaaacaaaatacgaggttggctaaaacatttgttcgggttttcccagaagatgttatgtgaaaaacccgaacaagctttttgaccaacccaatagatttttttccttctctggagttaccgatatctatttccaaa

SEQ ID NO: 61105 - DNA, 1949 bp, Bovine  19866881294321
  misc_feature (1)..(1): n is a, c, g, or t
naaaagtccttgttgccttacgaaagaaacatctatgaccactgaacattgcactgacatagatgtgaggggaaataactccatttatcactagctggtaagagaattctgattttaaaaactatttacttatttgggtgtgctggatcttagctgcggctcatggacttagttgggcttccccggtggtgctagaggtaaagaaccccgctgccaatggaggagacataagagactcgggtttgatccttgggtcaggaagatcccttggaggagtgcgtgcctggagaatccactccagtattcttgcctggagaatcccatggacagaggagcctggtgggctccctagggtcgcaaagagtcagacacaacttagcacgcacacatgtgagcttagtcgctctgtggcacatgggatcttagttcctcaaccaggtattgaacctacatcccctgaattggaaggtggattcttaatcactggaccacaagggaagtttcaaagagttcttatttgggaagcttctcttggacaattggatagatatagagttacacctttaaagggacagttagaaatttgtcagcagtattaatattgctggaaggagaattagataaaaataggattttactgatacatcctaggaactgcgtgttacttcaactacacagaagctgaaagctgaccttgatgacagcatgctttgcaaccaaagatcaaacgctttccccaagcacactgtgaacatcttgcagctttttactctctccagcttctgttcaaacaagcctgggcaagtgtcaagtgatagatccctttacaaataaagccacaggaccgggcaggtttaaggagtatcaaacacacagatagcaaaccagggtggatatttcaaatatgcatctccagaaaagccacattgggcaggtggcttctgataattttaagactcggccaatttctctgctagctcagctgatatcagccagccttgcagtccacacttgctcctgaacctgggcactactggtacttgatcaccatcactctgatttttcatatcaaatcttgcttcacttggttacctgtttatattttgtctggactcacagtgaacaagtgatgatgagcaagagtaggacaaagtgccaaagccaaactgaacatgaattatcacgaaaggaaaatgacggctttctactgacagagtctactgaccttactggagcctggatgataatgcagaccacatccctctgaggctcagaactgtcctgtggcttccatcacactgaggataaaagtccttaacatccaaagtgccttactctagcctgaaaggtacaggatctgtaccctggctgtcccaccaacctcatctcccagccagctctctctcaatgcaatcaagccatccatgccttcttactgtccacaaactcatcatcacaggagttttctcatctgttttttccccccttgccatggaccctcatcatattgtcttggtactccacctcatcactcatgattccctgcccaacaactccagaaagccctgctaccaccctctgtaaagaatccactatctatcatataacccttttattagtggtgtggcccatctctgaagttatacttcagactgatttgtgcacattttactgaggaataaccccactctctcctcccattcttcaggtgaagcttaatgtccttgccagccttctttactgcagttaccccagcatctggaggagggatgatgctcaataaattgcttagacattaaatgaacagcaaaagaaaagaggaaaaggcaaaaccctgaagaacacaacttggagagtctgtttttgtttggttttgtttccattttttgtctattccttttttaaaatagaaaattgttttattgagatagacttcacatatacaaatc

SEQ ID NO: 61106 - DNA, 487 bp, Bovine  19866881301301
  misc_feature (1)..(1): n is a, c, g, or t
ncgcctgccctttactctccctgccttctgggaaccaccccccccccctccaacaccctctgcattccatgcttaaagggggttgagtcagaaggctttcaggaactcttccaattcaaatgctgtgaagtactgcattattgctgccagattcattttagaaacttaccgtttaaaaatgattataaatgtgttttttttttttttgcctgagaaaatcttttaagtgtccttgaaactgcagaataaaatacaaactttttatcttggcatttaaggatgttcttaacctgattttttagctttatttacagttcttctccccatgatccctgtgaacacttttgaccaaacactgtgtctcttggtcctctgttaaagtaatgcttttgttttcatgtgtgtgttagtcattcagttgtgtctgactctctgtgacccccatggactcagcccatcaggctccttgtccagggctccaggcaag

SEQ ID NO: 61107 - DNA, 1135 bp, Bovine  19866881353874
  misc_feature (1)..(1): n is a, c, g, or t
ntgattctgcggagtttaattatgttgcatgttaaagatggcttaataagcaaactaataagccaatgtggatattcagaatgaaaatgactctgagtctcttcctgtaagtcatcccaactgtggtttttataaatatactcacagtgttacaaatactctcaaggactttaaaaaaagactctcaaatctgacattacttttaattcctttacaatttctaaaaagtacatcagcagatggtaaagaatctgtctgcaatgcaggagactcaggtttgatccctggatctagaagatcccctggagaagggaatggcaacccactccagtattcttgtctgggaaatcccatggacagaggagcctggtaggctacagtccactgggttgcaaagagtcagacatgcctgactaacactttcacatcccttttaggatggggtgaagagataaaaccaaacaaattggtatcaagtccagtgaggttgggaaaagctgctttacatacatggaaggacacaagactccatttagaatgctactgctttgttggaaggagaacaatgtatccactctccctgtgtctagtccatccatatatatcacatgactatttcccttcaaaaaaaaaatcaagaagtacaattccttcttgtcctctttttcaacctatagtagtatgtgcatatttatataagcacataagcataaatacacttatttatatgtgtatgtatatacatgtcttcctagaaacactctgagaagtctgaaagcctgaagtgtcttcccccaacacaatgccactttctaaaacaatgactcagaaacagctcaccaaactcaggtttggttttggacctttctgccttcttccaatcctcattggtctgcagaaggaacacagatgacactccaaacatgctatgtattaataacatttcctaacctcgaattaaacttaacatgatctctgtgcgtgtaggttgcgggcggggaggtaggggaggtggcagagaagaccttccaagacgtcagtctttcccagggcttggtgacacgcacctgcatcctttccacaggatcagcgagcgaactggccttgtggatgaggtatgtatgctccatatatt

SEQ ID NO: 61108 - DNA, 1095 bp, Bovine  19866881447951
  misc_feature (1)..(1): n is a, c, g, or t
ntgcttctaggctttagcccttgaccttggccagatgacttctgcataattctttgcagaggaggcaaagtctccttcacttctggtcataagccaactgttgagcaaacactgtaatcataataatagttgtcattctagcccctggctcataggaagtactcgtgtgtagcactaatccttcatgcttagtagttatatggatttaaaaattcattaaccaaaggaatataagaatatgattttccagtaagttttatatgaggcgacatctgtgaaatgctgcacatggcaagaatgtgtatttctctaaatacacagaatagaatggaggaaccacttagcaaggcctcccctgcaaaaggtcctggaaccttctgatgatccagccagtgactcagaatctgacttaacgcagggcgtcatctccaccaagatgctgatcagggcaaaactaaaatggttggaagatgcctccaggaaagagctgcctggacattgggtagtaggagcaaagtgttttaactcagacaaacacaactgaactaaaaacagagcttaaagagagtggctgtaactcacaccaaatattcagtagctgcagttttcatttttttattgctgagttcaattcacaaaaacaacaataaatttatttaacatctgttctgtgtcagcagtatggtagtcatctttaagactgttatgtattagaataaattacaggaggcaatgaaatcttattgccaagacttctttattatttggatatagaacatacccaatcagaattagtgtagaactttcaagagacaaagaaatggaaacaattgccagctgggatgcttccttgtctgacttttttttttttttttgaaagtttaatttgttattgaagcatatttgacttgcaatattagtttcaggtatgcaacgtacttattcaatatttgtatagtttactccattaacattttttaaattggagtataattgcttttttttatatgcaagcttttgtggttatcatgccttattaccagaaacattaatagccacaatgtcatttcctccatgtctggcccaataacttaa

SEQ ID NO: 61109 - DNA, 845 bp, Bovine  19866881476630
  misc_feature (1)..(1): n is a, c, g, or t
ntgaaccttgtccctcttgttaccctgcaatccctgcgccctgtgtgatgaacgttctcatagcatgtttggatcaatgaacgattattatatgtattttgcaagtagagacaagagagaaagcaggtggtgtgcttagagtccatggacagtgactgaatggaaggactgagtctctgaccacatcttctgaccctgcagtgtgtgctttgattccacgtatcatagatgttcacatagctgcctgataagcagcaaaaggtccttttcttggggtccattttccaccagaataccatgaactcttcccttttccctcatcactgaaacagagtggctttgcaccaccagcagcccagctctttactcatttttcattctataaaacgttattaaactgcaccacacagataagtactagaaaaattgccaggttattttcctaacataaaattagccaatttgcctgtgtacggattgcaaagaatgcaaggcatcccattcaagtgattaacctcttagttaataaaagcaacagtttcatgtgtataaataatataataaaaggaacattcatattaaagttatgtagccctccccttcctcagctcatctccttaattggtaaataattcatcaaaccctgaaatgaattgtcctcccacccacatttcttcatccaattattatgaaataggaaagcagcctcctttctccctttggaaagcaggcgataatgaaatcgttcagggcttccctgagcctgtgctcggctagatagaactggcacgggccttgccagtcactgagtgatgcttctccgggatcccaagaactgagcttgt

SEQ ID NO: 61110 - DNA, 1320 bp, Bovine  19866881827794
  misc_feature (1)..(1): n is a, c, g, or t
ntttgtatgtttcttggtatgtggaagatgtttaacgctttcatgttcactaggctggtgcggaagtaaatgtactgaatgacatgggagacacgccgcttcatcgggctgcctttacaggacgaaaggtgaaaaacattctgtgttcagtgtttgcaagtgaaatgttggaaatgcactcacaaatgttttctcctttatagccctaggaatagcaactgggaaaagccgcaaaaaacgtatataccagcactttgggtccaaaagaccacaggctcttagtgacagacagtgaggtcaattacgaaggtcatggggctccactctggtgtccctgatagaagctcattcagtctctgcttgtgtccccaggactggggaacgcctgcaccttctttatcattttttaaaacagttttattggggaataatttacactgcctgaaactcacctgctgtaagtatacagttcagtggtttttttgatgcgtttacacagtcgtgcagccatgaccacagtccagttttggagcatttccatttgccacagagtttcctcgtgcctgtttgtatttatttcttgtttcttgtcaagcctcagactaccactgacatgctttctgtctctagatgtttgctttttctagacatttattgtaaacggaatcatatcaacatttgtgtctaacttcttgagtataatatagttaagtttcatccatggcatagcgtgtaatttgttccttttttgggctgaataacgttctgttgtatgcatataccacgttttttagtctgtcttctgttattggagagacttttccctccgtattgcctcgacaccttttgtggaaatcagttgatcataaatgggtttgtttctggacttctgttctctttgtttgatctatattctatccttacaccaataacacactgtcttattacagtagctttgtaattaagttttgatattgagtagtgtaagtttggagaaggcaatggcatcccactccagtactcttgactagaaaatcccatggatgcaggggcctgatgggccgaagtccatggggtcactaggagtcatacacgactgagtgacttcactttatttttgcactttcatgcattggagaaggaaatggcaacccactccagtgttcttgcctggagaatccctggaacgggggagcctggtgggctgccatttacggagtcgcacagagtcagacatgactgaagcgacttagcagcagcagcagtgtaaattctccaaccttttgatcttttaaattattttttctattctcagtcaag

SEQ ID NO: 61111 - DNA, 1209 bp, Bovine  19866881850866
  misc_feature (1)..(1): n is a, c, g, or t
ngtctccccttagggtagatctaccatttctatttgcacagtatccatgtattctgttttgtatatatcagacatgtatatatacttgaaaataactgctgtgacctccctaagatgactcttctccaagctaaatatctccaccttctaaaaacattccttcgtacctaagtttgaacttccttttggctccactaactaccacccaggtctatatcgtgaagtttatttactggctaactgctgcaaattgttaagtcattggcacttgttatgaatcaatttaatcaaattaatttttttttcataatgcttctgagggagaaccaggaggtaatggagaaaatgcaactagagcagactgacatttttaaaagcctgcagagaaggaagagttattgaaaacacatcttgcagatgacactgacttaccttgttgttgtgctcagctgagtttgactctttgagaccccatggactgtagccctccaggctcctccatccgtgggattctccaggcaagaatactggagtgggttgccatttccttctccagcggatcttctctactcagggatcgaacccgcatctcttgcttcacaggcagattctttacagtctgagagttacctaaatgcttaatattcatcagctttaattaaaggcttggctgctttgattattagattcttgaaatttcctattcaaatatcaggtcttcattgttaagagagaagaatgttttctctcttctacccagagcaaattgctctaaagtatatgaataaattctctgcttcccagaaccaatggcaaattcacaaagctccataaaactcatgcatgacttgctgctgcagctgcataattaaaagaaaactagtatatcgactagttctcctcagagtagcatccataagtcaccactgcttgagaaaagcttgttactaaaaggattatggccaatatcatttttatgatgaaagagagagaatggctggtttgccttgtccagtctgctcacagatagccaaaatgctccactggctgattttttcatatgtcttgaaccatcaagacaaccacagggaaatagtttttcaatgtacagatttaccaccagagctattgcttcatcctcggtacataagctctctgcctcccaaactcgatccatagaaggcttatttttagcaggactaaaggact

SEQ ID NO: 61112 - DNA, 765 bp, Bovine  19866881929987
  misc_feature (1)..(1): n is a, c, g, or t
nctttttttttttcttccctaaactgagtttattgctcgttttaccacactcagttgtttgcctctcctcagctgggatctgacatttcattgcttttcttttggttcttgttctctagctggactcgaccacactggtaacccttaccctcgtctccccgaggttttatctgaagtcaggactccgttttcagtccctgtctgcagcgctgactgctttccagacacaggaaagactggttcttagtttcctcttcatatccagccctctaacacaggacaggttttcaaaaagaggtgcttctcatgaaatgctgtggccaagagaaccgcatcttcgtttgatggtggcaaaatggttagacactcggcaccttagagccacagactagtcggaatataacccccatcaggcctcctgcccccctttaagaagagggcactgagttagaaggtggcaagaatctgggccctgtgagtcctaatccatctcactccaaaccctccttagtgtcgagtctcgtgcctcccacacatcagccgtgctgggtgagagggaccccctggccaggatgttggagcagctactagggagaaaatttactgtaaagttacctcaataacatttaaaaatgcctctttccatttttttctttttttttttttaggaagaagtaagtctaatttgggctggacacctcttcacctggcatgctattttggacatagacaggtggtccaggatctattaaaggtatttttatg

SEQ ID NO: 61113 - DNA, 1506 bp, Bovine  19866880472449
  misc_feature (1)..(1): n is a, c, g, or t
ntcaaaagtgtcctttacccacccaaagcacacagcagactaccaccaatctggtgggcttcaaaggtaaagtctgctcttagtagccaattccccactaacaggaaggtgctgccacactttacataagctgttggtgctatattgtatttctttgtatatgtaagtaaagcagttactgcagattcctgggtaagtcagaggaaatgtctatcttaaggtgatatgacacaactcagaaaagtactagaaattagatccagctgatgactgagttgatcctaagcaggatttgtctttgaaataaaacccagcagagaagcagaagttcagataactctggtaatttggggcagggggactagctgaattctcatttcacatgtcaaagccaagttcaaggaggatttatgagttaaatatattttgtaaagcaaaccaaaaaatagaattgttgttcagtcactaaggcatgtccaactctttgtgatcccagggactgcagcatgccaggcttccctgtgcttcattatctcccagaatttgctcagattcatgttcattgagtctgtgatgctacctaaccattcatcctctgccacctcttctccttttgccttcaatctttcccagcatcagtgtgttttcccatgaaaatagaatactatttgttaaacctctggctagaagtatttctcaacttagaagcaataaaaggaaataatcaatggagatgactgggtaatagtttaaaacttctatgtgtcaaacattgtcttaaacaagaacatagaggacttctctggtggtccagtggctaagaatttgccttgcaatgcaagggaggctggttcgatccctgatcaggcaactaagatcctgcatgcgacagggcaacccaagtgcaataattactgagcctagatcccacatgatactacaaagatgttgcatgccacgactaagacccaacacagtcaaatagatcaatattacatagaaacctaaactgaaaaatggtgacagcaaatataaagaaaaaagtatgaatatcttagcagggctcatacagtaaaataaaatacaaaatctcagtgattgaataaaagcagaaaacagatcacatacaaagacatcaaatagtaataaatatggtgaaaattaactttacagtaattaaagaaatagatgttaactcagtggtaaagatatagagataacaagcaatggtttgctcatacattgctggtgtcattctaaactgattccatccatttggaaagcattttggttatatgtcgtaggtcaggatgctcctacattttgattcagcagtcccatttctgggaatctagacaacaaaatactccaaaatatgagaaaatttctgtgccacaagttgtacatcacagcagtgttgaaaacttggtgacaacttaaagatgctggaataggggctatacccagctccctgtgctcgggaccatggcgttgcttcgtgtttct

SEQ ID NO: 61114 - DNA, 1175 bp, Bovine  19866880544479
  misc_feature (1)..(1): n is a, c, g, or t
nccagaaagaatctatattatttatttattggttctacccaaccatcagcctttgcttaggtccactgttccctgtcgctgattttgagtcttgattggtttcttctttatcttccatgttccgcttcatcttctcagaaactgaaggcagttttgtatctcctattgatattattttcatattcaatattgatattatattcagtcatggcagggaggtggggaaccctggcattttttgatcctgggctagtcacctctagagaagttttgcaaggtttgacaaccatgtgtgcgctagtgccgcactttagctcctgttctgtctgtgactcctggtggtcagaggcgtggagacttatctggctcgggactcctcaactccagggaaacagggaacatgctctccttttgtgcatgatgcccgtgaaacatttagcagcaggctgtttctcttcatgggtgttttggctgagagtggattgaaactttgaattgtatgtgcctttttaaatgaagagacttatttctgaagggttgactcttgctaagttgcttcagtcgtgtccgactctctgcgaccctatggattgtagcccaccaggcacctctgtccatgggattctccaggcaagaatactggagtgggttgtcgtgccctcctctgggggatcttcctgactcagggattgaacccacaggaaattgtggttgatcaggttatcccaggagtttggcaggttattagaattctgcgcttctctaagaagagagagtaattgcttggctagcggattccccattacataagagccccttaatcacggggtaaaggaggtggggagggtactttgggcctcaggagaagggctgcattcctgatccagctgagaaaggatgttctaaattcctgcagtcccctctgggtgctgctagccatgtgagagcacaggaggtcagcagcagcaccctcctgtcagcaggatggcgtgggtacacgtgtgggcacggctaacagctgtctgggtctccatattcctgacacttgacagactgcagctgtcactggccttcagaatgtcaagtcttttttctgaggtgctaaaaacaatgcaagtttgcacaggtcataaaaacgcccttgggtcaagtatctggatctgtgtttgacaagg

SEQ ID NO: 61115 - DNA, 1214 bp, Bovine  19866880671782
  misc_feature (1)..(1): n is a, c, g, or t
nagtcttgtcccaggtccgtcctggcactagctttggaagggtgatgcagcgttttttggtgaattagttagtgcccccacaattgaactttagccaagttgttgcttgataattggcatattttttccctgacatgctgatagtccaattattgctttaaggttgggttaaaatgtttgactctttcaaaccttaaggtttatgatgatgtcagcagagcactagactttatgaatagttctttgttttaacaacaacaaccacccccctccacaaacacacacacagaaccgaaagggagggaacatgaagacccagtaagcagtaacatgctgttattgattgttcaatgatcgtgagctatcttctctcatggaaaaatttatttaaaatatttaatatatatactatttaaaatgtggagtaaatggaacgtgaattcagttttggatctgctgcctttgcagtgcccggagcagttggatattgtaagagtgaatctgagtgggagagatgggtgaggagtcctagctggtatctctgggcaaagctgcctcatatctttgagccttggtttccacaaagggcatgaaaactcccttttaagggtcatattagagatgaaacagtcttataaagagtactaagaacatagaatatattcaggaaatattttcttttccgtttcccttcttattggattttgaggatcattgtaaaacttttgacacatttagggaacacagctttctgtaagcctcctgggctcatcctggttcattcacaaatcttgaaagttggaatctcggatgacatttggaagctcagatgacaaatggtgttgcgagatgaatccaaccactgcctcgatgatgctagggcagtaacttcccattccttacatgccttcttcctatgaatagtctcaggtcatgttagctgtattataagtcgattcattgctgattcattcatctcagcttttcggttccaggatggcatggtgtcaaagctgcagtgactgtcattttgatgaggacatgttagaatgattttcagtgtgagaatctgcttgagcattacaaaacattcatttttgtggaaagaaatcttcacaaagcccggaaatggactgaaatgactcttttgatttagtatgaaggcgagaacatttttgaagtttgggtgattggtgatggggaagagtgattat

SEQ ID NO: 61116 - DNA, 884 bp, Bovine  19866880677923
  misc_feature (1)..(1): n is a, c, g, or t
nccataaatagtctggcaatacaagaggggttggtcatagactccagcatattatctaagtgagcagacctcactcccttgaaaactcaacaacgcagcttaaaccacttcaacttatgttttccatgcccagcattcaagatactgatttcttcagacatttccctttaatttgcaggtcatcaaatctaggtttactttgacaacataatagctaagagattttgagattctaaagtaagagttcttcaaataactgactctccaaataaccagccatcaatgcaggaagcagagatggcaagaaggaacatacattttgggtaattcagcaaacctcaagtatctgtgtgtccatcaggtaggaaatcaactctccttgctttttgccatctgtgataactcattagaaaccagcatcttcgtcctgccaggttttcctgtcttttgtggtttaatctgaagtatatgagacatggtctattttcctaagttcaaatgcaggagctacaggaactgaagagttacctaacatgaaagaatcaggacaagaggaaaatgcaccagaaaagaattctgtcctgttgttatttatactcctcaaacaataaaagtgtaaagtgtgccaaggatctacaggaaaatcctgttaaaacacacactttaaaaaggcttcaaaagctttctgaaaatagcacataatccgaacactgttcaaaaagaattaaaacagaccaatcatataaagtacagataatcctcaatttcatacagattataatctaacagtcactttttaaattggttttttaaacttggaaagtaatgtgtctatagaagcaaggtaataagaagtagcaatatttacagaaacaaaacaccag

SEQ ID NO: 61117 - DNA, 2948 bp, Bovine  19866880683475
  misc_feature (1)..(1): n is a, c, g, or t
nggggatcttcctaacccggaataaatctgggcctcctgcaatgcaggcttcactgtcagcccctgggaagtccctcaatcaaatacatttttttaaaaagttgaagattactatttccttttgttcttcccccataaacaccaggaatgacaattctgtcattttttttaaatgttctttttaaagatctttatctatcagcctttggtaatgtattttaagtgcaatgtatttaatttggtttggattctgttgctttcccttttgtattataacctaagaccctcattttcaaatttcatcattgctattagctagcctcatggcttttacatttcagcattttcctcatggcttgaaccttgctccttcttcatttgcctatgggattcaactccatggaatggctgataactcatcagccaaccacagtgatcagtccctcactccaggggcctggagaagggactgaggtcagacatgactgatctgatgatcccaatggagccagtgacaacaaacattttagatgtcacaaaagataattggtgagaattaatattggtgtttatacatagacataatctaagagttttaagtaaaaaaaataaaaaatttacaaagccacacaatatttggccactctatcccaccatttaatacaatgaaatttaaatttttacatctggcttgttcagcagtcttggcaagtaactgcaagttagagaatccaaatgtcataaatgttgcttttataatgtatcccatttgtgaccacagatttacctttctcttcttgcaatacatatcttattattaaattgtatgcattttataaacacacatgagattggtggtgggaagtcagccaagagaaaatgagttcatgggaaaatctatttactttcaaaattttgctggagctaatttgcaaagagaataacccacatgtagattattgagggttagctgtgtaatccctgaatagtacaacactggataatgattcctgttgagagattttctttcagtttctgtatttcaaggattttacatatattatctcacattcttacaataaatgtatgagggtggttatgatcatacacattttctagatggggaaactgaggcccacagaagctaacctgcccaaggtcatagaaatgttatgggtggagccaagacttgacatacctgggtttatctactgcacaacattgtctcctttgtccatccattcatctgttccgtcatgattgtagtgtacgaagacctgccttgattgtgggatagtatctgtaggtaacaattaacaaaaccattcaaaggaagaataaataagaggttaacatcttgattgtcaacagtttaaatggcaaagcataaaaggaaaggattacttagcagagcccaatgtctatataagaagcaatcattttctagaatcaaagatctctagtcaatagatgacagtctgccagaacatcccagctgggtctctaagttgcagctgtgacatctctctctccatgtgtgctgagctgctttagatgttagtctaaaacagtgacttttctttgatatgtaaagttcaaaggaactttgttatactggagtttacttacaagttgaataatagcatacaggtaaaaagagttctgggttgactggtaagctgtggctccacccaaatagcaaatatttgggcttaatcaggaaaccacaaaatgacacagtagcaatgaagggaaatggaccgcccaggagtctggaaatggactttgatgccctttggttttattgtatagtcagccaagacaaataataaccaaagaagtaatattttatctccagggcttatgtgcaggctagataggaactccactcataaaaaatacagccctcagaattcttctgaagaggagagatcccaccaattactttttattattgttattatcattacaggcatacctcattttattgcaattcactttactgtgcttcacagatagagaatggaatggcaacccactccagtattcttgcctggagaatcccctggttggaggagcctggtgagctacagtccatggggtcacaaagagtcgcacacgactgaagcgactgagcacgcacgcacatgcttcgcagatattgtgttttttatggattgaaagtttgtggcaaccctgggtgaaataagtctactggtataatttttccaacagcatttgctcactgtgtgactgtcacattttggtaattcttacaatatttcaaactttttatcatcattattattatttgttatgatgatctgtgactggtgatctttgatgttcttactgtgatttactgaagactcagatgataacatttttagcaacaaaatgtttttaaaataaggtatgtgcaaaccttttttttaggcctagtgccattaggtacttaaaaactacagtatagcataaacataattttatgtgtgctgggaaaccaaaaaatttgtgtgatttgcttaattagtatttgctttgctgtggtggtctgtaactgaaccctcaatatctctcaggtactccagcattactgttatcatcatcattattaattttaaaagagaaaagctgttcacatctatcttactcttacaccactgctgtagaaaacctttcccttcagtagattaagaatgcagatattccatgagatgtttcttgcagaagagtgggaaggctgctgatcccacacccaattccacattctaggctagagaaatatggagggaagaataaagaactcccccacctcccccaccaaagatgtccatattttaatccccggaacttgtgaataagttatcttacatggcaaagggctttgcagatgtgattaaggagagacgcaggagacccaggttcagtccctgggtcaggaagat

SEQ ID NO: 61118 - DNA, 1550 bp, Bovine  19866880808664
  misc_feature (1)..(1): n is a, c, g, or t
ntggtgcaattttgtagtgtgtactgaggcacatttagtgttttctgtggcttaggttgtagcaaaacctctggaattgtagagagctgcaaagaattgcagagtgcttgcatggagagttccaaaagaaagtcacattgtgtctgattttgaaggtcttcatctcttgggaggagttttatgggaagcctgaaaagagacacagtgctgtggaactaaagcatctgtcccaggcagaactgttatgtagatacctctgttacaaggacccttctctgactctgctgtttgtctacacaccttgtccctcctcactgcacctaaagccttccactcatataccccctcatacttttgctatcctgctgtctgcttcaaggttacctcataatttggggaattatttgggaattatggaatctctgagtttgcattaccccggtctctagagtgatgaggtagccatgatatttgatgacagtaatttagactaagatgttagtgactgaagagttgggactggtggcctgattctgtaaagtttcacacctctgctctctacagttgccgtcctaatcgtgactgctggattcagcagactggggcggctcttacacagttatgatgaagacattgattacagagaacatggtttcctaattttccacaccaaaactctagaaaaaaaaattaaaacattgtagacattttgagataaagttctggtaaaataaaaactgagaatttggtagccctagcactaagcgtttggttctcttagtaatgagcagtttgacttttcactactcagttaactgccctggcctcagcttcttaactgttaaaatgaagagttagtgctcactccgacagcacatataataaaattggaacagtacagagaaggttacagagaacggctcctgcacaaggatgacatgcaaattcatgaggcgctccatatatttacagccactatggagaacagtatggaggttacttaacaaactaaaatagaacaaccgtatgacccagcaatcccactcctgggcatataccttgagaaaaccataatttgaaaagatatatttgctccatgtctcttgcagcattatatccaatagtcaggacatggaagcaacctaaatgtccatcaacagaggaatggctaaagaagatgtggtacacatatgcaatggagtattattactcagccataaaaaggaatgaaattgtaccatttgcagagatgtggatcgacacagagactgtcagagagagtgaataattcagaaagacaaaaacagatattgtatattaatgcatatatgtggaatctagaaagatggtatgctgctactgctgctaagtcacttcagtcgtgtccgactctgtgtgaccccagagacggcagcccaccaggctcccctgtccctgggattctccaggcaagaacactggagtgggttgccatttccttctccaatgtatgaaagtgaacagtgaaagtgaagtttctcagtcgtgtccaactcttagtgaccccatgg

SEQ ID NO: 61119 - DNA, 1058 bp, Bovine  19866880817440
  misc_feature (1)..(1): n is a, c, g, or t
ntctattactgtgtaacaaattacccccaagcttactctcttaaaacaaacaatctactttctcgatatgctgtgctgtgctcagttgctcagttgcgcccctttgtgaccccatggactgcagggctccaagctcctctgtccatggaggttctccaggcaagaatactggaggttgccatgctctcctccagggagtcttcccaacccaggggtcgaacccaggtctcccccattacaggtgaattcttgggagcataccgggcaagtgggatcactggggaccgtcagagggtaccctgtgttatttgccttgtgggaacactacccagtattgttagtgcttgattttttaagaaaagttgaaaagtcaaaattttatatgaaatcttcccattttaaaatactagcctttaattaaaaaattaaaaaacaatactattgaataaagcagatctctcaaacacggcctgtgcaatgctgttatgaaaccaccattacagagaccacagtagaaagagcggattggaagggaggggacagaggtttcctttgtccttttatttggaaagccaagtcattgttaaaatggtgggagcttgagaagtacaaatgccaatcatttgatcaagataactgtatttatataaattctccagtcatattggtaaaagtgactagttttcactaaaagcaagcctttgatccctgatctgacagctgcacatctatataaaatgagacactttgacatcctcggctctgcgctcaattggacaggtggtttcctccacgctaatggaacagaaagacaattgagtgctattagataggagaggacgttctcacacacaggaaaacagctttttcctttgaagagagaaaaaaaaagacataataaagaacagaaaatgactgacagaatcggagcttcccaaatgtcagaagagctgtttcagctacactctggcctctgttagggaagattaggatagtttttagacaagtattgaacataccttagcattagctgactcagggagcaatttgcttggtaa

SEQ ID NO: 61120 - DNA, 942 bp, Bovine  19866880905439
  misc_feature (1)..(1): n is a, c, g, or t
nactgatttcctttaggatggactggttggatctccttgcagtgcaaaggactctcaagagtcttctccaacaccacagttcaaaagcatcaattctttggtgctcagcgttctttatagtccaactcagtcaccgtttatgctgttgttacaccaaaggtttgatgtctgcagtagggactagaactagaaaactttatggcgaaagattggcatgttcatagacattcaggtaagcagcctgggaccttgttacattatgagagaagggattttggaccttgcatgcacctttgcatgactagggagcacaggattatttaggggcaaaatggttgtaactacttaactagccagtatatgtggattcttgttcattcacaaaaataacttttctgtatgcttgtggaaattgtaatatcctggataggttttattacaatcatttgtggtgcagtcagcgtatctggaaatagtatgagagagtagagcatagactactgctatgtctgtaagcctgctgctttctgggcagattgtgcttatcagaattgttacattactgtaagtttttcttcacacttctttcatatagagcaattggcgtggtatttcagtgtattattttgccaggaaaatgtcaggttagtactcctctcaatagggcattgtgcatctcagtcacctgtggaatttaaaaaggggctcagccctgagctgttggactcaatctctagtcctgggcccaccactgtccttttcattctgatgtttcttctggcctccattccttctgtaaatacatattgagctgttgactgtctctgagatgggtataaaatggcaaacaaaaccaaagtgattcttaacttcttggtgtttacgtctgcaagggagtagggaataaataaataaatagtgcaggaaagaatttctccattt

SEQ ID NO: 61121 - DNA, 1797 bp, Bovine  19866881155158
  misc_feature (1)..(1): n is a, c, g, or t
ntgttcttgtggaaagacctttaaacatcactgtgtattgtatcttagacacttggtcatgtccgacacttgtgaccccatggactgtagcccactaagctgtccatggaattttccaggcaagaatagcctggaaaaatggagtgagttgacattcccttctccagggaatcttcctgacccatggatcaaccctcggtcttctgcattgcaggtagattctttactgtctgagccaccagagaagcccagtttagtagtatatagattcaaagatagaattccccactgaagagcataaatggagataatcattatgaaagtcattagaagaaacttaactgtggtttttgtctgtctccagttccttaaacccattagcttcttgaggttatcaactttgaattcagagactcgcacataatggaattgctagtctctctgatagttcctgagtctcagttttcctcatttggaaaggaaggaatatttaatacctcctgaggattgttataataattctatggaattttgtgtgaaagtgtttacacagtgcctgggacatctgtgtgcccaaataaacattttatgaccaacatttagcagggatcttctgctgaccgtggatggactttctgtctgacaagagtgagtttcagttttctgtttcttttctccaccaggaagatgtcatcaacactcagtgtggctatgatgccaggcaaaaaccagtaagtggaatcccatcttgtcgcttagcacgaagggtgttggaggagcttttgaatttgcatagtgacgctgtgctctccttttccctgtgaaggaagttgatcagcagattgtaatctacacaaaaggctgtgtgccccagtttgagaagtggttgcaggacaacttaaccattgtggctggtattttcataggcattgccttgctacaggtaagatggctgtcatgggagatggtgccctgggagagccctcaccaggacagatgctttgcttagtccctgcacgtcacagttgttaagacacccttggagggctggggagcagacctcaaacctctatttggtttgtattttgttaaggctctgattttagatgctactatcctggaagactttagggaatctttcttccttttcaagatggaaacattgctggggtcactagttgcctactggctttccagcgtttccatggggttagtgatgtggcattgtgacagctgatcagacaggaatggtcagatggagagccttgcccaagtggccaggctaaggctttttggagtttctcagacactcggtgctcctttctctctctggatcatctttccaaagtgctgggaagggaagggagcacccacttttcctcctgggaagccccaagaactgggcttttctttttgtggagataagatactttcaacagagagggccacaaataaggtacaatgatcgaaagaaattaaagaagacctgaataaatggagagtcatccattgtcacagattggaatatttaatattgttaaggtggcaatactctccaaattgatctacaagattcagtgcagcctaccaaaatgacaactgacctatttgcagaaagggacaagctgatcctacaattcatatggaaattcaagggccccagaataacaaaacacactttaaaaagcacaagattggagaattcatacttcccaattcaaaagttacaacagagctacggtaatcaagatagtgtatactggtgtatggttggacatatagtttagtggaatggaa

SEQ ID NO: 61122 - DNA, 1443 bp, Bovine  19866881201132
  misc_feature (1)..(1): n is a, c, g, or t
ncgttggacaggaacagcgaagaagcagacgttttcttctttcgccttcgtggtcccgcagacttcagtgcagtggactgggtctaaccacagacgcaggacagcagacgctgctcttctccacaaacctgcctccctgtccaaggtgctcttccttggcagttttgttgacttccctctgccgacatgccaagcagggacatttcttctctcgtatctaagtgtgcagcactgtcatgaagagctgacagtaaagcaaacaggagatatcttccagttttccttagaaagaaaagttgcaatgtgcataacacgttttttcatttttttctgacttactcctttttatctactcccttttgaaacaaaaaaataagaattaggtgttcaattatggctgggcacctaaagtggaaatcttttgagagaaataaaattaaaaaaaaaaaacacttttattttatgttggggtatagccagttaacaatgttgtgatagtttcgggtgagcagagaagggactgagccgtaatatacatgtatccattctctcccaaactcccctcccatccaggctaccataaacattgagcagagttccatatgctgtacagtaggtccttgttggttatccattttaaacatagctgggtggacattggcccatccccgactccctaactatcccttcctctcattctccccctgcccccacccccagcaaccataagttcgttccctaagtccgtaagtctctgaaagaaataaaattttgaattaaaatctgaatgatttctctgagatgttcaactggagcatagttatcagcactcataaacacacccagagtggtatacacattctgtggttagcactatggtattatctgtctgtacataaagaatcattaattatgaaatataaggtataatatttaagtaatgtaatcaccaacctcagtaacaaaatagcgttaggaagtggttggccaaacattttggctcttctcattgaaaaggcatagtaatgttctatagctcttccaactactatttactatttggataagtattgcaagacatagggctctttctacttgttgaatttgttttttttctaaattatacttggcacttcatcttgaatttctaaaaatctggagggaacagctggtgctctaataaatattcaggccagctattttaatgctttgtatttaattaagtcatcctaataaaagaggaatacttgacttaagcatttctcaaagtataatgttttgcttccaacaaaaatttcccccaactgttaatatttccctgaagcagccttaaaacttaattctgccaagtgagtagttctaatcacttctgaagcatttaatgccaaaactcagttttcctgttttaaggtacagtcctatcaatatagcccagccccttca

SEQ ID NO: 61123 - DNA, 880 bp, Bovine  19866881234381
  misc_feature (1)..(1): n is a, c, g, or t
ntgctgtgtttttactgtgctgggggttttattcttcaatttgataattgttttgataaatctctatctcttggatactgacttagagcgaattcttttctaccaagtactttttagagtggttgaccataaaccatttgagaaatcactgcttctattaatgacttttgagatttaacttgagttggtaataatggaatgtcctttgagtagaaaactacataaaacagtgtttcactgtgcaaaccagggcagagatgagtttctgataagagaatataacttatcaataatttaggttattgtatcaagtaatgtaacgccgggccgtagtgattgtttctttttaatttttatatgatgtttatgatgtggtaagcactgttcccaagtgttccttgtatattaacttacttaatcttcctagtgaccccatgaggtgtctttgagttctttacatttgtactggtgagaacactggggacagaaagtgtgtgacttgcctgtaggcatggtcgtgtgcccatggacaattactctgggactaaagatattctgatcacgtatagaatacaactggaaaattgggaaatatttggaaagaagttaaaatattcattcttttgacaatttagggcagttgacgtttgttaaattgtttccattacagtatgtatgtatgattttttttcctttttattttctaaagtgtactaagatataattgtggtggttagttttcgaactcatgtagagggcttctaaaacaaacagcttcgcattttgatgagctgagagactttcaaaggattcctgttcccacagcaaaatggtttcaaatgataaactttgcctctgacagcgaggcttgtgacaatgt

SEQ ID NO: 61124 - DNA, 763 bp, Bovine  19866881323504
  misc_feature (1)..(1): n is a, c, g, or t
ntggcagatgccacggtgtgttttgaagtgaaagttggaggagggagggctttgtaacagatggtttcttgatatctggggcctgtccagctttaagctttgagaacgatgggctggaccccgaacatgtgcatgtagtcctgactgccagaacaggaagtgagggcctagggtggtgtgttcggggcagctgctgccactcagctagtcggctggccctgcagcactggcttcccgaggtttggtgaggccgttgtgtgtggtgcagtagcaagccatgaggtgggaaacccagcctggaatccgagacggtcgtaaccacttgggagctgttggcctgttttggaaggagtgtcagctactgtgccccgtggttcttgtgccgcctttggtgcggatgcagatgtgtgagcgtgggagccgaagatacgtgtgtcctgcatccatctgcctggtgtcccggcttctgtggaacagtaagcgctgctttgtgggagggcttggctgtcctctttgacattagtctccagagactaggagcttatcccagactcttctagcatcctttgatacctttttggaatgattagatcattcttggctgggtcctagtgtttggcctgccactcactggctgggtgtccttggacaaattactttatctctctgtgtctaactttatctatataatgaagaagctgggctaggtatgagatgaccttcaatgttcaactctgattaaaccattttgtgtatatattca

SEQ ID NO: 61125 - DNA, 896 bp, Bovine  19866881397205
  misc_feature (1)..(1): n is a, c, g, or t
natatactaccccttttctggattccaagggaaattgcaggtgagccagggagcttgaggacaggatggttcgtgcagaaggagactggaatgctctctgccacaccctagagcaggtttgtctgagtggctggaatttcagtctcccttgtatggtgacagatgcacatcaagtacctttcttgtttgttgactctctaaacttctgttataatgatattgcctcagctgtgttccattaatgtatcttatttcttagacacctattggtctccttgcttagttctgcgagataccatctagtacttcggggatagtggaaatctcctattttcactggtgaatcatcacttaaaaactccagattcatacgccaagacctagttgtcttatagccaatttgtggactggctaatttgctaaaagtatttgtttcaactttttaaattgactgctgttcattttgtctttatagcagcactttgctatggtcaatttgtttttgcttctgctgcccgctgcagcaacagctatagacttggagatgactgagagtcacaagaatacagatacaggtatagatagtacgggcttccctgatagctcagttggtaaagaatctgccagcaatgcaggaaaccctggttcgattcctggatagggaagatccgctggagaagggataggctacccactccagtattcttgggcttcccttgtggctcagctggtaaagaatccgcctacaatgtgggagacctgggtttgtttgattcctgggttgggaagatcccctggagaagggaaaggctacccactccagtattctggcctggagaattccatggactgtatagtccacggggctgcaaagagtcagacacaacagagtgatg

SEQ ID NO: 61126 - DNA, 1070 bp, Bovine  19866881673262
  misc_feature (1)..(1): n is a, c, g, or t
nttggttttgtgaggactgagagacagatggtgacctgcggctaattatgcagtgggcaagactgttcaaacaaaccaccgtgactgtggcagaacgccttctcaggagttagacaatctgggctgttcattgtcacactaggtaagcacgttctaggtgaatggcgaaaaggtgctacaagagggaagtatatttgcaactccttttcatcttcttactcattttcatggcaaaagggaaaaaaggaagaaaagaggttgagagaggcagttaaaataaacctcagcttgtactactgtgacagctaactttctggagcgtgcatgctcagtcctatccgattctttgcaaccccattgactgtagcccaccaggctcctctggccatggaattctccaggcaagaatactggtgcggggtgctatttcctagtccacaactttctggagagctaagggttttaaacatcaacatttgtgttttcattgtttcgagtgtaaccttgttgaagactttgctgtgctctgaaagcactggaagcagaattaagttctgagatgggcacccctgcctcctggagcgaatgctgccccctgaggttcacggttcacttgcgtccctcctggctcaaagattgcacccccctcccagactctccctgactttagtttctttcaccacacttttcagtcatctgacacacacatatatatgtgtgtatatatatatatatttttttacttatacatgtgttcattttacagttctttctccaaatgtaggcttcatgagggcaggggtcttggactgttctgtgctgtgacctaaagccctggcacatagcagcttttaaatatttactgataaaactaattgactggttagaagtcctttactcttcaccaccgtgctacacagtaccttgttcttttgtctgtgtgctggcccgctgaccctctcaggcatgactgtttctgtgcttacgggtatcatattcactcgctgcctcgttgatgcctattctggtctgtctcgctcttggactatctcatcctcgacagtggaaat

SEQ ID NO: 61127 - DNA, 1039 bp, Bovine  19866881834836
  misc_feature (1)..(1): n is a, c, g, or t
nccttcaccatgaacatggacatggaattatttggtagctagctatatgttttccaagtctttttagaaagctagcattattctatcagaggattcttgctcaaaagtatttgtgaatctgccctttgggtccaagctgaaatgtttgttttcattgggaatttatgtatgttaacagagtttatattttctgtggtaatggaattttgagggattgttgcttcattatatttataatcttacgtaaaaagcctgcaggggcatctaactgaatttaagctagaaataacgataatgcagtaatttcaaatagtcatgtgttcaagatgaagattttaaagtgatgattccacagtgaattttaatggttattgtgtacaatggtacttacggaacatccgttcagtcactacatgaatataactagtatgttagattatggatttgtaatgtgagatgagaacttttaataagctttccctataatggtttgtgctacaaacacaaagtatgagacacaaccctaaatcatagcagggtttttgaaatcaataggctcatgtttcaaatcaagatgagtttcaaatttttaaaaacacagctaagaagttagggatttgggataagatgtttctttttataatgtaaagaaaattttacttttgaagggatcaagtataaaatggaattgaagttacactttgagaaaaacttgttgattgtaagaccctgttagcatttaacacatcactgaaaatgctttcaacattttctttgggagacttttggagaaaaactggctgatgtgtgaaatttggtttggtgtggtcttgtccaaactggtggttagttattttgaccccctgatctggtgattccaagaaactttctgaagatatccctaaaaatgtacaaatgcctatttcaccattaaaggttcttttagtaaaagcatataaataaatttttttaatgaagtgaacccattcttacgacatttgaagcagaagcatattatattttcactctgtatcattat

SEQ ID NO: 61128 - DNA, 1178 bp, Bovine  19866881912494
  misc_feature (1)..(1): n is a, c, g, or t
naaaaaaagtgtttacgtattaaatggacattagtaagaagaaaccaccttcttatactccctactgcaaacacaatactatttcatactattttaattatggtaaaacaaggttaaatccactcataagtcttgaaaatgtttaagacattagttcaaaggaattgaattttgaaacttttcaacggcattttcaaagaaatttagaaatgacaataattcaagtaatatgtcacatcaccagttttttttttaatggtcttatacctttactaagtaggttttaaaatgcataaacaattaaacattactattggtttttaagttaaaaggttagacaaagtaacacttgcattacaggaagacacagagtatatgaaaagcataagaaaaaaagcaactttaataaagactaagaagataaaaagtcttagaaccccttaaaaacgcttaataaagaatgaaaaatatataacacattaaaattattatttacttgcagcagagtgttctttgatgactgttaggaaggaaagttttaacaaggaaaaaatttggttacataaaatatttctcttttcaaagttttatttaataatagtgacaatcatcttaggaaagaaaggaagatttggcttgagaggtaaagaggtcaatatggctttgttatcattgcttgccttcattttctaagaaactaattgattttaaagttcttaataagccccagatttttcacaacagctcttcatgaacactgataatagaatacctgtaacagagttgaaggtaaataaacaaaaacgaaaaccaaaagtactacctctaagaataagcagaaagacactatgaagaaaggcactcatatgcctatgcaaaacactatcactactaacacctgcttcatctagaggaaagctttcaaaatctttttcttttccttttaaaaatcatatgccattttcaagttaataattttctccaaatttatgtatttttttatctaaagataaaaatctgtttcttacaaaacacattttcctcatagcatgcatcccttgatggagtttggggtattaatctctttaccactcttcagagttcttaggcttccctgggggctcagtggtaaagaatcagtctgccaatgcaggagatgccgggttggatccctggat

SEQ ID NO: 61129 - DNA, 1912 bp, Bovine  19866880361124
  misc_feature (1)..(1): n is a, c, g, or t
naaaagaaaatgtgaattactgagtatcaatgtctctattttctaaaaaaatgttcttctttttctcttactacttactcctctttttcttaaagtaaataaacaaaacactttaatagaagcaacttcccaagctactcacttctctgtaaataacaagtgtaacatattagcatctatgaagttacttctattaatttcagtcacattatgtcttagctattctttccacattgtggaatcctaatgatttaagtgtatcttttataaagaaatctttctaatcctttgatcattctaattgggcctctaacaactttcttctctattatagcttcacttgaagtataataaccagtcatcacgcaacccatgtttgcttctcagaaggcaaagccaggtcccaaaagtcattttgacctataagtaatagcagagttcctgccactaaccattgttcaataaatattggttcgataaataagtgcttaatttggaatagaattcctgattatgccagcccatgatggccttttagatctcattttcttatgttgggttaatgttgtcaggaaactatccagaaatatatcattatttttaccatataccaaggttgacaaacaacagtccctgagctaagtgtggccattttcctgtttttgcaaataatgttttattgaaaaattgctctaattagacatctctccatagaagacatacagatgaccaacaagcgcatgaaaagatgctcaacatcatcagagaaatgtaaataaaaactacattaaggtatcatctcgtaccagtcagaatgactattatcaaaaaagtctacaatcaaaatgctggagagagtatggagaaaaatgaaccctcctacaatgttggtgggaatataaatttgtgtggctactatggaaagtgatgtgcgagtctcttaaaaacttaaaaatagagctaccatatgatgctgtgatcctactcttgggaatatatccaaaaaagaaaaatattctaatttaaaaagatatgttcaccccagtgttcataaaagcaactatctacaatactcaatatgtggaagcaatccaaatgcccatcaatagatgaatggattaataagatgtaccacacccacacacttatacaatagagtattagtcataaaaaagaatgaaataatgtcatttgcagcaacatgaatggacttcagtttagttcatttcagtcgctcagtcgtgtttgactctttgcgaccccatgaaccgtagcaccccaggcctccctgtccatcatcaatttccagagtccacccaaacccatttccattgagtcggtgatgccatccaatcatcttatcctctgtcattcccttctctgccctcaatctttcccagcatcagggtcttttcaaatgaatcagctcttcgcatcaggtggccaaagtattggagtttcagcttcaacatcactccttccaatgaacacccaggactgatctcctttaggatggactggttggatctccttgcagtccaagggactctcaagagtcttctccaacaccacagttccaaagcatcaattctttggtgctcagctttctttatagtccaaatctcacatccatacatgaccactggaaaatccatagcctggacaagacgggcctttgttgacaaagtaatgtctctgcttttgaatatgctatctaggttggtcataactttccttccaaggagtaagcatcttttaattgaatggacttagagattatcatattaagtgaagtaagtcagagaaagacaaatatcatacaatgtcacttatatggggaataaaaaaaaaagacacaaatgaacttacaagcagaaacagacacatagacacagacatagaaaacaagcat

SEQ ID NO: 61130 - DNA, 1157 bp, Bovine  19866880393583
  misc_feature (1)..(1): n is a, c, g, or t
naagttggactctaaagaaagctgagtgccgaagaactgatggttttgaactgggatattggagaagactcttgagagtcccttggactgcaggaagatccaaccagtcaatcctaaatcttaaagtcctgaacattcactggaagaactgatggtgaagctgaaactccaatattttggccacccagtgtgaacaactgactccttggaaaagaccttgatgctgggaaagactgaaggcaggaggagaaggggacgacagaggataagatggttgaatggcatcaccagctcaatggacgtcagtttgaataagctttgggagatgcttggtgatggacagggaagcctggcgtgctgcagtccatggggttcaaagagttgggcacgactgaatcccagggatggcggagcctggtgggctgccatctatggggtcgcacagagttggacacaactgaacgcaacttagcagcagcagcagcagcagagcaactaaactgactgaaaggctttctaaagttaacctaggaaactgaaatttaaatgtaccgacagtttgttgctggtggtggtggttggttgctttttaaaactcaacccaatgtcacagtgatgcactaaaattcctgtgtagaaataacagtaacaagttgggtaaatagacctttaaattgtaagacatttgtcagccaaggtcattttagtacagattcaaccaggctgactttctaagcttcctaaggagcaataatgtatggatggatataaaacatgtgttttggtgggaagaaaatcatcttcaataatgaatttggtaagttcagatcctggagcctagaagtcaatgtttaaatttgactcagtttcattcaatcagccaggcatagctgtgctcacttttgtggaattctaacttgggttgaaaaagtaaattatgttttcattgctccagtggcaggagacatgagagaatgtttcttgtcataagtggagtgggacctgaggatgtcccttctccaaaataaaatgtgatcctatcatagatcaaggagttcctaacatgggaggaaagcaagagaactatggaaggcccctgaaattttaaagcagagaaaagtaaaatttaaatttccacaacactcttaacaatccaa

SEQ ID NO: 61131 - DNA, 1078 bp, Bovine  19866880455232
  misc_feature (1)..(1): n is a, c, g, or t
ntgcatatggtgactgcagccatgaaattaaaagatgcttactccttggaaggaaagttatgaccaacctagatagcatattgaaaagcagagacattaccttgccaacaaaggtccgtctagtcaaggctatggtttttcctgtggtcatgtatggatgtgagagttggactgtgaagaaggctgagcactgaagaattgatgcttttgaactgtggcgttggagaagactcttgagagtcccttggactgcaaggagatgcaaccaggcctttctgaaggagataagccctgggatttctttggaaggaatgatgctaaagctgaaactccagtactatggccacctaacgcgaagaggtgactcattggaaaagactctgatgctgggagggattgggggcaggaggagaaggggacgacagaggatgagatggctggatggcatcaccgactcgatggatgtgagtctgagtgaactctgggagttggagatggacagggagtcctggtgtgctgtgattcatggggtcgcaaagagtcggacacgactgagcgacttaactgaacctgataaacaagacttaagtagaaaaagccctgaaccaaacaaaagaataagtagaaagtcttttctgcaggaagtcacaactatggtttattttcctgaaacccttactactcagagtatatatttttttatctttaaataaaaattctttgcttattaacagtaacctcttttcaaaaatattttttgcttgctatgtcaattctaatactgtgttatggtcatgggtcattgaaacacgtgctgggttgtgaaatatactgaataacatgttttttggttgttgttgttttttaatattaaagattcttatgtttgttataaaggaaactgatccctttcaaaagtcaatactatacaacaactcctgtcaccccagtactctaaagaactgaacagaaatagttttaaaagcactggaagcatttttctttcttcttctttttttttagtagaaatttggtctctggtgagtaaaacaaatattcactgaaaatcaaatatttt

SEQ ID NO: 61132 - DNA, 1309 bp, Bovine  19866880522162
  misc_feature (1)..(1): n is a, c, g, or t
ngcataaaattatgtattaaatttaagagacagaggtatttatagtttacaaaaggatcagagatatcagttgaataataaactgtgtaagtgatgtcagagtcccaagaaacaaaacaaatgagccaaaaatcttatattaaatctaaagaagttcataaaatagagtctgataagtcagacatgacttcatgactaaacaacaataaaattcttaggtattagacagattcattctagcatgtctttacttttcccagattccttgatctctgactttcattttaattatgacagttcttttattttataacacctttttacattttactaatttttgtgcacataagtatgattttcaaagagacgttctgttttgtaagtaatcccttaaataatgttaatcaattttgtgttacaacttcaaaagaaataaaaatattttattcttattttatgtttaggtaggattgtattactagcactattttaaaatgatgtttacaagaaataaataatacattaaaagaaattttaaagcaatcaaatgaaatatttaggaagttaattcccaatgtacttttcattatatcatgacaaattttttagtggttttttctcagcagctgattaatattgattgactaaattctcatgttgtattaagttaaaaaacaaatcttacaatatatactcatctttctataaacctatatttttaaggagatgttagcatatattgtctgtaacatacagaatcctaagtcttttaatgacattgaataaacagaatacaaccttttcacataatgtggctccaaagatatctgttccatcatgatagacttaacataagaaatcaaaaatgcctcagaattaaaataatcattttccttccatcaaaaaaatacttctgattttcctttgaaaacataaacagctataaaattttatcttagcaaaatatattctaatttatttatatttgtaaatatattttaaaatatttatatgaccacaactctaagtaatgataaaattagatttaatgatcaataaccccaacatagcactaaagtgtagagaaaacaactgctccttaaccacaaaatttaataaatgctaacaacaaatatacataaataaaatgccattcaaaccttaagcataaatacttaagcagtgtcatcacagaattacctatctagtgcctttctctcttcataaggttaatatttataaatgtcagaggcaaaaattgaacatgtagaaaagtagtaaaagggtcatagtaacttcgacatttcag

SEQ ID NO: 61133 - DNA, 3084 bp, Bovine  19866880546892
  misc_feature (1)..(1): n is a, c, g, or t
nctgagtttgaagatagtaatctttcttcattcatcaaatacttagagagccacaattatgtgacaggtcctgtgtcaggcactgagaatatcatgttaagaagctaaagaataatttatgcaatagatgttatttggaaggttatcagaattttttaaaaatatgttaaagggaaattattctctaaaactttctacataatagctatttgtgaattataaacacataaagatttgatttgatctggatcaagtaatcaaaatgttaaaaagttatgaccacaaatgaaaataattttacaaaaattttaaaaagcagtattctaattccgcaataataaaaaaatattaaaatagtgtaaaaatgtgcagttatagacaatgtataaaagctttagtttttaattccatgatgattagagttattttagatgcttttctaatttctaataataaggaaaatataataatagcttaaaatataggaagcatcagatttgagatcattttcctgaaagttggcattttacatagaacattgtatgttacttttttctctcttatgttgatatttttcctcagaaatcttggatgctttcaacacaactcttggtcttgcaatccttttcagacatataaaataagagaacacacttggggaataaaggaatttctgaaaaccccctgtttcacatattgggttacagagtatgtatatgtgctctttcacttccttgtctgggaaacagggtatgaactaagtaggatgattttactctgaatttatgttacaagtatctaatcatcacagtagattgttaatgactaatagctttttaatctgccttatgtctatacagacacagaatcaggttaagtcccttgaaaatttcacggttttagcatttaatattaaagttggcagtgaaatatgaatattttgaatgccactttggactgaagaaagaacacatcataataaaacttctgtctttaatttctaattcattccacatcaccagaacgtactcatttttagtgtttctcaaatattttctgttcagagaagaaacattggggttaaaattaatgtaaaaatctcatgaaatagtgtgcttgaaggaaatcactagagattagctggatgattctgactcatgacaagggatgatcttgacaggaatatgatgacctaccctcccaaaacatctttaataagaaaaatgtgtacttaatatctagggagagactagagagcattagaacaggagttgtcaagtcagcaaatctgcttattcttttccttcttgggaccaactaagacatcttaactaccacaatttctggagcaccccaaacagtagatacacatgtattgaaactggcaggagctctaaatatagtatttcactctacaatgattctaacaatggatttcagtttcttttcctagcatttctatgtttactacttggactcagtgagtctgacccatgcagagaaggatttcagaggactgaatatctgttcagggagagcagcctggcttagtaaactaagaatcaaaagtaggagtgactaccaatcccatagtgattcaaaagtaggagtgactaccagtatcatagtgatttgattcatattagagttaactgcaaagaagagagcatacattccttctgaattcttagaagacaggttagtctagtacagagtttcccataaagttaattgtccatgaaatgtaagaaattctgtagttttattatctttataatgctgggaaatttcaaataattatttgagcattcagttaacacagactttcttatctttgtgagtcaacatttttcttttttttttaaagaaagattcctgggatttccctagcagtccagtggttaagactgcacttccaatatggggggctggattccatccatggtctaggaacttggttcccacatgtcctgtggccaaaaaaatcaaaacataagacagaagcaatattgtaacagattcagtaaagactaaaaatggcccacatcaaaaaatcttaaaaaaaaaaaaaaggataggaaaaagattcctggagacatgtcatttgtttaaatctaatatatcctttgctggttaaacattgttacaatttacttgttcatatatttaaataatgttcagacagattcctttgtgtgcactctttaattttgcttgaatactgaatcccattacaggacatctggctaaatacacagagatacagtgagttgaatggggtccagtttgcgcattgactacaaagatgcagttgctttgaatcagatgatttttacaagttgcaagtatttctgatgtctctgtgactcactaaagcttttgtgaatccagccaaatatttcttatctaaagggacagtcagtggttatagaaagataacaaaagctgaatgggtagagagatagcctttggagaactcagaagaaatttcttaatctttcagcaaaagtccctatgggttttcacccactttttgtaaaagccaacactcattcttcaacacacatacacactcacaattttacataggaatgagatgacaatgtatcattttttaatataaaatcacatttataagtgtacttttaaaaattgatttattttaattgaaggataattgctttataatatcttgataggtttgctacacattagtatgaatcggccatagggatccaagtgtcacctacatcctcctcatccccctcccatctccctccccaccccatcccttctggttgtcacaaagcattgactttgggtgccctgcatctcacatcaaatttccaatggctatctattttacatatggtaatatatatgtttcaatgctattcactcaaatcatcccatgctctccttttcccactgagtctattctttacatctgtgtcccactgcagtctgttctttacatctgtgtctcctgccgtcacatagggtcaatgataccatctttctagattccatatatatgcattaatatacaatattttgtttttctctttctgacatcactctata

SEQ ID NO: 61134 - DNA, 2916 bp, Bovine  19866880644306
  misc_feature (1)..(1): n is a, c, g, or t
ngttgagaaattattttaacccctttatctttaggatctgcaacactgagtcataatatgcatttgatgtaacattgacgaatggataaataaataaaagcagaggcgactcccacaaaatctttttgcctaatcctactgaagatcatggtaagcaataagcctaacagtcctgcagatcatatgttgactcatatcttacaatatttacggataaactagatagagtaatgttcagcatgctagcttagcagctttttttccctctgttgttttagaaaaagtttccatctctaaatatgttctctctcaaaataatctttaatcttactgaatgtttatatctattgtagacgtgctagttaactcttcaaaattgttattaacataaaagaagtccatgatataattttattcactccagacttatgctctgcatcagttccctggaatctttcgtcattgtacctttcctgtgtgaactcctaaagatcctaaaatatttatgcacatatggatgatttccaattaactttggagtatcaaacaactgtgatttgaggaattcattaacgcataaactaagtaaaagaggagtaagcctatcttgtataaagtagtttaaaaataaatttttattttataaatcatttaggttatgactatataattattaaccaatgttttgacaggtgcaaaacagggcaaaataacaaaagattattttcctcagtgtagaaatgtatgtttaattatcaagagaaagttttatgaagatatttattagcatttgctaagaaagattgtggtatgtgatagaattagcacaaaatgaatttagttcaggattatacaattagccagtcgtgcaactttgggcaagccatcctgactctcagcttattgtctgtaaataagcagtttggatcaataaatgacaaacctaaagttacacagttttctatggtaacctcaggagttatcattctacttctgttattcttgtaaatttttgaatggagaattttaatacattgtaaatagtttgccatgtttaataactaagacaaagattgagaatttcagcacttttgttattttaaagaaaagacattttagttgaccttgatgagagttaagtatgtagaggctacatataaaatgtttaaagtcttagcactcaaaaatgagtcggtcatttattatactgaaaaaaatcttagtatactgaattgaatagcttgaatttttagagttagtactggttggtagtttgatactaaaatgttacttgggggaaaaaaggaataaatcattataaactgtcaaagggaaggtgggatgaagaagataagatggagagatggttaataaagaacgattaactctctgctcgtaaaagctttctggtaattgctgagaaacagagcatgtactcagtggtgacatgttctgatgtatttgcctctcccggttcctctccctcctcttttcagaggcctcctcttcctccttctgattgacaaacacctaacaagtacctacccaggagacagaatgtatatgtaaactatgatgattacaatttgcagaaagctttagtaccatcatacaggttgtacttatgtgtttgtatgtgtattatatctaaaatatacacttttatacactacaaaaataagtggtattctcataggctcagttttaccaaaagtcatatcagtagatatattttgcatttgctctgttaaagaaagttaatactcagactactccacacactcattttaattgatatattttgttgttactactattaagttgaaaagtagaccatatatagtgttgatctggggttaagtgtgactaatagggtataaagaattttgatggagataaaaagactagtagggatgtaaaagagccaaatgcccttgactatattcacttagactatattcaattagaatgttcacataagttactatattcatttagaatgttcacataagttagaggtctttgttcagacctctaacctctcaaagtccgaaataaaatttccctcttccaattaacatatctaggtatttataatgatctgtggatttcctttgctagttaaagctctgtatgtgtgagagagagaggaagatggtctttaagtgccctggcttactcactttccatgccattcttctcttctcacatttcccagtggcagtgtagggtgagatgtgatggaataggtgagaataaagggagcttatcactttctcaaggtcagctctgctgtttctccagctcagatttctaattttttgatcctgtacaaaggatatgttgaatttatattttggaaaatgccaaataagcaagtagcaaaatcaaaattaggcctaacctaaggccagataaatgaaactgcaattttgaaagacagactgttcactctactctgaggtcagtgaaagaaccaaaaatactttcatctagctcaggtggtgatgctatgactaatttattaaattattttccttcctaaagtgaatggccaatataaagacctatctttcttagttttagaacttgaagactggtaaagacgaatttcattgaggcaatccacaaattaaataatttttttaacacttaaagtaaatactgaatgttttcacaaagttaacatgatggccttaacttgtgtttttatttataaatgcaagtacctgctgcttcacaaagtcattaaaaaaaaatccttaaactttggagctagatatagggcaaaagatcattgtagttggtaggcaaaacaaaaatagtatttccaaatttccacctggatgtctactttcactgaatgtacaccttgttcaagtcctttcttaaacagaatattagtagcgtcttcac

SEQ ID NO: 61135 - DNA, 893 bp, Bovine  19866880659911
  misc_feature (1)..(1): n is a, c, g, or t
nagtaatgaagcagcagcaaatttacatttgctcttgattccttgacaacataattgtgtcttacttgatgttattttaatcatagtattggagaacacccagtgaaaccaaaaacaaagaattgtgaagacatctgtgtccatgtttttcacctataatggtatttgtgtcttggtttttagaggaagttgtagtaaccaatgagaaatatgcaactaaatatatctttgcttccattttattttaaaaacatttcccatggtactattttcaatagtatcattataaaaactatgaaataaaatttaaggtgccaaaggaaccatgaacttccaagatattcaagctggttttagaaaaggcagaggaaccagagatcaaattgccaacatccactggataatggaaaaagcaagagagttccagaaaaacatctgtttctgtgttattgactatgccaaagcctttgactatgtggatcacagtaaactgtggaaaattcttcaagagatgggaatatcagaccacctggcctgcctcttgagaaacctatatgcaggtcaggaagcaacagttagaactggacatggaacaacagactagttccaaataggaaaaggagtacgtcaaggctgtatattgtcaccctgcttatttaacttatatgcagagtacatcatgagaaacgctgggctggaagaagcacaagctggaatcaagattgccgggagaaatatcaataacctcacatacgcagatgacatcacccttacggcagaaagtgaagaggaactcaaaaacctctttaggaaagtgaaagaggagagtgaaaaagttggcttaaagctcaacattcagaaaactaatttcatggcatctggtcccatcactt

SEQ ID NO: 61136 - DNA, 2261 bp, Bovine  19866880671771
  misc_feature (1)..(1): n is a, c, g, or t
nacctgggtttgatccctgggttgggacaatcccctggaggagggcatggcaacccactccagtattcttgcctggagaatcccatggccagaggagcctggtaggctacagtccatggggtggcaaagagacggacagaaggatccacaattttcatcatattctcactggtgtctacaactaataagctggaatctattaaattaaataaagaaaataacaacaaaaatcaccagatctgcctgaatattgttgtacagaactattgcattctggaaatacccgtcaatgctgaggaggagagctgagaatacagcatgattcatattatatgcattgcttgccatacatcacttgcatatcatagctaaagcctggataaggaaagatagtataacataaaatatctttctgataaaatgaatacaaagtttaaacttcttcaatgttaatacagaatatattaatattctatggtaatataaaaatgaatgaatattcgcaaagtaaaaatttaaaccggtagagttcttttgcattccaagtatatttagattctgggttgcatgttgatgtacagattgagaattatattcattctcctcttctttgtattagggagtaaaatctttggattttagaggagcacatcgctgcccagagggggactccatttcccaggcttccttgcagcaaggcatgcccacgtggctaagttctggccaatggaatatgagcagaggtgatgcacctggccgctttccttctcacttctctttcctattggctagaaactggcaacttttgaaatagtttaaagtgaaagtagctcagtcgtggagtctttgttacctcatggactatacagtccatggagttctccaggccagaatactggagtggatgactgttcccttctccaaggcatcttcccaacccagggatcaaacccagggtctcccgcactgcctgcagattctttaccagctgagccacaagggaagcccaagaatactggagtgggtaacctatcccttctccagggaatcttcccgacccaggaatcgaaccagggtcttctgcgttgcaggttgtttctttaccagctgagctatcagggaagcatgataatttccttgtacccaaaggtacccttgattgtttcaggaaagaaagaaagaaagaaagtgaagttgctcagtcgtgtccgactctttgcgaccccaaagactgtagcctaccaggctcctccctccatgggattctccagggaagagtactggagtgggttgccatttccttctccaggggatcttcccaatcaagggatggaacctgggtctcctgcattccaggcagacgctttaacttctgagtcaccagggaagcccccaaagtaatcatatatgaatataaatcttaattttacaaatatatatgatatttagtgtttatagtaatgaacgaccttcaagctaaaaacaataaaaataattttgtttttgttggcaaaaattaaatatatttatttcattcattaatgtattaatgttaagcattaagtatatgatgtatacaatattagcaagggtatggggaaatatactctcttaagagcatgtactgctaatttaagtataagaagcttaaactttctggagggccattttacaatgcataaaatattttatatcctttgaccagtaattttacccaataaccagagatgttcacaatatttatatataaggtttttcatgtgtggcatcatttacaatagtaaaaactggatatatatcaaaattctaacaataggggattgatgaaataatatataaaggaatgcagtgcagctattaaaagtagtgttataaaaaggaatttaatgacatgggaaaatgctcatggcagtctgtgaagtgaaaaaaaaatgttttaagggactatgtatacaatgatttcattctgaaaaatagtaaatagataagatagaagaataaacatcaaaatgtcaccagctatctctgggtaatgttcatggggaaagaaatatttacagatgaatctatatagttttcaaactttctgcaacgaacactttgttgtacttttagatgttctttaaaacggaagataaatgtaatcagagaactttagagacggaagatcctttaactctttgcagtgtctctattgacaaggttgtgtgctctgatagttaagctgacgaacagcccaggctgcccacacgccattcatt

SEQ ID NO: 61137 - DNA, 1349 bp, Bovine  19866880722203
  misc_feature (1)..(1): n is a, c, g, or t
ngcttaatttttctgagcatcagtttcatcacatgctaatttggattaaaaatagtatctacctgcagaaacttgaaatgcattaaagttcagcatattgtaaggattcaaaaaaggttattgttactattattgatgattccatttaaaaaataatcatttgtaacttacagtgcaaattcaaggcttctttgttagaaaaggcatctgtgactttgctcatttcaatttatacttggaagataggcagtacttttttttttccttcctactatttttgaaaaggcattcagacatgaaatgcttgattatttacttgaatcaggattgaaacacttggctagttgaaggcaattctgggaatgagaaaaagggcccctctttgagtgattgaagctggatttctgaatcggatctttcaaaaataatgggattctttgcccattttccatgaatttacattttttcatagaaaattgtcttggatcagataaattttaagtaacatctcttattttttcattactttaaaaaatgcagccctaaattatcttaatctttcttactctccttaatatcctttctgctggatatttgattctttctatatttagttttctatcctgtgactatttttaaagtctgctttttttcagattcggtttcttatttttcaagtttgataaatatactttaatgaatttttagaaatttagctttgttttactgttcactttctcacaagcactatgttctttgcttggcaagaattttcttactaaattatgattctgttgtgtggtgagtgatattttctacttgacacagataaggaaactgagacatagattacatagcccaagttcccacccataaagtatgaagaatgggacgtggacccaggtggtttgatttcagagctcaggctctccagagctgcacaagtatcctcgttttatcagagatgcactttcaaaagctgcctctttttttcctttcctttattctctatatattttacagtcctactcatttctttaaggaatatccccctttccttcaaaatgtagatcaacattttagaatgtaatgtgttcccttgtgtgctcctgcatttcttactgcatctctgttctcccaggtcactgactcactgctggggatgtccttggcctccttgccctgtgacattcagttactaactccattcttttacttctgtcttccaaggagtctgagcttttgaatgttattttcctttcattcagttccaagatgatgtttgtctctgctgagtgtatttcctttaagctactggaaccttctgttctgcagattgctccttggtg

SEQ ID NO: 61138 - DNA, 625 bp, Bovine  19866880730634
  misc_feature (1)..(1): n is a, c, g, or t
nggaagcgtctctatataaggaaataaactggaaaatcagggagattttttttctcttagtttttttttttttaattttctttttcataaaaggagctggctatttgaagactatacccaatctgtatgttttacacaatcagtaaagacttttgaatacatttcaagtattaaatctatttaaatgtatcattttaaagaaggtcgtggcaaatagttagtttcacttaataaaatgcttggttttacttaatagaatgcacactagttttctgcatcttttcaaggctaatgaaaatattgctaaatggataaacagtgatgctaaagtaccatccacagaattacagatttctctgcaaagaacagatttttattttctctgaaaaaaaaagaaaaatctgtgcttctttctctctaaatatcagcattacagaaatagcaccacttaccaaagtctgtttaatatatttcctatgaccagaacatcatttgttttcctttaccagaatttggtcagttttgtcagtttccactctttcacagaacataaaaaaaaaaaaaaaaattatgaggatcttgagtgttaaagcttgtgacgaaaatcaatcctaatgggaaattg

SEQ ID NO: 61139 - DNA, 940 bp, Bovine  19866880964314
  misc_feature (1)..(1): n is a, c, g, or t
ntagagaaagatttagctaaggaaaattgattaagaggtaacacaagctatttaaataaaacatggaacgtgagtggatgattgtggcatcaggctggcaagggtgtgggacaggaatcatgtattaaaattgaatggcaggggaaattgctgatagtgtaatggttagtaggaaaaaaacctgaaatagagatcaaaatatatatgtgattatctacactttgtgatctcatagtcttttatatgtcactgtattttcaaaaccatttatattgcttttatgataaaagcaataaaaataaagacctacagacagaaacaaaaacatttgaaggtgtttttaaaatattttaaaaatccatggaaaaattactatcacaaatggtaaattatttattcagatctcaaaagttcaatagaagcttggggactgtcaattaacttgctggttacagcataaacaccatcaattttaagaacagctctataagaaagtcagcagacaactgactcatgaccttcccaacagcacccaactgtgaaacaactcagcaaggaaatgttctcctcctggcagagaataacctggtgacagcctctgtgccacaggggatcctgggccttccctcaggctttgttttttttttttgagtggaggaaagatttctaactgtgaccttcttggtaaagagcagagggtatcctgctgggaaaaatgcttcaaatctagtctggattttgtccctttcctcagctcaggaagcagtattgcatatcctggacaatgaataactgcctatttacaaagatagatgaaaatatcagttgaaacattacagctaaaatattttaagtataattcaataaatacactatttctgctccactgaaatttatggagctggtaccaccagactgtagatacactgttaaaatgtac

SEQ ID NO: 61140 - DNA, 1818 bp, Bovine  19866880979394
  misc_feature (1)..(1): n is a, c, g, or t
ntctcagtaataactcccgtcactaatctacttctttctttcaattcctttctccttcctcttttctttcttccttccttccctccccaattaaatgttcatttgtcttctactatgttttagcctctagggctaagtgttgatgataatagaaatgaagaacatgaagcctcagatctgagaagttctgccaggatcccaaggccatggggtaagtattgctgggacagtcatataagagcacaggggaggagaatccttagtcatactgcttgccagtttcaattagcatttgcagctttctgataggattcattatcagtcagtggtggtagctccatcagtggtgatggttacttgtgggattcagtgttctcagcaggaggcttccaacaattacttctgatgctcactgaagggactcccatgacttgctaacctttctcactggactgatctgagataatcttctgtaggacagcctatggcagcattcttgctgaccctttaagtagcatacagggtcttaatcggcttttttaaagaagggttatcttaagtgttaacacagtttagcatagctttagagaagcatatcagaatgaaactttcagagttacagtctacagtggcctgaaatgcccctcattatggccattatgtagtgtgaattctcatagttccgaaggaatttttataattgtgttgcagcatatacttggttgaaaaaatagatcacagaatgtcatccatctctgtgttctggaaggaatgctgctaaatctgatactcatactgagtcattcaaaaagctgaaccgaaaagaattcaagatcctttagcactcatgtaaatctctggtagacagagatttggattgcctagagaatttggaattctttatggaaacaaattgtgactagacatttgctaaaatgctactcttcaaataaatgcatgataaaagtaatgcttactgtcagatattcctagagtactaagaaagaaattgagaatgagaaggaagagacagaaaacacaagcgacatattcaacaatagtagtaatagctactgtttatcctctgtgctacaccctgtacataaattactacattcaatcctcataaaatcttttaaggctcagcaaaatacttatgggcatttaacaatgacaagctgaggcttaaaatggaataatactactaattatcagttatgtatgtatcaaagtatataaaactacataggtattatgcctatgtatttagagtatctgacaaaaatctaaaattttctcatgttcttattttcaagagaagataaaaagaatcttttccaagatatttattggtattacattttcttaactcagtggtgttcaaattagcattaagtggtccacaaaatttttctgaactgtgacaaaataagccagactgagagcaagattttagacacattggtgaataaaaatgtaacacacccatcaaatatatgcatttgatcatttatctagtaatcaatttttattgtgcttttaaaaaatacaagttcataatagttttttttttttttttaagcaaactacctgcttcactgttcattagagaggcacagtcttgagttacccacaaaatctaagcttcaattgagactttgataactcgtgtcaaattatacctacacataagggagatttatatatatatatattttttttttttttttttcaggaagacattaaaatctggcttaaatattgttgctgtgggggtagagtcactaagtcatgtttgactctttgtgaccccaggga

SEQ ID NO: 61141 - DNA, 1740 bp, Bovine  19866881067296
  misc_feature (1)..(1): n is a, c, g, or t
ntcactttaaaatgatataaaactttgatgtgtttcatgtagtttctttgtaagctattttataaatataaaatgataagctatttgataaaatcagcttatggaaattgttaattgtgtgccacatgttacaatttgtaatatctgctgaatgcttatacgtttattagtgctgttaaatataatcagtgtttgttttacctaacacagttcaatagaattcttgatgtattttataataacctaactgtggtttaccatagatttttcccttcatgttatttaaaaacaagttttacaaagtaagacaaatgacatttattgtgatatatgtattattagtaattgcttattgtcattttatatacaatctgctaagtaccaagtttatatttaccaggaaaatatctagtttggtgacttaagccatatgttcttcattttctgctcatggttggcagtaagtgtgggcgtctgtctgggccacttgcccagctggaccagtgcttccctttcacttcctttccctgactcagcagcaggcctgagtgacaggacggtcaccagtcttctagacaaaaaatagtttgacaagggtaaatgtttccactacttgagtcatctgggactcctctctgtggtcagtacctgtacagaaaaagaaggaaattgtgttttcactgataacatcccttcaaatatattatattttgtttcagagaacaccaaaccacaaggatggttccagtcagacatccaaatgtttactctgagtcatacagtagttaacacactggagtgagggattccctaagtaggtatctgggttttctctagtcactagaggctgttagatatatggatttaagtggctaagttttatttactttgctgacttctaaattttatacagtgacttttttttttggtcttttttgtgtaagaatcagagaaatgtcctataatagaaagtggaatagagaagaattcccagcacaataagatgaagcatagatacgtcagatgagtgttaagaaaatacaaaaatagttacaccaccagatagatgatgattagcatctgaaaagagggtttaggggatttagaggaaaaggggatcatatctgtccggaaatctcaagacttcacacagatagtaatgctgatatgttttgtgaaactgcagaattgtaatgctgaggaagaaggggactttttagggagaaggagcaagatgactacttgtttcagaagaagaataatccacctagattggtctactggatccatgtagggaattattaagattaacagctgaaaactaaatcaggctttgattttgagtcataatttaagaaaactgtatttagtttggtagacattatttttcagtgtaataacgtgattgaagtataatttagaaaattaacctgaagtcttaatcataataaatggcttcaggaaagactaaagaaatgagatcagtgaagaaataggagaaaaaaggacacaatatgaggtagagaaaaggaaccaggaagggagagagaaatgtgtggacaaagtagaaattatatgattaactgatcatataaaaaattttatagagggccctaaaaaattctattattttcgcattagcctaatataaccccagtatttttcacaggtagagaaatttgtgaatggatttagtttctcaccctgctgattttgaattcccaggtatttctatagtag

SEQ ID NO: 61142 - DNA, 1852 bp, Bovine  19866881163731
  misc_feature (1)..(1): n is a, c, g, or t
ntcacactttctacattggtctcataagcagatcacccaagagaggaaatacaacttaaatgtccttataagattctagatttcgaaaatttataagacacctagtaggcctttttcataggtcacatatgcttctcatttggtaaatttattaagatagcctttattttaaagtaatggcttggcggaaaaggagattcttttctaaaacaaatgtttaatttctagagcagcatcaaggataaagtataccatcaataagtaatacttagcaataactccatatccatgtatttagtactattaaaatattatgtcaacatttatcatcatatatataaaatctacatgtatatataagcaggtacatgaattataatcttaagaatacattttaaactattaatacaaaatgctactgctgtctttttcccttttatccctcccttcaaatgacagtctttgatacatttgaagagccattgttaaatatgtttttaaaatgctatgatgaaaactagctttattgacagtgcacatattctgttactgttcagagtacatataatgttttaaaatgaaggcaagctaaagcagcaaaacatttgtcatggtttgaggtattaggtcatgaagtttgcatgtatatttggtggtttatatcatgccaaaatagatgttccccgtcgggaagattcttaagtgctaaaatttgcccttactgttctgtaaaaattgtaactctttcagaggggaaaaatgtgttaaagtatatattttcacatctctgaattgatatattttttaactaccaaatattttaaaaacttatatgtatcacaaagatataaagtgacttaaaggtgctaaagaaatagctaatttattccacatattctgaatcttccaacagatggcatattttcagcaaataacacctaaattattatctctcagatgatcaacacctgataattggtggctagacacatttctatttaaaacatggaattctacatctagataatgcaatatctttaaacattcacaaatttcctttttataactttattataataaatatttaatttatacattttacaaattatccctatgaatgtgatataccttcatttgtatagttatattcaatgaatttaatctctagacaaaatacttcccattattctcttctaacaccatcatttgctttgacttaaatgataaacatgatagagattgaatttaatttccttaataagtaaagtttatctaacttattgaatatttatattttaatcttgaattgatcaacattgatcaacatgtcttggatttcttcccaatgctgttatgacagttttttttttttcctgatgtagcaatctatacccaaaacttactatgatataaaatgaatatttaaaagttatcttctacatgaatgcataatagaatcaaagactttatagcatgtgaaataccatattacataatatcaaatttaattttgatgttgaaattacagaactatatagttcatctcactgttagtaagaagaattaggtcctattttgggtttggggacaaaatttcaagcctgtgaaaggtgtgtgtgtgtgtgcgtgcatgtgtggggggtggaggggttcctgcatgtacccaagcaagttctacaccagttccaacactatattctaggagataacatcaaattccataggttgagacctcagtcctataggactgtgtgcccctctcccatccccaccagaggtcagaagcaagcccaggttgttatctgtacttttgcctgactggttataaatcagagtttcccacaaccctctc

SEQ ID NO: 61143 - DNA, 1255 bp, Bovine  19866881269867
  misc_feature (1)..(1): n is a, c, g, or t
ntcatttatgcccctcaagtggccaacaaaatacttgtcatcaagaagaaatgcagtaatcagcttattccacttaattaaaaaggagctgattgtgtcaaagaacaagaaataaaaataatttagaagttgatagaaacaatgtgcttcaaatgaatttgctcctttaaaaaaaggaaaacgtaaaatatttacccatttgaaaaaaatatcttattaaaagcaattttaaggctcttaaaggtatagttaagaaaatgtatacatgaaaaagttgtaattccctttatagcaatactatgtcctgttcttgattaaatggaaagaaggacaagcatgagggagtggggttggggtagctgtggtttggagactaggttactatttataagtaaagaatggaaaagaaggtgtcatgaagttaaactagggaggtccagcactaactaaatcgtgggattgtctctatggactgacttaagccctttaacaacttctctgttttattctctccatctgttttaccagactatcaggaggattatttagttaatgttgaagactatatttatcagctcacaaaatgtctgtgatttaatgatgagagagctctaaatgatgccatgggagtatcacagggaccagcaacagcgttattgtcagttgagtccttcagagacccacaggacaaaatatgatatgccatactcagagcacttggaattgcgtttcaataatcatttctcccttttactcctccaaggcaattgagttttatactttgtgagcttgagaagcaatttggtttttatgatgggagaaatttagagaggtctcaacattatcctgaaaatgattctttcaaatagaaattaaatagtgacacgatgtactacaagtgataacttttctttctaaggatctaagaacatgaattctttgcttgaaatccttgtctaagatctttctcttttcctttagtaaaagaaacagtatcatgtttagtaacctgaccctaaattacagacttggaagcctttaatatatcaaatgttattaaccgcatttattttctaaaggccatacagtacagagtaactcagaatttgaaatagtgtattttgaataagtcaaggagaaaagaatttcctttatgattcagggttttaaacagtctgcatttttaataattccataataggtatcatcctgactcagtgaggatgataacacagcccaatacgcttcagcacac

SEQ ID NO: 61144 - DNA, 1144 bp, Bovine  19866881376770
  misc_feature (1)..(1): n is a, c, g, or t
ncctcttctttgttacagacacgttgctttctttgggatggaataaaaactcatcttttgctagaaagggagtatgttttggcaacccaagaatatacaaacaatgaagaaccatctgaatccccaaagttcaaattttggtaaaaccaagttttagggctgaatgtattttatcacattgcattttgaaaatcagtaatccacatatggcatatgtatccttgaattacctacagttctcaattaagcaaaccatggcattccctagccattataagtaaacataggttattgtagttttaaattatgccactttcaaacattttttgctttagtccttgaaacatcaaatctctttcattttcaatttgcctctttcaaaccagtgccccataggaggtgccgtccaaaagttgaaagtctctttatttctgccaagtctaatttagataccactaaagcttccaacaagtgtacatgggagaatgaatttgggaagaattttgaaaacagaatggtttatgtcggcagcagtttgaaaaaagagtaaatgctattgagaaatgaactttcactaaaccaaaaataaaaatgctaaaagtatataattatcttgaatggtaataagttctgcacagttatccaaaatctatagattaattgaagaactatgttcctttttgagtatgatatggccttgagttaatgaaccacagcatccgtgatatggcattttgtactgtatggtatattttaaatgaagcttaaacaaataaggactccatactgccccaagcaaataaagttttacacagcaggaggcaaacattcttgaaataattggtcacgataggatattattcttttttttttaagtcttacacaaaacatatctcatttcttctaaattggttctgtagatttgaaaaagaatcatgatcaaatttgtggcatggaaaagagccattctttataaagaatattaattatcactgtaaagtacaattaatatagaagccaaggaaattacactggatttctaatttgatgacggtgcaaacttactttgaattaatttctgatatgacttaatcagtagatattattatgtacataaaaattataaaaacatgcaaaaaataca

SEQ ID NO: 61145 - DNA, 1438 bp, Bovine  19866881566928
  misc_feature (1)..(1): n is a, c, g, or t
ngttaattatctccctgactgcgtaggtcagaagcatttggtttttccacaagaaaaagatgtacttatcaggatgatgatttacaggttatcagaaaacatctaagattcattccaaaaattcgagatcttgaaaattagcccctccagagtctgggaaaagcttataaagtttttttaattttttctcttcacctctttgaattgagaatgagaagcaagtgtgaaagtgctttaatatttcaaatgtgaaaatcaggactttgatcaaaaagaaaatctaatcaagatacacagaactgaaacatggttaaaggtataacattttatttggagcaagtcttggactaaaaataaagtcttacatacaatctaagaacatgaaaaactatgaaaagtaagatatttaatctctaggcaagcaggcattcttaaatttaatagttctctaagaattctttattctgttgttctaaggaaacaatcgtttcctatcgtttttgcaatagatatattccatatttcatgaatatgtttccattgtgctgtctttaatcatgggtctggtctcggctttagtctgggatttcaggaaattgcacaagtaattgtcatcacagacacagcttaatttctagtgtagtgatgacacaacaatttgcccaaggccaaactgaaacagaaaagtcttttataaaatgatgggtggtttgttctacagcttgatagttcactatagtaagattagagaatgtaaaaaagggaaatttaagtttatgttgagcttcaaaatcttaatgaaattgattgcttgagaatgatttaacattattatgataaaataaacctatattccacccttccttacacatatgagctttattttttgaaaaaaagtagatataggcaaaaataaaggagaaaagtatacataaaaacaaggcaatgaaaattaaaatctagggactcacatacaattttattcacatttggaagtcagaagcacttgtttcaaatactgctttgccactatttagctgtaaactactgataaatgtatgaacttcgtgttctcaatatcaatcctgcaaggttctcgttattaaaaatgagattaaaaaatgagattaaaaaaaaggaaaaaataggtttgtaagatatttagtataataccagtcacctattaaggacacagtaaatgacagttattaaatgtttatcagaaagtgcttcaagtaggtttttgagctatacttagcagaatttagagccctgagaccattaaaattgcaagtgatccaatatcaacttttcaggaaaaaatacttaattttatacataatcaaaaatctaatatattttaaggataatgacaggaggagagatgaggagactaagtgtaattgtatgtgtacatataattctactgctacaggaa

SEQ ID NO: 61146 - DNA, 3090 bp, Bovine  19866881618304
  misc_feature (1)..(1): n is a, c, g, or t
naatcaatgacattcattttttaaaatttatgtacatatttgacaaaaatctatgaggtatctattatgtacaaagcactaagatctccttaccatgttgtcttgatttttgtagttttatactaagttttgaaatcagataatataagtcctccaactttttttttttccatttttaatgtgactttggctattctaggccctgtgaatttctatatacattttaggatcagtatatgcccagaagaaaagtctgctgggattttgatatataaataggtgttaaacagacttatagcatactctagggaatataaacttttgtttatacttcgtttttttttgaataggcatttacttttaattgctccttacattagtttgacaaagaattaattgaaatctaaaacctaatttagtgacatgccatagcataaacactctaataataagaaggtgacaataattcttataatatctacatgcctaagacactattatgttatataatgtaaagagcaagagatcaagtgctggagactttggttcaactcatatatttgccacttactagatgtgtgaacttaggtaagtaagttagcttcttggaaacttgacttcctcatttgtaaagtttgatattgtcattccagctccatttttgcaataaaattgctataagaataaaatcagataccatgggaaagcaatttcaaaacttgtaagaacactctgccacttattcaaatgactttgtacaagtcactgaataaattcatgcctctgctaactaatctgatcatgagagtaacagtaggtatttttcagagtttgatccacataaagaactgagcatattgggagtctggaatattgcttacactcagtaagcattagctacttctactacaaataatgataatagaaataaaaagtataataaaataattgactgggaataatactaacctacatgcaagaaaggctgaatattatgtaagtctcttaaaattagttgatgaatttgaagcaaatggtttaacctttccaggactgagcataatcctaaaatgagggtaataaacaatgtgatctcaaatactgtccttgttctgaaattcagacaatgtgttatcattatagggacttagtaaatgaatgttaagtgcatcttaataagtattatgtattaaccctctctcagcctttatatcattgccaatttcatttatatataatatatacagtattattctctgcttcaaaagaaaagattaatctagggaattatatttaaagccattccattgatttaattttcctttctattgaaattttcttggaagaataaattaataacctccttataactatataataatgtcaccttggtgtttttgtaacatgattaattcagttagaaaaattcctgaattctctattcttaaagatgttacttcagttataacagtaagacatttctctaataaaacttcaaggctgagcaaaattctcattctcacagatgaatacatttatatagaaaggtatttattgccttcacacattcttcccttatattgtaagatgaagaaagtgaaataaaaatgattgaatatttaaaggccctagtttgtgaattggaaaggctgcagaagagatatccgtaacaatggaacatgcccaatatgacagattcaatgaatcaaatatttaaaatatcactgtgctgtatgtagaggtacactacgcgaactgtcatgtacagatctacagtaaatatgaggcttgtaatatttattatttaattcttaaaaaaataaagacaggtgtctttggcagcttgaaacaacattcatgtctgtgcaactgcattctaatcacatttaacagatgacaaaagcagtcattacctggaatttttcacttgatggctctgtaccttctggggacaggagataaatgaaggaaagccgacaccttcagatgttgtcttgattagtgttgacatttttccttgggggttgacagctgctaattaatttaatttagacatgaaacagaggataagaaaatatctttttaaaaaagttttactaaaagaaatattgaggtacctccatcacaagtagtaagagcaagtctaatttgcaagatcccaaattgctactatgacacactcatgtaactgcattctttcattcttaagtgtaactgctcaaatgtagagaatatagaaaatatatgaagttaaatcaaaatatttcctctacagatatgccattcaaatggggtttctatttaaaggtgaaaagtacagcacaaaacagtttttatgcaagttgtctttattcttaaattatttttaaaaatgatgctttaataagattttttttaaaaaaacatagtttataggcagactacttaatatttttccttgtgttctaaagaacatgtgatcatactttgttttctgacacagaaatatctaaatttctggttttctttaaagaatgaaaataaaactgaaatgtatgaaagtgtcatcataattaagggagaatgttcataaaaacaacaagcatgtgtgtaaaccacattgtagcttgaaaaacacatttctcatctgggtaagatctacatggacaagttgaaacagtctcagaaaaatacaggacagtgttgtctgctgtgacgatgagaataagggcatagaaaaccagcattttaaaaaggaagttccaaagtggcttgaggtgggggagtgaatcaataaaggttacattaaaagactgatgagcagaagtattgctctattcagagtaaagttcaaatttgtggtgagccaacaagtgttggagattatgaggacatgacaggaagcagggggaaggagggagtttcatattacccaaagtatgcatttatctcttgctttccttggagtgcagaaaccagtggaatttaggatatgagtaactgaagggggtggagaaataccttatttttctcaaactgtggtacttccaaagtgaatcactgttgttttgcttctcaagaaggatttatgtgctaaaacatagatttcag

SEQ ID NO: 61147 - DNA, 764 bp, Bovine  19866881822444
  misc_feature (1)..(1): n is a, c, g, or t
ntttgttttctaattttaaacctaggaagaagaaagaacatgtcagtttctgctttagccacaataaaattaataatgctttttcaattcagctttccaagctagatacaacgcaagtcaaatgtaaagaattgtggagacattgacaagatgaaagggattcctatcactttcatcaaaacttaaagcacaatttttaagttcttaagttttaagttcatagggtagtagctataggcaatcttcacttctaaataacatgtcagactgcaggtgtccctggggattgaagaaagtctatggtttatgtgcctctttgtctcaggttcctcaacacatctgtatatatgtgtgcgtgtgtatgtatatgtgtatatatggagcagatcaaagctagttccgtttttagtttatactatatgattacttttaatagtaatttttctccacacattctactcaacacttaggacccctgggcttggtataaccccctctttttttgatccattttttgaattgtgcctctcccttctgcatctgagaatccatgaacagacgctaacaaaagtccaatctcagtgtgtcatctctctgaggagctatttgtgattgtaaaggaatgttttcttacgctaattcttaggctctctccatcaactaattgggctgactttggactcatatatatttttgataagaatgtctctggtgaatggggaggttctgttaaaagcttttacacatgacattggttcaatcag

SEQ ID NO: 61148 - DNA, 938 bp, Bovine  19866881839655
  misc_feature (1)..(1): n is a, c, g, or t
ntgaagacattctaaaagtcaagagtgtcatctcctgattagagcctggatagtattttgtattttgctagtgttacctctatgtcatgcagctagaccaatatattgtgattaatatatgcatgtgccctcgtatccagtaattttagtctagaaatttagctcacagagatttactcgctcctacagggaatagcatatgtacaaagttagtccccgaagtattatgtatattagcaaaggactggaaacaatggaaatgtctatacaggggactgattaaataaattgtggtggtcagtataggggatgctctgctggtgtaaagagaacagagacattttatgtattgatatctaggaaacactatataaaaaagtaaaatgaaaaaaaatgtgtatttttttatacaaaagaaaggggcaaagagaacacagaactattttcttacatacatatatcaattctctggaaagattacagcatttttttaacttacctggttgtggtaaagactccatacactacaggatttctttcatctctcgtggggagtaagtaaatgtcttctattaatgggaaaaaataacgattcactgtaatttgtatttctcaatatcacgtttgctttttccttaataatgcaatatttctgagactctaaatagtatgtaaaattaagataacagtgacagtcattaccttatgacaaaagaaattaaggggaaaggtccagttctcactagctatctggcactgtgttgaacatttaacctccgaggtgtttacttcaatcacctgtaaatgggatggttcacttgataagctccatgtctgtttcctattagctgtatgtgacttcatggagaatgaaagtaaaaatgggttatttttaccctccagtgttaaaacaaggtgttttcttataactgcaccag

SEQ ID NO: 61149 - DNA, 1071 bp, Bovine  19866881997028
  misc_feature (1)..(1): n is a, c, g, or t
nctgtttgatgggctgactaatgaagtggacaaaaattaaaactaatattttcataaaaagcatgatatccttatcctgccctgtctcatctagctcccttttatcctccgtttctactctcccacatataggcaattactcactctcactgggacacattaaagttcatcttagaaaaaaaaaaaaagaaagaaatccacaaaccaacacaagaccattaaggatataaaataaatttactgttgcttataaacaccctaagttataagaaaatgaagaaatgaaatggactgagcaccactaatcatccttaacctattttgatacatttttctcttaaattcaacagtcatctagtaattcatttataatttgcacataattaaaagctgtggtcagttatttctaagatttaaatttcattaaggaatgtgccctctaatttttaaaatttaatcaacattttacaaaatttaagttttatttataatcagatacattattatttgctatatacatatagtttatattgaaggatacaaatttatctttttgtatatttttattttattgagtctgttaattattcagtgttgttgtcacaaaataattttagggaataacttctaaaaatgtgagccagtacacaatataacaaatatgtcaccttaaagacctaaattttttactaaataatatttatatacctaagttatgagttactcaagggagctacataaagtccttaaggacatattcccttcactagtaaaactgaactcagtctcagttaaattattaataggtacacttttgaattaaatcactatgtctatcatcaaatctctatgaaatcaaattgtactgatgtttttactacagtattcattgaaacacatgttttagtaatgtatttatctgatccaaggtctggttttagtaatcttcatatgctgcatttaactgagctatattttcagtgtaaggttattatattaaagttatatgggacaaaaactatatattcacattttcctagagagtaacacacagttataagtacttcaata

SEQ ID NO: 61150 - DNA, 723 bp, Bovine  19866882054908
  misc_feature (1)..(1): n is a, c, g, or t
natgtttgttttagtgaagtccttactttgcatactctgaagaatcttggaaatattgttcagatgtcagttccttcaggctctaagaatgacatgtaccttggctgaactttaaaataaattctacatttatcactgttttactgcatccttttatttttgttggtttctcttacaagcatgaattctctttgatcttcccatactttgtagccacacagaaattatttatagagtatgagcctcaatcttttttcctataaaacagccttgacaacttagtgccacaatatttctctcctacaagaacaaaagataactaattttcagtatctgatcccagtttattctttcaaaattttcaaaatgtatctttaaaaactcccaactcaagttatttaccaagaatatgaaaaaaattgtttaatttcctatatatatccaaaaatttctggatttccaacactctgagactccccgaaagtaaaagtcactcagttgtgtctgactctttgcaactccatggactgtaccgtccaaggaattctccaggccagatactggagtaggtagcctttcccttctctaagggatctttccaacccagggatcaaacccaggtcttccgcattgcagggtgggttctttaccagctgagccaaagggaagcccatcatattcactactgaataatattttttcttcacattgacatactttttt

SEQ ID NO: 61151 - DNA, 730 bp, Bovine  19866882071967
  misc_feature (1)..(1): n is a, c, g, or t
natttgatgactgattgtgacctggagccatttatcaggaaaaagcaagatagataatgagtaatgtatctaaggaaaggatggagcttgtaaaatgttgattttgcaggatagtaaagttctgttgttatcaaatgtgttggctgagaaaacaagtaattctgatttttacactttaagagagtaacttgaaaaagactatgatatatctacctttgtcaaattataagacattaattgctcattaatcaaagaatgtgtacttaatcaaaagagatacatgccagattttaattcttttgaatcaaatggagatagagtttataggaataactaaccatggttcctcgatacttcttttaaaaataaatttgctgatctcagagggaggacacataaataaaataactaagtacatttcttaggatgaacctaaaaaaactgtatttactattaaatttcatacatttaagcagtattaaaaaaaaaaaaacaacacaagcaacagatgttttaaggtcgtagttatatattcatgtctgttaagtcactttagttgtgtccgactcttttgcgaccccatagaacatagccaccaggctcttctgtccatgggattctccagggaagaatacttgagtgggttgctgtgcttgcctctgggggatcttcctgacacagggattgaatgggcttcccaggcagcgctagtggtaaagaacccacctga

SEQ ID NO: 61152 - DNA, 1239 bp, Bovine  19866880168575
  misc_feature (1)..(1): n is a, c, g, or t
natttccgggagaattatctataaccttagatatgcagatgacaccacccttatggcagaaggtgaagaggaactaaaaagcctcttgatggaagtgaaagaggagagtgaaaaggttggcttaaagctcaacattcagaaaacaaagatcatggcatctggtcccattacttcatgggaaatagatgggaaaacagtggaaacagtgtcagactttaatttttttggttctaaaatcactacagatggtgattgcagccatgaaattaaaagacacttactccttggaaggaaagttatgaccaacctagatagcatattcaaaagcagagacattactgtgccaacaaaggtctgtctagtcaaggctatggtttttcctgtggtcatgtatggatgtgagagttggactgtgaagaaagctgagtgccaaagaattgatgcttttgaattgtggtgttgggagaagactcttgagagtcccttggatggcaaggagatccaaccagtccattcttaaggagatcagcccctgggtgttctttgggaggaatgatgctaaagctgaaactccagtactttggccacctcatgcggagagttgactcattggaaaagattctgatgctgggagggattgggggcaagaggagaaggggatgacagaggatgagatggctggatggcatcactgactcgatggacgtgagtttgagtgaactctgagagttggtgatggacagggaggcctggtgtgctgcgattcatggggtcacaaagagtcggacacgactgagcgactgaactgaactgaactgaggggaaggctgccaggctcatctttactgccgctgggagtgtgaaaggaggaatgggcagagggagagaatgtggtgccctgtgacaggtccaaggccagagggatgaaaagatcatgaatttggattcaaagaatgaactctgtgtggctagcagtaggtcaaggactaggctgtgagagcgactggagatggagaagcagctaagggctaatggaggtggagtgtgtcaaggctcgtccacctctgctatcttctgcacagcatcagataaggtgctgcgagcaagctgctttttattccttctcattctcaatgaggtgtttctgcccctataccttaaaggcacttggcttctgagagtctggggttgatgaccaaaccatctccaggggttgtttctatctccaggggttctttg

SEQ ID NO: 61153 - DNA, 1405 bp, Bovine  19866880352960
  misc_feature (1)..(1): n is a, c, g, or t
ntggaaggcgagaggaacagatcattctgacagtccgagagcacagaacttcagggtcgagtagcgtggggtgtgctggagacaaggtggaagggaccccttctgctggagacagcctaactggagagagatgtttgataaggaagggacaagatggagctctaagcagtgtttgcaaagactctaaggggaaacatggagagcatggtaggttcaaggagccgccccagtctggtctgacccaagggtggcatgtctagggaggaagagatgagttgagaacagctgagatcttcacaggctgcagatgtcatgctgaagggtttgcattttattgaaaaggtgatggagagccccaggagggtttcaaagagggggaaacatcatgaccagactggagattaacaacgaccactctgggtccacaatggaggcgagatggcagatggtttatcccgggagagtgtttgggtgtgttaagaactagcccaggatgtttggaatagattaggtgagaaacagcggagggagcaggacagatagaaggggcacttaggcagtaaatcaacaactacaggccttgcaaattaattggatgtggagagttaaggagagggaggaacttccaggtttctgggagttcagaatcttctgagttgactgtcagaatatttataattgttgatttatgtatttttgcaggctttaatttcagggtacattaaaaggtaatttgattgaacaaaatatcatttagacaagacttttcagggatacatactgctgttgaaaacatagttgcatccacagaccaaaggcccatatcttatccacacgccctggaaagatgcaagggccagctcctttctagcggctctggaaagtcctcggctggcactgagatgcttcacattgaggagcagagtcaggacgctggctggctggtagagaactgctcctatatacctgccctggtggctcagaaagtaaagaatccacctgcaatgcaggagacccaggttcgatccctggctcaggaagatgccctggagaagggaatgactatccagttcattgtccttgcctggagaattccatggacagagagcctagagggttacagtccataaggccctgttgcacagagcctcaggtggctcccccaaatcgaggcaaggtttgggggtggaaagtgagagggttacaagagtacattgggttttggtcaccttcttcctgtaggtgacctttcctcctcacaaagcagaaaggaatcacgattttgtgatttgctctgatgtatctgtgaacggcatcacacacaaacgcatatacatgttagagaagagtcttggcaggattgagccgactactttccgttgtgatgcttactagggctgagcca

SEQ ID NO: 61154 - DNA, 3846 bp, Bovine  19866880450449
  misc_feature (1)..(1): n is a, c, g, or t
natctgggccttttaggagcagcaacatggaggcaagtttcccactttgagccataagcaaaacgagtcaggccgcgggtggcctgggtgtggtctcagtagtctcttgtcgctctgagcttagtcgctcagtcgtgtccagctcttttccaccccatggactgtaacccgcctggctccgctgtccacggggattctccaggcaagaatgctggagtgggttgccatgccctcctccaggggatcttcccaatccagggacaaacctgggtctcccacattgcaggcggattctttaccatatgacccaccagggaagccccaatagtctcttgaagtgaagtgaaagtctctcagtctgactctgacagtccatggcactctccaggccagaatactgaagtgggtagcctttctgttctccagggaatctacccaacccagggatcaaagccaggtctcccgcattgcaggtgaatctttaccagctgagccacaaaggaagcccaagaatactggagtgggtagcctgtcccttctctagcggatcttcccgactcaggaattgagccagggtctcctgcattgcaggtggattctttacccactgagctatgagccaagcacaacagtctcttcagtgaagttgcttcagtcgtgtccgactctttacaatcccacggactgtagcctaccaggctcctccatccatggaatttccaggcaagagcactggagtgggttgccatttctttctccaggggatcttcccgacccagggatcgaacccaggtatcctgcattggcagacgctttagggactgagctaccagggaagttaacagtctcttaggtctgatatataatatgtggttttgtgtgcaaggagagcgccccctagtgtaaatcttgaagttcaagactgaatattgttcagagagggctttctgggtggctcagtggtaaagaatctgcctgccaatgcaggagatataggagacacggattcgatacctgggttgggagggccccctggagaaggaaatagcaatctactccagtattcttgcctgggaaattccatgtttagaggagcctggagggctacagtccatgggaaggcaaagagtcagacacgactgagcgactgagcacgcatgctcttgcagaaaaggatggaggggtttggggacaagatcaaagttggtttactaagagaataaccagagaagtatgtttttgggaagccttttggactggctttgcagtcaaaggacttggattttgctgtcagacttggcttcaaatcactacttccaagattgtacgcacttgggtgagttacttccaccccattttctttttgtgaaaccgagatgattaatacccacctctcagagtgtttttggggtaaatgaaggaagcgggggttgagagagtgattgaagatgaagttggaaagattaggcttgatcatgaagagtttacgtactgtgccaaagagtttgaacttgactcaaagaacaagagagccaatggaagcttgtgagcaacagagacagggtagcacttaagagttggaaacgtcaggttggtttatttctcttcttcagttcttgtctcatggcaacagaaatttggagcgatggaccaaaaagtataggacaacaggcaagttacagctcagttcagctcaagcagacagatcttttatcagtccaacactcccagaagagtcctctttatccttcctatcaattcctactggcttccctcttttacactcccagctcttccttttggttatgcccagtgcaaagcagggcttgcacccaccaccaatcaatgaaaggaaatgcaaatgggcatagactcaaggccaagtgacaattatgctataaaacagcaagttgtcttgtttgtatcttcctgtaattcgtctgttataattagatgcagaatattcatgagccctaaatgggctcctaactggctaaggttacgtggagaagcccctgtggtcagtttgcattccctgtgtgcctagggcgcatgtgcagggctgggaaggtatctgtggttactttgtagcatatctgtgagctctcccgtgggagggagtttagagatctgcacgcatccccgccttccctcattgctcctgtgtaacgtcctacctaacagaaagataagtggtggcagtgtagacaagggggcttgagactttggtggttttgatggagctggaatatatgggaaagagattttggaagtagcattgacttgcagttgatgcaatattatggtgggtcttgagatgggaggggacagggtgcagccggaaatggcagcaagcatatgtgcagcttttgttaaaatcctttcctataagccttcttacctaattctcacaatagttttataaggagatattgtaattatccttctcattttgtatgtaaggagtctgatagggagattaagtcaaagggtatacagttagcaagcggccaaatcagaacgtttcacccaggtctttggttccgattctgtctctatttctcagatcacactgcatctcaaggtttagagtgaagtcactgcagagagagaggcagtctgggtccagggttggatgtgtgctggggccccaggttgtacaatctccctggttgctaggagtctctgatgatcagagtccccaggttgctaggcgacctgggttgctaagagtctcagtttattataggccttgggttgtcagaagccttggggtattcaggctttcagtttatgaaaagcttcatggttctcagagacatcagttattaggggccccgggcatctagggctcttggctcttaacatcaccaggttgtgagcccaccctgcttgctaggaatctcaggatgtcagaggtcccgggtgtgtgaaggccttcagctgctgaagtgctggtttactggaaacctcagttttcagcatctcagacttgtgaggttactaaagatgtggcctccgatttttaggtccatggcttcccaaagtcatgggtcaacatgcagctttctcccacccatttctcttctttctcttgtcagagtttctggagctttctctttttctcaggtgctttatcacagacagcctcattctgctcccgcagctgtgctgacctgatttcttctactcccagttcttcccacttaggtaccaattccaagacctttgagtagaaatttgttacggttcctaaataaagcagatatcgaagcacatctgggttatgtttatgttctcatcattcaccctctggccagtcagctttaataatcttaaattagactttgtggaaaagtccagggttgagtgcccctcatttccaattattttattagatgagtcagaacagtaaaacttgcctgtgcatatttttgtaaaaacatttgattatcaaatagttattctcagaaagttgcaaggatggtagagagagatccggggactcttcatccagtttcccccagtggttacatcttacatatccaagtgattcaatgctagtatagtaattctctgcttatccagagatctcgtgacttccatgagggctaacaccgtgcaaacttggatggggaaaaggcctctgattggttaaaataagctcctgctttccctttgcaatatccttacagaacacaatatataattggcctcttgtatccatgggcttccacctgcagttggttaaatatgaagatacaaaacccgtggatatagaaggccgattgtactaggccattcactatagggacttgagcatccttggattctggtatcctgggt

SEQ ID NO: 61155 - DNA, 1013 bp, Bovine  19866880473722
  misc_feature (1)..(1): n is a, c, g, or t
ngaattcttactaagagaggacagaacctggcaccctaagagattcattatgaaaactgccaagtattaaatgggcccatattcagatgataaaaatccacacactccaaagccacacagacaatggataatcaatgattccacttgatcctccttcacttgtgaaaatcaccaagtgctgtctacactcaggagcacagacatcaggaagtgaactaagagaggaagaatgtggtggcaaagaagagagtcaaaaactaaaaacagatcaaatacaccaggaaatggaaaaaacaaataattttccctattttgtcttagttcctaaagcagaaaaaattctttcttttttttttttatggctagatcaaactgagaaaggaatttatgtgagtcgactggttgccaatgtaagacaaacactgtaatatttactttttctttaagtgtgcccccaccaaccaggccaacaggaatagctctagctgtcctcagaaggcagctgctcttcaagtttaaccttgctcactgaagcagcacagtttccctaagtgtctgttaatgtcacatttcaaaaaaggaaagaaaagataagtctacttacagatagcattatttccaaatgttgactgcagtaaatgcccttgtcctctgtgaatgagaactgaaaccatgtgattgaataatgaaaaatattaatcctcttattttccaatttcaagaaacattctgtctcaagtgtttgcttataattcacctaagtttaaaaagtcaagggtttggccagcacggccagtgtacttggcagggccaggatggaggactcagctggctcgttgatgtgtggtggggccaggagaagatcccaccagtgcagctggggtgtctggcagtggagaggccagggaggtggctgcaccgtggggaacttagttacatataggaggcttaagaaaataaacaaacaggctgatgatgatgggagccaggtttctcacttctgcagaaggaaa

SEQ ID NO: 61156 - DNA, 3356 bp, Bovine  19866880506947
  misc_feature (1)..(1): n is a, c, g, or t
ntggagtgggttgcctttccttctccggggatcttcccgacccagggatcaaacccagttatcccgcattggaggcagatgctttaacctctgagccaccagggaagatatatatgcattaatatatgatatttgtttttctctttctgactttcttcgctctgtattataggctctaggttcatccatctcattagaactgactcaaatgcgttccttttcatgttagtgtctttagtctgagatttttctccactgaagcttaccatttgctggtttatttctttaggaaccatattatgtacgttgcatcaagcccaacgacatgaaatccccacagatctttgatgatgaacgctgccggcatcaagtagagtatcttggactcctagaaaacgtgagggtgcgtcgggcaggctttgccttccgccagacctacgagaagtttcttcacaggtgagaacagatgaaacagagaaacccgatagcacactgagacttacggagccctccctatgttaagcaacgcatcagctcgtatcaggcggtctaaatatttgttgagtgaacagaagagttgaggaaactacaaatatgatagacgttcctagaattggcaggagaccccttgagtttgtggtttatggaccatggggaaaaaacgaattcctcattgggaaaatataagcatgtagtttataggagaaaaaacaaggatttagagtcacaggtgggttggaatcctggctataccacacgtctgttgcatgacctggagctagaaatttaacttctttgtttctgcatttgcaaaatgagtatagtaatgctaccttataaggcttttgttgtgagaattaaattaaccaaagtggaaagcctaggtgcctggcacatagtagaagttcagttaatgctgcttatcattactgatattagtgactatcataataaaaagatactaagtagatcatcatggaagccctaaaattagtctacctgattgaatcctggctttgaccgggacttttgaccttgggaaaatcatataactttccagttgcctctgtttcctatgtgtagaatggagaaaattaattttttaaatgggaataataatagtaattacttgataaggctgctggggctgaaatgagataacatttataaaataaacacctagaatgggaacctggcatatagtaatcactcaatataaggtgtcattgctattgttatttattattggtaacaataatactagttgacacctgagatcttaaaaatactgttttaaatcccatcttttcatttattttaaaatatttattcaacatttcctatgttgtagactacagatttcacaaaaatatgaatgaataaacacataaaatattggttggtgaggagtctctaagtagatagtaatgaatgtaaggagtcagccatacaaaagtcaaagaaaaagagcaggtgaagcagaggaaacagtggagaaaagtctcccttgcagaaataagtgtcttgttttaggtaccaaacatcatctagtatggttggaggatgctgagcaacagggcagtggtgtgggttgagatcagagagatggacgggggccagatcatgttgcacgttgtcatccagactaaacagtttagattttggccaagggtggtaaaaaaccattggtggattttatgcaggaagccacacaatcttatggatgttttaagagatcactgtggctgctgtgtgaataggaagcaaggagacatttagagatgctattgcaggaatccaggagaggcagctcagtgagagtgccttgaacaaggaattattgtagatccaagagtagtggactgataggtccactaggataggttttgggggaaggtagacaagacttgctgatggattgactcaatgagagaggagtagagagggatgaagggtaacatgtagatttttgcttgagcatctggataagcatggtaccattttctgagataagaaagattggggaagagaagtgtgaagagggggacacggaactagggcaaagatggaatcaagatttgtctcttaactatgttaggtttgaaatggttctaaatgcctaggtagaaatactaaataatctactagacatataaatctgtagttctgtgaagacttccaggctggaaataggaagtttggggttactgatacataagtaagtaagtaagtgaagtcactcagtcgtgcccaactctttgcaaccccgtggactgtagcccaccaggctcccccgtccatgggattctccaggtaagaatactggagtgggttgccatttccttctccaggggatcttcccaacccagggatcgaacccaggtctcctgaattgcaggcagacgctttaacctctgagccaccagtgaaggtctactgatacatagattatatataaagtcttgggacttgatagaaaaagaagagaaggcccatgccaacatttaggtttgtggtctgacatgaaagaaccagcaaagaaaagagaagaagtgaccaatgagagagaagaaatatcagaagagggttaggtcacagaagccaagggaagatggcatttcaagaagagaagtacaattatattaaatattactataaaagcagaagcttaaccattagaccaggcagcacagaagtcagaggagaaagagctggtcagagccccatttgagcaggatgggaaagtgaagtgaagagttggatgtccacggacaactcaaggatgtgtgttgtgaatgagaacagagaagaatggaagcagcagccagagtggaatgtgaagtcaaggagactctagaaaatgttcaaaatgcaggtggcgatgattcagaacagagagagaacccagccacacagaagggagggtggtaactgaaataataacctccttgagaaggcaaggaatgaaatcccagcacaagtggaaggttggtcagctttagatgggagcagggatccttctcccctagcaacaggacgaaaggcaaagaatatgaaaaccaaggcaggaagcctcgaaggccgactgatagcaccaatgaaaatgctcctgtctgattgcttctatttcttcttgaagtatgaggcaaggtcatgagcctgagagtgaggatcaagagaggtggtgaggggggttgacaaggaaacagaaatactcattttagagagcgggagagctttcccactctctcccagtggttttgctaccaggaagacttgagcacccatttgaggtttgagattgtaagtgtatagtgagacccccctccccctcagcatcagcttttcttctccac

SEQ ID NO: 61157 - DNA, 1063 bp, Bovine  19866880519411
  misc_feature (1)..(1): n is a, c, g, or t
ncaggaggagaaggggatgacagaggatgagatggttggatggcctcactgactcgatggacatgagtttgagtaaattcccgggagttggtgatggacaggaaaggaagcgtggcgtgctgcagtccatagggtcacagagagtcggatacaactgggcaactgaaatgaattgaactgaaaccctaaccctccacaaagtccccttctccaagtaccatcaaagtaggactttgacagtgtgaatttgggggattctttcttacaataattctttgtgtaacactggtgaacctcatcagataacactcgcctagacttaaactatctagacacagctccattaacttttcttcagaatgggagaaaggggaccagacatgaagatgataaaggccgtctgcttctcagtgaagaccaccatccctggtggagagtaaaacacaaatgcaaaatgttcctttggttccccagaggaaccaacatatcaaaagccagcaagtgtttcatccaaagataccaaattgccgagaaggtttccagaagggttggcaagggcctgccacagaagcccctacttccccaggagcggtggacctgaggcatggagggcctgggaagtgctcaaagcagagaatgtctctggtacctgaatcccctctgagaatgagctggatgctttgggaagatgatggatgagcctgagtcacataactggaacgaatccagaggcaggaattagacaatatcaagtcctcttgcttcccttacttgttctgtgtgaccacagacaagtccctttacctccttgagccttcctcttttgtaaatgggagaaactccagcctgccttgtctcctccttgggctcttgtgaggatcgaatgaccatgcacaggatgacactttaattgaacattcagcatgtgctggacatgtcgcttcctttatggcacttattcctcataaaaaccctgcagtggtagagatcatcaccccaggccatagctgaggaaacagagggcagtggggccatgcaactcccccaagatcacatggctaat

SEQ ID NO: 61158 - DNA, 704 bp, Bovine  19866880662296
  misc_feature (1)..(1): n is a, c, g, or t
nacctgggccttgtttctcgaagccagaggtgtggcagacaggacaaggctggaagaattgtttgcgaagagtagatttccatgtgcttttttcctttcttttttttttttagctagcaccacacctgttgtgcttttagagtgattgaaaatatctcactaatccacatgcagtatttattttttttccttccaaagaagaaaacagttttttcttgctatcacttctctctgacacagctcagcccgtgataaagctttgtagctggcaggctctgttttttcttgtctgtggctgtcagctgtccggtaaccatctatctttctttggtctctactctccatttttttcttgtaacatgaaaatctttgagaaaatacacttggcactctatttttcaagagccttacaaatgctcatttcccttgactcaaaaatcccatccttatacaaactagcatactgctgctgctaagtcacttcagtcgtgttcgactctgtgtgaccccatagatggcagcccaccaggctcccccgtccctgggattctccagcaagaacactggagtgggctgcaattaccctctccaatgcatgaaactgaaaagtgagtgaaagcgaagtcgctcagttgtattcgactcttagtgaccccatggactgcagcctaccaggctcctccatccatgggattctccaggca

SEQ ID NO: 61159 - DNA, 867 bp, Bovine  19866880727393
  misc_feature (1)..(1): n is a, c, g, or t
ntggtgtgaagaactgactcctggaaaagaccctgatgctgggaaagattgaaggcagaaggagaaggggacgacagaggatgagatggttggatggcatcaccaactcgatggacatgagtttcagcaagctctgggagttggtgatggacagggaagcctggcgtgctgcagtccatggggttgcaaagagttggcacatgactgagcgactgaactgaaccaaaagggagaaaagtgtgtatgtatgcatatgcagtggggggaccaggtgatgcagtcaaacttcaactccatcgtcaggcaataagcctgcagcaatgttctaagttatttagcaaagccaggaacagcttgccttccttgaacctcacaaccaacaggactcctaatttaacaaaataaaaaactgtaaaacaatatgtttcctatttccttttgcagaggccaaaaggatttaaaacaatctttaaataatattcctcctagatctcatgattggacaaacacagacctctctctctaagaactaacagatagaaaaatcacctgagacatggaaagatccagcagtccagggggatctttttcaagaatcagaacagttacttgttaagcagatcccatagagcagaataaaaatttttttaaagtttcatattgagattcaggggcttcccaggaagtgcaagtggtaaagaatctgcctgccgatgcaagagatgcaagagacgtgggttccagccctgggttgggaagatcccctggagaaggaaatggcaactcactccagtattcttgccagcaaaatcccagggatagaggagtactcgtgggctacagtccatgcggtcataaaaagtcaga

SEQ ID NO: 61160 - DNA, 1431 bp, Bovine  19866880738483
  misc_feature (1)..(1): n is a, c, g, or t
naagattagagggtgcatgcaggcatattgggaaggttattgaaagcaaagctaaagagcttgggctttataatacaggcatcagggagtcattgagcaggcaagtgatgtgcacaaagcagtgttaatagagtagaaatcatcaggatgaactggacgtgggaccaaggaatgagccaggaggtgagttcggaggtgatggcactgggccacatgcgaggtcaggagacacatacttgagatgatggctgggaaaatggaaagtgaggaagaggtctaagaaatctaacaaaattctgcggggcttgcctgctgatgagctgtggggattaaaggaatgacatgcatcagagatgagtcattaaccatcaggtgtctgctgccaggatgggagctacaaagctgaaaagctccacagcccctgctcctataaagtatactatatagacagggatacccataggtggacataacagctcaggtgatagctgcttttgtagaggcatcctcaggcaccatttctgcatcggggcaccttgactcctatgaaaaagacccagccaatgaggacagtttcaagttcaccaagacccagacatgtgacaccagggagaaaatgatgacgtcagcagtggggtgacatggatgaaatgtactgaccatattgatgattagaagaagagccttccaggcagagaaaacaatatatacaaaggcatagagatatctcatggcatggcatgtatttttgaaaagtaatatcctttagtctttaaaggatagcctttaaaaaactaatattagttttaaaaaactaatgttaatctttttttttactgtgttgggtctttattgctgcatgggcttttctctgactcatttgaaaagaccctgatgctgggaaagattgaaggcaggaggagaaggggacaacagaggatgagatggttggatggcatcatcaactcaatggacacgagtttgagtaaggtctgggagttatggacagggaggcctggcgtgctgcagtccatggggtcgcaaagagtcggacacgactgggcgactgaactgaactgaactggacttttctctagttgcagtacacaggcttcttattgcaatggcttctcttgttgtggagcatgggctctaaagtgctcaggctttagtagctgtggctccccggctctagagcacaggttcagtagttgcagtacatgggcttagctgctccacagcatgtgacacttcccagaccagggatcaaacccacgtctcccacattggcaggcagattctttaccattgagccaccaatgaagcccacatggcaggctttaaacgccaagattttaatgctgaatacagtggagaagggaagaatagaaataggaaagtcttaagggaacggttttaggggaaacatca

SEQ ID NO: 61161 - DNA, 1891 bp, Bovine  19866880820820
  misc_feature (1)..(1): n is a, c, g, or t
nagccttagcgtcccaaacagccccacacctgcttgtgttcggttagagtgagaacagaaaaatacatggttagctactcctaaaattaccctcttgttggatagttacggatgtgaagactcagaaagaactttagagacagcgtttacaatgtagattttaaagccctctttatggtggttttgggtggagcttgcagaccgtctgcccagctgctcttttcctcatccactctttgggggctgggccggcggagggagagaggaggtgtgggatgtgtcaaggtcaccaccgcacagctgcaaggtcagcaaagtggggacggggtgctgcagtggcgtctctgccaagaagtcccagggaattaccatcttcctgcatgttcactccacgctgggacccggcagggacagcaaggcccggggatccatggcggtcccaaagccacaggcccgaggggaccagagctctttggctgaagcttagatgtgtggaagctccaccgacgggaacgcctcccttttgtccgtggctgatgttgaaggccaagcttgttgctgctgtttagttgcttggtcatgtttgactctctgcgaccccatggactgtagcccgccaggctcctctgcccatgggatttcccaggcaagaacactacagtgggttgccatttccttctccaggggatcttcccgacccagggactgaacctgggtttcctgcttagcaggcagattctttaccactgagccaccctacttctaaccacgaataactagaaacagaaacttagggattcattagaaattttggtaccagagcccttacaacgccaacaggccgccggttaaactcccaccttggcgaaggcatcccttccgtagctggcttcctgctctgtgtgctgcttgtcgatgacgtcgcggcccgtagccaccgtccggtagaggagggctttctccaccatgtccgtcttggtggacagcaattccgcgatgatagatacaagcttgccgtcctcaatcagagtagtgtcaccatccactacaaactttaaattcccctgtatcagaagagaaaaaccaagacacatcatttccactgagattctgaaaaacgatgtcagggaacgatttgccagtgtgagagaattcccagggaccttgtctgtagcacctatcttcctaaatacattaatatctcaacacataaaaattgagtgcttcatccatttcgtccttctccagacactcctctatctttcaattttcagtgtatgggttttgatggatggaaattttatatttttatgttgtcaaatctatgagtcatttgcttcagggtttctctttctttggtgtcatgcttagatcattccaattctgaagattttatgaatatttaatagatttttctattccttttatagttttttccctcctatttaagccttgagtccagctagaaggtatatcagtataaagtaagaatccaactttattttttcagatgattacttgctccaacaccatcaactgaatagtctaagcttttcctcctgatttgaaatataacctttattacacattaatttccaccaattttttgagtctatttatatgttactctttccagacaataaatattagccagttaccaagtgtccagcacatgaactagtctgttgattaatctggtgctgaacttatgcagcaagttttaaagcactgcggcttttactatcattttaaacggctggaattagttgtgtctctttcccccagctccccctaccctactattctcctttaacacattttattcacttttagtatatgcttattgttctagtaagttctagaatcattatgtcaactaaaaaagaaattc

SEQ ID NO: 61162 - DNA, 2106 bp, Bovine  19866880881166
  misc_feature (1)..(1): n is a, c, g, or t
ntctctgcatagaggggcagggactcagtggaggggaggggcgttgcagtaccatattatatgctcaaatgatgctatgggttcctttagcgacccatgaatataaagggaaaagtcaggtgaatctctctctagctggaggatcttggataaggacttagcctcaccaagccttgatttctcatctacaaattgggaagaataccatctacatcggtgggctctgtgagccctgaaagacagaaggtctacaggggacttccctggtgtccaatgattaaagaccccctgctcccaaagcaggggccctggtcagggaactagatcccacgtgctgcaagacgtcacacgccacaaggaagattgaagatcctgcatgctacaactaggacccagtgcagccaaaggatttaattaattggttaaattattattcagaaagatagaaggagtataaagcaatcagcacagtgcctgcctcgtggtaatgcccagtgactggacattcttctctcccttctgaaaaggaacccaaagatgaatgatattaatgacgtcctaaaagagactgtggcctcttggttgggatgcagggacaagtggtggccaaggggctgcattcccctcatctccttggttcccaaggactccacagcccacacggaggtgctttcctgggtacttggttgaagtcaccttttaaatctccctatggggtaaaagcacagtcacgcatctgtccttggaacataataggcagtcaaaaattcctgttgcaaaaaaaaaaaaaaattcctgttgcaggaagagatgagtgaataagcatttttcctaataagatgcaggcctcgccttccaggagctgaccatctatagccccctcctcatgcatgcatccctctgccatatttaattctcaaacgtgttgattgacgacaacttcagaaaacaaatggaaaccaccccccactgaaactctcatacagtgctaatgggaatacaaaactatacaaccattttggaaacaacttggccacttcttaaatagttacagacacacttacgatgatatgattcagccattcaattcctatgcacttacttaagagaaatgaaaacttatccgtacaaagactgatctatacctgctatagtagtagctttatttgtaatagccaacctaatgtctatcagtagttgaatgaataaatcctggtatagctgtgcagtggaatactacacagcaatgaaaagggttgaattactgataaccttccacccctccttccaagaaaagaaaacaaaaagcagcttcattttgtttactgaaagcctggtaacccatttaacagactgttttcctccctctgtgcaaaatgtgttaaagcagggtcctcaacctctggaatctaatgcatgatgttctaaggtggagctaatgtaataataatagaaataaagtgcacaagaaatgtaaggcacttgaatcatccagaaaccatgcactcccctggttcctggaaaagttatcttccacaaaactggtccccggtgccaaaaatgttgaggaccgctgtgttaggagattttgatagagaaagccagagcaaacaaaacagtgggctttaacatgtccattattttgaaaacagccaaacgagaaatttcagcaaatcactggaaggaaagttcattcaactcagcggaggggaaaggctgagttttagaggaggtttggagcaataggatttcacttcgttcaagcataataagcaagaagagacaaggaagccactgcctcagaaaagccctaaaggtcaggattaatgaaggcttggaaggtttgaagcttacaggcccagtcgtgtgctggtaagtggatatttctacagtccttaagggagcttatacataatttattttcttaagtaggtccatgtgtagaaatgttgtttgcactactaattgggccagaaacctgtgtcttcagggatatcttctgtccctaaccttttccattgtgcatttcctggactctgaggcaggctgccccaacaggtcacgctgggcctggatgctgggtacccaggccagcaggcattgcta

SEQ ID NO: 61163 - DNA, 1933 bp, Bovine  19866880957191
  misc_feature (1)..(1): n is a, c, g, or t
ngaaaagactggtgaggggaggatgggaaatcattagacctgtgtggaagtgtctcagtctgggaatgaatgttgaatgaatgccttagtatggcagcctgggagaagacgggcactggaaggaagagcttaagaccagcttcgctctccttgcccttccatttgcagtggggcaggtcatgatgtccaaacatccagcagtctccaatagccagtggacccttagaaatggggagggactcgcaggcagagagggcttccccagtggctcagcggtaaagaatccgcctgcaatgcaggagatttgggttcaatccttgtgtggggaaaagctcctggaagaggaaatggcaacccactccagtattcttgcctggagaatccaaaggatggggaacttggtgggctatatagtccatagggtcacaaaacattgacaccactgaatggacacacgcatacacatacacacgcacatgtacacacacacatacaagtagaaaggagagaggaggagggggacaaaaataattgcaccccacatgttagctctataatagaggtctaagcattagtctcattttgctgatagagacattgaggcttaaagaattcaagtacctcatcaagtcctatgattaataagtgataggaccaagatttgaatctagggctttctataccaaagctatgcactgtttcaaccctacagggaaagtagaattcttatagtaagctccaaaaaggagatttagggagtttgaagaatctcccaatatcatggtgaaatgtaactcagatggtaaagaatgcctgcagggcaggagacccaggttcgatccatgggtcaggggagatcccctggagaagggaatcgctatctactccagtattcttctggagaattccaaggacagggtagcctggcaggctacagtccatggggttgcaaaaagttggacaccactgaacagctgacaccttcactttgtcacgtgaatgggcgttgtttctgcagggtgacgccatacaacctgatcagactcagagtgtttctgagactcgtgggaggttaggagttgctgaggtcctgagatgcagagagaagttagcaattaaggatttcatgaatctgctctctgctggctcagcaaaggtgcaagatgtagtcccagtctgtgtgagcttacagcaggacagctacacaatacattcattgaagatggtatatgtgtctgactctttatggactgtagcccaccaggcttctctgcccctgggattctccaggaaggaatactggagtgggttgccatgccctcctccaggggatctttccaacccagggatcgaaccctggtctcttatgtctcctgcattggcaggtgggttctttaccactagcaccacctgggaagcctcataactaagaattcagtgtatgttttggacagagcagctcagcaatgagggtgataaatgatgaagaggagcaaacagaacctaagaaggctcagtagagaagaaggtgggtcttcacctagactttgaagaatggatggcatttgggcaagttttcagcccactcctacttggaatactagcattctacaagctcagtgataggtttccttcactaaaatagaaaaatagacattccaattcccagaacacattagcttaacatatagaattttttctatgttgtgttttttcttaaaaaaaaaaatacacctttcttaaactttgggtgcctgctaccatttgccagctagtgagggctgaggggaacagacagaatgatcaagtggaaataaatgctaatgggaggccaggaatgtgttttcttcaaaatattttatgtgtgattattcttcttttgagttgcagagacctacgtacatacactatggtcatatttcctgctagaaaa

SEQ ID NO: 61164 - DNA, 1535 bp, Bovine  19866880998615
  misc_feature (1)..(1): n is a, c, g, or t
naaatgaatgaatgaccaaatgaattaatgaatgactatagattgttagtggagaaagtcacaccactgcatacatagcaaacctttatttcttttgggctgaggatagcagcttgaattagccaatcacgagaagatttaaagcaaaacaaaaaaagttagaaaataaaaagcaaatttccagtttataaatcaccagaactcctgactaccaaagtgtttccagatagaggtcttgccagagaggctgtcatgtatagataaggctcatttgtaattagtaagtgtccatttgcattccaatgaagtaagatgttcaagttcttacaaacaatctattctctggagaaggctaaacattactcttgtaatcttggagattagcaagtttttttcttggtaacattttttgtgcattccttcaacaaatatttattgaactcttatcctgtgccaggtactattttgagcactaagaacatagcagtgaatagggcacgtgccccgtacttatataaattatgacagtgaagggagacagtcaataaataaataaaaatggaaatggtgatagtggagaaatggtaaagctagcttaaaactcaacattcaagaaactaacatcacagcatctcatcccatcacgtcaaggcaaatagatgctgaaaaattgaatcagtgatagactttatattcttggtctccaaaatcactgtggatggtgactgcagccattaaattaaaagacactttcctcttggaagaaaagctatgacaaacctagacagggtattaaaaagcagagacatcactttgctgtacagtcaaagctatgggttttccaagagtcatgtatggatgtgagttggaccataaagaaggcagagcaccaaagaattgatgcttttgaattgtagtgctgaagaagaatcttgagagtcccttggacaacaaggagatcaaaccagtctatcctaaaggaaatcaaccctgtatattcattgaaagactgatgctgaaactccagtattttggccacctgatgcgaagagatgactcatcagaaaggatcctgatgctgagaaagattgagggcaggaggagaaaggagtgacaaaggatgagatggttggatgtcatcaccgacacagtggatattagtttgagcaaactccgagagatagtgaaggacagggaagcctggcgtgctgcagtccatagggtcacaaagagtcggacatgatgaacaatgacaaacggtggagcagagattgaaaccaggatggtgtgcttatgagctatcgggtggtcaggccagggggagaggcaattccagagagaaagaagagctggtacaaaggtgggaaagagattggcagagccaattatggacatgagggaagagagacgaaaatgaagttggagaggaaagtgaaagctgaactatgtatggtgttggaatccttgggggaaaagcgtagattctgtttcaagtgccatgcgtgggttgaagcgggagtgatgtgatctgttat

SEQ ID NO: 61165 - DNA, 2160 bp, Bovine  19866881000282
  misc_feature (1)..(1): n is a, c, g, or t
ncagctactccaagtctttttgagtgggggtatctcttttctgtagttactgctctctacatacacctctaagggactgcattaacctggggtcctctcacccccatcagggatgtgattaacacacaaagggctttcataaaattgtgctggtcatttcactgcttcaggtattttctgtgtggtgatacacacacttggcctttgggatttaactattctctacttcagttctttggtttgactgcagagttataatatttatgctcttttgatctcaattaacaaattgatttggctgctcaatgatggagaacattctgttcattctgttttcctttcagaggcttgggagacagatgctctggctttttgcaggatgcctggtgactttattccttgcttttgtgtctctgctctctgttctcccagttttccttttttctctccctttacctctttctttccttccctcttccttcctttctttctcctctcttccccctctcctttgcccaactagctataaatcagagatcttaatgatactgatttgtcatggaaataacgtactatttgggataaataagagtttatcaccctatgaaagtgttagttgcttattagtgtccaattctttgcgaccccacggactgtagcctgccaggctcctctgtccatggagttctccaggcaagaatactggagtgggttttgccattttctcctccaagggatcttcctgacccagggattgaatctgggtctcctgcattgcaggcagattctttactgtctgagccatgagggaatcccaagaatagtggagtgggtagccagtcctttcaccaggggatctttcccacccagggactgaaccctggtgtcttgcactgcaggtggattttttaccatctgagtcaccagggaagctcatcttattcctctatgaacaaccatcatttggggcaacagagtgcttgtgctttgagtcattttgtaggagggctgactatcccgaggtcgctgtgctgtgaggtcaggtgctgaccttctagtcagcagctctgggatgagccctcccagcctcagcaccagatgagtgagcatatgagggtcccaaagatcctcagtcactgggtaactcccagcttttgtgacttcccaactaaagccctgcatactgtggagcaaaggtaaactggccccatggtgcccttttcaaattctggacccacggattccgtgatcagaataaaatggtcatatgctactagatttaaagtagacaaccaacaaggactgactgtatagcacagggaacttggcacaatactctacagtaatctaagtgggaaaagaatctgaaaaggaaggatacttgtatgggtataactgaatcactctgctgtacacttgaaactaacacatcactgttaattgactatactccaatataaaataaaagtgtaaaaaataattaaatggtcatatttttttttaactccactaagtcttagggtggaaggtagcacccaagcaacaggtgactgaaatccaaatttgggagctgtgaggtgctcctgtagcagaatccttaaacagttggccctggctttgggaagtgggtggtagctggaagagccttgaggagcctgctggtggaatcacgatgggctttaaggaggcggtcacgagggcctgaagggaagcaaggaaaatatgatctcaagcacgaggcaaggaggcttttatcatgaagtggtggaaaacttgataaccctgctgcctatgggaaggcagagaacagaagatgtacctaacaaactggtgctcaagatacggacttccagacaggatgccggacgtgccatctggctgcctcttgctgtctatgaaaacacgtgagaggagaagcatgctcttaatacagagctgcttggctctcatgcaaagtttagaagaaatataaaggagcttgcacttgctgggtttgaaaataaaactgtttcttattctcagcttctccagatggcaaatgattctcaaattaagaaatggtttcagggcaatgatcagatccagagtgggtctgtaaaaatcctttgtcaaaacctcagaaagatctaaggcagtacttcatagaaatctccaggcaga

SEQ ID NO: 61166 - DNA, 1156 bp, Bovine  19866881037774
  misc_feature (1)..(1): n is a, c, g, or t
ncacccagatgctttggtgaccaccccccttattctcctggggaaatcaaagagtattaccttcaagatggcgatgcagtgggacatgagacccctggggagacaagaagcatttgtcagggcttatccagagaggcccacctccctccagccaccacctccatgcctcctccagctctgacccccaggcacggctggacaccacctgagagccgggacaccttcagcggtaaaatgaacaggcccaggagctaaagcaggaagccctttctttcccctgtcttcccctttcccctccagcacccaacagactcctccagctagtgccacaacctgagcttcggagactgttccctccacccagggaatccttccccgtatcctctgcctggtgaactcatcttttcaagtcctgaagagattgccctggcggtccagcgattaagacttcaagcttccactgcagggagtaggggttctatctccagtaggagccggagagaagctccccatgctgcaaatgcagccaaaaaaaaatggaaaacaaaaagacctgggacgaaaggcgcccactctgggaaagcctttagaggtccaccccgctcctctagcccagcaacttcatagacgccgcctcctccgtgtgctcactgcacctgaagagacccacccccttccctccatcatttccaaaatagtcttatttagtagaattctgtctccaccaccagtttcaaagctgcattgtctggcccagagcctgcacatcacaccgggttaacaccccacccagtgaatgaagggctgagcgacagggaagggggcaacacacacttctgaacccgcagcggggtggagggatccccgagggaccctagagacaaagactgcatccctggagcctgagggccatattcacgggcacctcaaggataacccaagcacatcacggtgactttataacacctctgccacacatctacaggcctcagtgtttgggtctgcaaaatggggaaagtgaggacagtcaccgtggtgtcacactctaggtccccccacagtgagggtaggggaacgcagcaatggacacagtgctccagggtgctcagccaagctcgggcaaaggaagccaggaaaggggacccaggagcccaat

SEQ ID NO: 61167 - DNA, 733 bp, Bovine  19866881054916
  misc_feature (1)..(1): n is a, c, g, or t
nttaactcaggcgaggatggcaagcctctgctcaccacggtcaagggggggacaggcaacgggctggagatcatgctggacattcagcaggatgagtacctgcccatctggggcgagacaggtgagccgggccaggggccagggcagggggtgagggcggaggggagcggcctctgggagacctttgcctggagcggttatcttggcccacccggtgaagggctgctctccatcaaggggtgggtgatatgctggtgagtcggaaggacgtcccagcacaaactgtgatgccctgagttttccttggatttcactaggtgggagggggctggtgatgggatactggaaagggaaggcgggtaggatgagaagaggtgcggaggaagccttgaattaacaagtccggttggagcggtgggtggcgcaatttcagaagaggaagtgatggaccagccccttccgcttccaccatcttgcatatcccaacccggctacagggcccagtggaaaagaaagcaggtttctcccgctgagggaaggtggaggggctgctggaaaatggaagggcacagactcagcctgcgtgagcccatgggggacccgggtgtacaggtcccaaagcttatttagtgcatccaattattcgtttatttattcagcaaactattcataagccacatatgctatctcgggctttacaccaaaataaggatattaattaaaaaagaccaag

SEQ ID NO: 61168 - DNA, 1060 bp, Bovine  19866881109471
  misc_feature (1)..(1): n is a, c, g, or t
nttgagtttcagacactgatgacacttgtaagtaaacatgccgtcgatcactggagtctaacattgtataaaagagcatagcattcagcacttaggataaaaatttaggagcagacacatgtataatttgaggctgaaattatcagtctagagggagaaggggcagatgattcaagaacatcatgcttaaatggtggggaaaagagattgactagaggaaatggaatgaaaaagaaatctccgctctttctgggcctccgctttctcctttctcttctaatgtgccaaatgagttctaatttctctccagttccataaggttatgaattattccaggaaggaaaagaactctggaaacactgtgtttcagaatcaagttggaaagttttcagaaataagggtaatcaataaaaacctaactactgatcccaccctttgctcctctcgttctctgctcttccttcctgcttttgcccagctgcctgtcctgtgtcagtgagcttttctggctccggggaacagattgtgattgtgggaagggggagagagattccctctgttcctctcgagtatctgtggctggactaataataaagttgacacaagacagattaacaggaggaaacccaacttagttttatgggcatcaggcagttcagtcgctcagtcatttccaactctttgcgaccccatggaagcagcatgccaggcttccctgtccatcaccaactcctggagcttactcaaactcatgtcctttgagtcagtgatgccatccaaccatctcatcctctgtcgtccccttatcctcctgcctttaatctttcccagcataagggtcttttctaatgagtcagttcttctcatcaggtggccaaagtattggagcttcagcttcagcatcagtccttccaatgaatattcagggttgatttcctttaggattgactggtttgatctccttgcagtccaagggactttcaagagtcttcaccaacacagcagtacaaaagcatcaattcttcagcattcagctttctttaggtccaactctcacatc

SEQ ID NO: 61169 - DNA, 1502 bp, Bovine  19866881157298
  misc_feature (1)..(1): n is a, c, g, or t
naacttagaaaatggtgagagacagggaggcctggagtactgcagttcacgagatcacaaaaattcgaacacagctgggcgactgagcaacataatgcattccaataaccatgcccctgagcagcagggatttggggataagcaggaatgtcaagggctccagtgaagcctgatgaagcccacaactgtcagctcctacaacaggattataaaaacagaaaaatcatactgacttcaatgggccttccctcccagcaaactcatttcgtgggagaaagagctgatagttggcagtggtggtcacccaacagaaatgcaggctggctggtgcccaaaggtcacaccgaaggccaggaagccaggtgtggagcgacagatgttttagccacaaacaggaaaagggaaattttcttaaaagcttatgattgggaaatcacaatgctaaatgtgaacttcttggtggataggtcacatggggcagttcaggaactgccttgtaaatttgttttttcagccaagagagctcgcctgattcacgagaggtcatgtcagtgtagctctgacagcaccgatgctgtggggcagggtttaagagcacaggggctggagccgggctgcctgcactgaaaggctgctctcctgcttaagctgtgtggcttagggtgagaaactcaagctctctgtggtcaggagtcctctcctttggagtagagaaaacagcaatattcatatgtgcctcatcggattattttgagggttaaacatttagaatgtttatgacacttttttttttttctgtcgttttttgggtttgctctcggtggtggtgctcagtcgtgtccgactccttgaaaccccatggacggtagcccaccaagttcctctctccatggaatttttcaggcaagaatactggagtgggttgccattccctactccaggggatcttcccggcccagggctcaaacccagatctcttgcatctcctgcattggcaggcttggtttactctttatttacttggctgtgctggcacagcaggcggtgtcttttgttgtctttgttgtggcacgcaggcggtgtctttagtggcagtatgtgaactctttccttgtgggcatgtgggatctcgtttcctgaccagggaccaaatccagatcccccacattgggagctcggagtcttagccactggaccggcagggaagtcctgacacttgtttttaacgtaagtcacttggaacatgtcctagtgattaggaagacctacatttattatacggttattatttttcatgcttttgaaagcagcaggatgggaaaggaaaagcttagactttggaatgagttagagctgagttcaactcctttcgacagttgtaaaaagagggtaaaaataccacacgccccccacccccaaggctggaatgagaaattaaatatgtgtctggttcagttgcctggcatataggaatattcaggaaatcttagttcccttctcct

SEQ ID NO: 61170 - DNA, 614 bp, Bovine  19866881221100
  misc_feature (1)..(1): n is a, c, g, or t
nttaccgtgttgcaatcagcacggtatttgatgcaggataggacagaatagaataagagtgtacatgttttgtaaaggtaagtgtttcataaattttatctccccatctatttgtcatctatctattatcatctatgtctgtctatctgtcggttttgacttggcaggtctggccctttgctaacatcttggggagaaagagtgtagggaaaaggcagagacgactcggccatgtccacaagaccagcttttaatatgaccgtgattggaagcacgaataaataaacgccagagaaaatggaaaaaccaaaccaaagctcggaacatcaaaacccagattcagaaaacgaaaggaaacatatctccgacaaacaaacaaatcaacaaacaaaaagctcgccccaccgcgaagagacagaatcagactgtacaatccgtgtcacagggagagccgacggcgggggccccgcggctgtgtccccccggccgccgcacctccgtctcgggcccctgggaggggaggagggcggccccgggcaccctgtgggccggcctggggaggcggagggcggggtaggtgggcaggttaagaaccttcacgaacgacaagagga

SEQ ID NO: 61171 - DNA, 1057 bp, Bovine  19866881285258
  misc_feature (1)..(1): n is a, c, g, or t
nctgtgctgaagaatatgtggcctgaaggcaaactgagcattacagaggtgaccaagagaccactgaccgctgccaccttatttaagaattctatgattgctctggtagacacccttgcatcaaaggtaattactttcattttaaaatacccgttttatttcatggattctctcttgacatatgttaatgagaaaggtatgtatagtatttgctttttaggtaactatagtaaatcaaattgaagaacatgtattttaaatgaatgttatagtaattcttaatactgttttgtttgttttttaccatggcctggtgaaacagttgtttgtgtcccagatgaatgatcttaaatttaggccttttatattgttgtcatcaatgggaaagtcttatatgtgatcttaaaaaaataaaaacagtatactacaggtatagtatgtgcctgataaaagaaattttagccctgtgctgaggacaaggcctggctttaaaaaaaaaaaaatcttgagttaaattgtcacgtaccatccttatgttgtatctgaatacaaattacagatagagctgtaagaggaagtttagtatttaagtgttgcccttaggctgttttaatagttgaaatgaaaagatgtactatgggcagtcgtttctgctttttattgttcctttgaggcctcatactgtttgataactttagtctgaggtttttttccccttgaagaacagatttctactcttaactgctgctgttgatgagtttgataaattaggcagcattctggggctcattatttttagttccttcatttttatctttctctcctggtgtttttccagtgtattttttcttcttcatttttatcttttttttttctttaatcaacttcctctctaaaaatttaaatctatattatttttggttacttcactgtggataaattaggcaaatgccataagaatacatctcttcagtagctttctgttcttttcgtcaggattctttgacctcaggtgacaacaaataagaacagtgtgttggcttgtataatcaaacct

SEQ ID NO: 61172 - DNA, 899 bp, Bovine  19866881345071
  misc_feature (1)..(1): n is a, c, g, or t
nattagttggccttttgtgaagcccgatgggaatcttattagatccttccccttcctcccttgacacttggttcccacatctcgaccctgacacttactcatccgtgtgacgtggctgagttatttactctccctgcgcttcggtttcttcacctgttaaaatgggcatcatcccgtgttcttcagggccagtgaagggaatcaaatgaagtgatgtgtgtgaaaagcgcttggcaactataaatacacttcggagttgctgttgatggggtgagagtgaatatcaaaggtagagaaaagcaaattgcaaagcagcgtgtgtctcctctttgtgagaatgaggtctggaggggctctaatccttagagattgtgctttagggccttgggaagatggattccagagcctctgaaatgaattggaaattggaatgagaatgctaaagcactgctgcagttttatttgcatagggtcagggagcaggtgctggggaggagggcgagcctgggaggaggtgtctgttctcccaggtggaggtgagggcagcagacaggacggccgtattcctgggagcctggaaggtcccagacagtggagaaatgggagctggcaaaacatgcatgcaaagaagtctcctgcaacccacactaaccctctctgcctcctcttgaaaaataaaagtgaaagtgttagtcactcagtcatgtctgatctttgcgaccccatggactgtagccttccaggctcctcttgactatagaattctccaggcaagaatactggagtggggtgccatttccttctccaggggctcttcctgagccaggcattgaacctgggtctcctgcattgcaggcagattctttaccatctgagccacctaagccaaactagatggg

SEQ ID NO: 61173 - DNA, 1086 bp, Bovine  19866881348825
  misc_feature (1)..(1): n is a, c, g, or t
nacccataggggaattcatttccctgctagtgaaagttaaaaagaaggaaactctctgtagggacagcagtgtcattgtcttgaaagatgccctctgttctccccctccacccccaccactgaccctctgctagtgacactgaagaaatttctaggccaggtgagtggctgggactgataacttctcagaatccttaagtctctttttcttcccaaaatgaaacagagggactccccatggtgatcaggaagagaacatattcctagcttcagaggacaaattcgttgttggctttgaagtatattttcagaaaatcagcctcattcatattagcattgctatggttattataactaataataagatatttggttaaacattttacagtcttcaaagcatttccacaccatctcatttcatcatttcattcatattaacagagaaatacaaaaacacatcccggagctaaatctaataatcattatgtttacatgtatataaaagagcatattcatgggaaataagactcgaaggaaataaggcaaaatacccacagtgaggggattatgaatgatttattttcttgtctgggtttgccacatattttataaggtggctctgttttatttatttgttgagcaaatatttgttgaacacctactatgggtgtgaagcgatggggatacagtggtaagaaaacagaccagtgtctgtcctcacaaaacctacatattagtggtttctttcatacagaacaaaataaccactaaataatcttaagccgagtagaatttggagactggcccctacttgtgtgttctgccgttggttctaccccatccagctgaccctggttttccaacattggttctaagatgtgtggtctttcacattttaacatttctgaaactggggcttgtttcccaatcaattgcatgtcagttacaattagcagctttttcttttttcttttgattttatctcttccccattatttgtttatttatttggcggcgtcaggtcttagccgagtcaagcaggatctttcgatgaggcccacagactctctagttgtggcgtcaatg

SEQ ID NO: 61174 - DNA, 976 bp, Bovine  19866881474078
  misc_feature (1)..(1): n is a, c, g, or t
natttgagtttgatcccctggattaggaagatcccttagagaagaaaatggcaacccactccaatagtcttgcctgggaaatcccacggacagaggagcctggcagactacagtctacggggttgcagaattggacacaactgagcgactgagcctgcacacacactaacaggaaaggaatcaaaaccaagtaaacagaaaagaaactttgaggaaatagagataatggttaatggcatgagttctagagccttggttcaaatctcagctattcagcttaccagctgcgtgacctcagacaagttacttagcctctctgagcctcagttccattatctctaaaatgagaataatattattatctattctttaaggttgttaggaaggtagatatgggttcatatttttgtgaaacacttagcaaagtgcctgaataatatcaggcactatgtacgtgtctgataaataaaaaataaatgcagaaagcagaaggaaacttcaaaacattttaattaaaattctcaagaggtaagagatgatacctgcatttgtaaacaccagctattaaaattggatgctattaaaaagtaacatccaaagaaaaaaatttttttaaacctactgaaaattaaaaatatgattgcaaacattttttaaacccacagaaggattggaattgaggaaattgcctgaaaagtaaaacaaaaaagacgaacagatggaaaatgggagagaaaaaaatgcaaaaatgagaaagcaaaccgagaaagctcaacatcctacaactaagatttctagaattacaaaagtgagagtggagaagaagatgttgccaaagaaataaaataagaaaaattcccaactgacccacatgattttccataatgaaagaattcactaagtcctatctgcaataagtggcaagagaaccagaccaagatgcatccttgcaaaattcaggctcacaaagagaaca

SEQ ID NO: 61175 - DNA, 941 bp, Bovine  19866881840525
  misc_feature (1)..(1): n is a, c, g, or t
ntgggattttccgaaagagtctggcatgtgttgcctttccttttccgggtatcctcccaatccagggatggaacctacatctaatgcattggcaggtggcttctttaccattgagccgcctgggaagcccaaaagatgctttaggataacttaaacctgaaggcagccagtgggggaatctctgctgggatggggtcaagaatctgagcttgctttggggaaaccggaaagacttgtgttgagctcagcagagaaataaagacccaccaaatgtcaacaagggccttgtctgccctcataacctttttttttgagctgctgtttcttcttctccatttaaaaataaaagtcaagtgggaaataacaaagcatacagtaatataataataagctgaaagatgactcaataaaaagaagtgataaaataataaaagcaggctgatacagtaaaaaaaaaacaaaaaacccaaaactcaaccaaacagaatcaccacccagggccagacaataaaagcaatagctaagatgtactgatccaactggtgatcgtgacagtgaaggaggattattctcattttacagaggagagaaatgatgcttggggagattacgtatcatggttccagggggtggggcaggggaatgactccatgtgataggtgaggaaatggaggttaacccaacaagaataaatagccagtcaggggcagaccaagacactgagctcaggttttctagctcaagtccagggaactttcacctggacagaggccaagccttggtggtatattggcatcatcagggaagctctgaagaaatcctgatgctgaagaggtatttcttcaaagaagacatgcagatggtcaacaggcatatgaaaaaatgttccacacctctaattattagagaaatgcaagtcaaaaccacgatcacacctgtca

SEQ ID NO: 61176 - DNA, 1104 bp, Bovine  19866882007108
  misc_feature (1)..(1): n is a, c, g, or t
nacatctattgaataaagaaagagataagaagtggaccagaaagaggtgctgtcagtgatggggtctggggctgtccagagggtgagcccggggtaccaggaggggtcccatctccatcatctcttgtgagcttagtgaccctccaggggctccatcttccctgtacaaagtacctctaggaagctgtcctaaataattcttgtgtttctggaatatgtctgaaactcctcataataaaaagtttgatgaatcagttaaatcgtaaatgaggggatctctgtcatttgccaagccagtcctgagcaggtgactggagccctgacccaaggcaaggccaggccgtccttctcccagtacttcgcagggaagatgaggcattggtgctctgaggcaggggcgtgcaggaaaaccagccagggccttaagccaccaatatccaggacttccctggtggtccagcagttaagaatccacatgccaatgcagaggacacaggttcgatccctggctcgtgaagatcccacatgcccagggggaaactgagtctgtgccccacaaccactgaagtccatgtgccctggagcccatgctccgcagcaagagaagccaccacactgcaactggagagtagcccctgctcacccacaactagagcatgcccgtacgcagcaatgaagaccctgcacagccaaaaataaacaaaactgagagaaaaacaccaacgtccaggggcctacaagcagactagctgatcagagcctcttggagcaaggactgaccactgcttttcagatgctcctctgacgattcatgtgctcaatcacgtgtggctctgtgggaccccagaaatgcaggcaagaagaggcagggacacttacactcaccaaacccagaggtttgatttcagctgtcaagctgatgctggtacactttaggctgaacaaagagatgactggctttagcccacttcgggttgtttcaccactgttcatagaacctctctttgccttaaaaagcccacgggtccactcctttgacagtcgtttaaaagaaatctgtaactgtctaatcagggcatgaaccatttttcagacttgcccagg

SEQ ID NO: 61177 - DNA, 3541 bp, Bovine  19866880415225
  misc_feature (1)..(1): n is a, c, g, or t
ncctgctcccctctctgtctgggaaagtgggttaaaaacctttttttgcctccagtacgtgattcatgtctgctcctcactggctgccacatgcagagttggatttggctccagcagcagccctgtctctaacgatcactagcacctgcccaaagggcgagaatcactagaaagaatactaagccctgtgttttgaaaaggtgcagactcacaagaaggcacgggcctgatttgctggaggaggaggtaaggaaggaggctctcctcttccctctctccttaaatatactcctttaaagctgacatttaaatgtctgtccccctgacaaagctgccacccactaatctccaacgtggagagccccaggtgccgtggcagtgggaagaggccaggcaggctttccctaatccatttacgtcactgatctcctccacagctgagctcggagggcggatgtgcagagttgggggtggggtggggagcacgttattgccccgccatccctctatccaacatgctaatccaagctctccacttgccagctgctcagctctctacatatgcctctaagaccagcctcctgcagcctcaggaagagagatggtttcccagaagaaagtctggcttgtccatctatctatcccctggggcgagaagggcactgcagcgggacctagacgctttctgtacgtgatgttatttatcacaaggaatctgtgaagaggaactgttgatcccatttacaggcaggaaaacaatccaagggaacccaagaaaaaaatgatggaatcaaagctgaagtccaggccctctcttgtctttcttttcttttttcttcctccgacttctttcacacttttcttaggactcatggactaggcattcccactgtgccacatttttctaaatctttataaccacaatgaaaggctgcttagtaaaggaaaaccaatgggacaagatattgattctcaaataggaaacgagacctctgaatatcaaaatcaaatatctcacacaaatatcaaatatggttttttcaagttattttatgactagaagaaaattgcattaaatgtatagaaaggctccagtaattagttaataccatcttttcaatatcgtaattgaatggaggaagggcagacttttcaacaaatagtactggatccatcatgaaaaaaactcacacattatacaaaaattaacactaagtggattatagattaatgtagaacatcaaactgtatgtttttagaaaaaatacagataatatttggatctaggactaggcaatgggctcttagacttgataccaaaagcacaagcaatgaaagaagaaattgatacattggacctcatcaaaattcaaagcttttgccctcagaacagtgctgttaagagaatgaaaagacaagctaaagactgggtggaaatatttgaaatacgtgtgaggtggtgaatgtcgccatgtctgctttttcactagatatatcctgtggcaaaattctaatatcaccttttgaatagctgcaattgagcagaagaacaatattttgcccatcacaggtttttgttcagggttttaaaataaggaggctgaaagtggggaattagtgattattgcacataatgtagatgacactttccaacccacgtgaataggaggagctaaatatatatgctgtgtgtatccacatttgcaatttactacaaaccaagcagagacaaatgaaaaatgcacacactatgcaaaagagggtaagacagggactttcctggtcgtctgatagttgagaatccgccttccaatggaggggatgtgggttcagtccctggccagggaaccatgatcccatatgccacagagcaactaagctcatgctgcaactagcaaagacccagtgcagccaaaataaaagtaaatacattaaaaaaaaattaaacgggggtaggatagtgcctagcacaaataggcactatatgcataagtattaacttttaggatcattactgggtagcaccaacccaatattcatagggaattaatacactgtatggaaatattataaaagttattatagttatagatgttcttagatcctaacaattctatattaaacaaaccaacacattgaaattttccaatgtgttagctggctgtcccaatagccagctaagagggtttaggcatcgttgaatgagatttctgctcctattttaattttggagcttccctgacagctcagttggtaaagaatccacttgcaatgcaggagaccccggttcgattcctgggtcaggaagatccactggagaagggataggctacccattctggtattcttgggcttcccttgtggctcagctggtaaagaatctacctgcaatgtgggagacctgggatcaatcccctgggttagcaatatcccctggagaagggaaaggctacccactctggtattctagcctggagaattccatggacagtatagtccaagaggtcacaaagaattgggcactactggggactttcacttttcataaggtgggaggagggggagatgcagtgcctgttaagcagacacgccttaagttggccggtggtcatggtcatttgtgtgtgtgccttctcctttgccaactgaagggacagagactgggcccctcactgacttatctgccagcagcactttgcacaagatgccttgtgtgtggttgctgctcttgtgtgtggtgtagataattgatgaaatgggaatgaaggtgtagacatgaatttgaggacaaataaataagctcatttcctatttttgcttttttcctgtccttaaaaaaattatgataaatctgtgcttaggcagttgagattccttccctatttactcagtcttttcaagacagaatttgtcactcgacctcagtgggtacaggggttttggaaagtgttgatcaatgtctggactgctttttgcatgaaataatgcaatcctaacacatatcccgcaattccatgtagaagagcgcagaggaccatagtttgtttagtgctttggccagttttttgttgtcaaaggatcatttttttttaaaaataaataaccatagggaactgaataggggaaaacatttcaagagtatattttattatcagtttgccatgaaaaactcaagggtctcttgacaacctctgagtttaatcagctttcagtttacaaatagttaccaagtgaaataacattatcccagggcagagcaatacctaatgtggattgtgaagatacagatgtcacatgaccagtgagtgttcatttcaacccttacctggggtttagagattatggaaaatcaatgcagaatagctttctgggctgcattcagaaatataactgggtgttgaatcaaaaaaagagatctaaggctgcagttgatccagtgctttcagatgcccaaattaaagtgtaaatggatgctgtggctgatagagttctcccctgacagctaaaaagccctgtataatttaaagccctgagttgcgca

SEQ ID NO: 61178 - DNA, 1625 bp, Bovine  19866880593484
  misc_feature (1)..(1): n is a, c, g, or t
nactctgcatttaacatctatttaatccccataacagtatgtggtagacatcatggccatgttttatagatgaagaacttagtggttggatgagctgcacttggaatctgagtctatctgattcttttttattaataaaaaaccataatgtattctcttattccgactatataggtctaatgtatactattcacatgatacaagtcatttattttctttgtatcattataaaaaatagaaaactgcctttcaacctgccatatattggaaaatatcttccttatcaaggctgaacttgatcagactgtatttttctaacttgaatgaaaaacaaatactgcttatgctgcttatatacttttttccccattaaaaaaaaatcagttgttttatctatgagaaatggatgccattcaactaattctttctcttcccctcactctaaagttcctaagagctctttcaaaagtgatactcatgcagcctgaattttctataaagtggttccatattttaaatacacctgagtgatgaacagatcactgtgtatggtagagtttttgaaggtaggccttgaattcaagtgtgtcccaacattgaatggacacagaataagtcataagtcatatatattgtatctttagcattatttttagattgttttagatgatcaggattttattaccagtgagtacatacaggtggtttagtcctaagttgtgtctgactcttggatcccatggactgtagccagctaggctcctctgtccatgggattttccaggcagcaatactggagtggtttgacatttccctccccaggggatcttcccagcccagggcttgaacccctgtctcttgcactgcaggccaattctttaccgactgtgctacccgagaagtcatacagatgcatttaaaatgttattaaattcatagcatatatttcccaaccaactacaatcactgttacgtggggtgtctgaaatttttttgatgtttaaaagttgggaaacctattagaatattttgcattatagagaaattctggagtgatttgaagaatagtgatttgactataggaaactctgtttccttagtggctgtcacctgaatcattcattaagtcgaagattttgctttattcatatttctcattgtcagcatatcttgaaaatgaggcaaaatcagatgtggccagaagataaaatgaattcatttgccataactgagctgtggtgtttgtccttaatccctgggtctctgccttattgaaaggccatatttattaactgccgtatgttgggaaaataagttatttctacttcagctgttccttttctttttttaaagtattttcattacaattcagattttcatgtgggaaatttgaaagtgcctgaatataggttaagaaattgtgattttacagcccaggaatattattacactttttgttgcgtttcattacagtctttttgcatcaactacctatataatatacataatttgaatgatactgcttgttcttgtgtatttatatatttgccagtcttttatgatatgtcaagatagtaagttatttatcgtgtttgttttgcttttttattcttggatcatctaag

SEQ ID NO: 61179 - DNA, 1374 bp, Bovine  19866880704231
  misc_feature (1)..(1): n is a, c, g, or t
ncaaaatgccctgtagccttggagacaccccaacccccgctcaggaagaaggttcaagttcagtctgatttggacacaccagccctgcctgggagaaggcagcctctggccacatccaaggcatatttgtgagtgggccttggcccacgtggcccaggtcccctgtgtgggcatatttggcccctgggactgacccccagatggggggatggtgcaggggctccttggggaggggtctcctggctgcagctgcagagggagggctctggtgacctcatggcagctcccattcccttctttttccgtgagtcatgtttctaaaagtggcccaggagcaagtgggagccagacggtggtggcggggcctgtgtggccaggagggagaaggagggggcagatagggagggtggggcccagaggaaatgggagagagacagcagaagggagagacagacagaggtgggaaggagacagaggtgggggctgcgaggaacacagactcaagggagagatggacatgggaagctgcggccagctaactgctgaagtccctttccagctttgcaggggatggggtggaatgttcaagatgtgagggtaaggaaaaatgtctccatctgggccctcccacccatttgctcctcttcttctttgactgtccctgaatgtccctgatcatctcttcccatgtctagggcttgcctgtcatctatggcctggtctggaggtaggtggatgcagaagcaccatccgcctccaggcctctctggcctctggggagaatgctgtgggacattctcccacatgtttaggacaagctggttcttcctcaacagatgtgggaggggccaaggcctgatgctcactgctggctatatgtgcttgagtgtggtggatgcaatgggctctgagggcactgaggatctggcctttggtgcccaggcctgggggccctgggactccaccctcaccactctgctcactgagccttgctgcccctctctcctacagctggcccctggcgtgaactcgggccagggcctgggcatcgagatcatcgggactctgcagctggtgctgtgcgtgctggccaccaccgaccggaggcgccgtgacctcgggggctctgggcccctggccattggcttctctgtggccctgggacatctgctggcggtgagctgggggaacttcccaagtaggagtgctggtggggagggtggagccaggctgctgagggtgtcctgttgagggcagggggtgggactctgacagggctcattccacgggttgggggaccagctgccctggagagggaggcacagggcctggctgaccatccttccaggtctgatggtcactgccctgtttccc

SEQ ID NO: 61180 - DNA, 1016 bp, Bovine  19866880780949
  misc_feature (1)..(1): n is a, c, g, or t
nacatgaattggctgcagtccattggagatgctgaaagatttcttttctttgtgcttctgagcttggaaataaaatgtcaaccctttcactgcccgagtgaaattgctgggcagtagagctatagttcagtactagcttgtgctgatcaaattcagctgccagggatggcagatgggagaatgcagcagtcacctgtcttcagtaagcatttgttttcagaaccattcaacattatgttagtggaaattcatgagagcctgatattctactatggcttgtgtgagagcaggacccttttataaaaccccaaatccttgacttgattagaatagaaagataatcactagattatagaactggaagactccttcatctgtagtggtcataatcactatcccaaaaggttgttatcaggatcaaatcaggaattgtgcatcatgtcaggtcgcacagtgtctaggtgaaggtaagagctccaaaaatgatggtggtgatagtaatagttgttattattcctgtttcaacaggaggtagaactttaaaggccatcatggaacttccctggtggccctgtggctaagactctatgctcccaatgcttcaggcgcccaggttcaatctgtggtcagggaactagatcctgcatgctgcaactaagatctggtacagccaaataaatattaaaaagaaaaaaaaaggtcatcatgcctggagttttcctggccaaatacaccttttcttccttgggccacttgtccctgctgtcacagaggatccaatgctgcctctagggcaggtcccctccctgcagtgactgtctcgccactttcaaaaaggagaccttcacctatttccgtttccatggagaccgtggcatatcctcctgctagcctgagctctagagccagctgtgaggcttcatagctatatcccggttggaggattctggaagaattcacagggcattagggtggacctgacactttgtataggatattccccctccctccagagg

SEQ ID NO: 61181 - DNA, 869 bp, Bovine  19866880862290
  misc_feature (1)..(1): n is a, c, g, or t
ntgctggtgagctgatgactgtcacggccagtctgctgcctgtgtctcctcccacctcaaactccatcttcccggtgggcctcctggagggaatgaagtcattgttccccacaactcagcccatgggtgggaaatccctgtgggcccagaagggagggtccatccgctccttccttctgccctgtgatccacagaagctcctggctctgagagtgacagcctcggccacacccgtgggcgtcttccccccacacagcccagggccaatccttggccagtgtgtgagtctctgtgcgtccacctctggaccaagcggaggtcttcccgctggatccggtggggaccgggaccagacggccctgggaacagccagctctgactggaaggcaggtctcctgggcatgtcaggaagaagaaagcacatctggaaaagcgtttgctgaggctgctgctccggcagggccagacagtgcccaggcctcaggggcgggggaggcgggcagcccccccttatgtaggctggctcaggcctgtgggttctggaggccgggcccacaccactgcccatgggagggccacggagcctgagccaggcctcacggagggggaactgggtgggggaagtgctctccttggatcccaagctccccagctggtggggctgcacgggtgactcccagcttctccacgtacactctctccttgatgctcccttccccatgcacccctgaccctaccagaattacgctgggaagttgcaggtggtcctctcacacctatctctcacccatcctattgcctgggaagctggcctccccagtccttgtacttgttcctgggctagcagaactggatttcctattaggggc

SEQ ID NO: 61182 - DNA, 1565 bp, Bovine  19866880886942
  misc_feature (1)..(1): n is a, c, g, or t
nactaagcacagcatgacaagaaaagaacagctgctggggctgtggaaaatactgtggagtctaagaaagtgaaatttaccaacatagcccatttttatatgaaatttattaccttaaaatatcaggaagaaaatgtatagaaattgcaaaaaacctaagtcataaatagctaactcataatgagaaaaacataactcagcagtgccaagatgtcttcctgcacattcttggatacattgacaaagggaggttattggaatagagacaagagactgtctaaactagagtagacagaagcaagcttgctagctggactttctgtcataaaggtgccccaaatatgtggaggaataccaattggctactgaaacaccctcagcccaacaccagtaacactgtctgtcctggatgcctgggatggccctcctgccataaccctcacctccttcttcctcaccctactctcatctccaccaccacttccaggaaatgcctgcgtcgacaatcaagatcttaccatcctcaaaacagaacatgaacaaggggaaaagatcattttgcagcagctgtgaaacgtcagctattcaccctttccgttcaaaccacacagtcgctcaaagctgcccatcatcccagagactacaactgaaggtaacaaacataaaacaaacttttttggaggataaaaagaaagatataatcatgtaagaaaggacttccctggtggtacagtggataaaaatctgcctgccaatgcaggggacacgggtttgatccctggtccaggaagattccaagtggcggggaacaactaagcctgggcgctacaactcctgagcatgcaccctagagccggtgctctgccacaggagaagccgccccagtgagaagtctgtgtaccgcaacaaagagcagcccctgcttgcctcaactcgagaaagcccgtgagcagcaacgaagacccagtgcaaccaaaaataaattaaacaatgatgtaagaaagaagaaagctgtttcaaatcagcaagcctttgtttccacttcaatgcaaaagtcactcactaatttcaccagcagaacaccatgggtggtacctgactctgatcagtccagatcgaggggagatctcatttctgaaagaatttccaatctgggcagcagcaaaaggcaactttccttggttgaattccaaaagccgtttgaaattcaggaaaatcccctgtgcagtttctggtctcaaatatctataaatttaaacaaatcagtctgttacaaaggaagaaatcatgtttcccaataaatctgaaattctagatacaattcctaaaagtcctaaatatactattcacacaaagctgtatgggccctaaaaatgttttagaaatagatattttctattctcacacaggtaacagagaaggtatcaggtgattggtatggaaacaccactgttagaaatgtcattttatttcatcattccagtgaatcaaagatgacttctctcatgatgtctctaaaacttcggatattcttcggatattctcctgattctcacttactttgg

SEQ ID NO: 61183 - DNA, 1397 bp, Bovine  19866880891579
  misc_feature (1)..(1): n is a, c, g, or t
ngcttgttggggaggtagggagagtaggacagtgtcagaccgctttctggaaagcaggattttctattttgacgtcttggcaactctccagcaatagaccttacttgaagctacagaaaaggatccagtgagacagtatgggaaaattgccccctgcctggtgggagggtggaggggtgggctaggctcctaggcctgaatgaggacacgggacagcccccgcccccttcacgcccttatgcccctctctgctaggactggagaagttcctccaagagggagtgatgtcacattttccccagccctgccctgcgggcgaagagggcggcatctctcattccagaaaacgctggtggtgccatttgtcccaagctgctgaccacccccttcaggagaacattggcaggatagggggctccacctggagccaacatcagcatacggggtacctggcagggaagtgggtttggagccactcctcaccctaggcacacacaaggcaccacctgctccactgggctggctgcccctgcagctcccactcgactctccaagacccacacaccctcctgccctgtaccctcgaacatctgtctttgccttgttagatcacaaagcatgaagacttgagtgggggcttctgagaacaagggatctgatgccctcattttgcacatggggaaacagagggtcagagaggccaggtgacatgcccgaggttctttggtgggtcagagttaagccaggactagagtgcaagtcttcaggttcctgccaaggcccagtctgccagcctcacccagcctcttcctcttcccttctctgctggacaagaggccacctcctccttgggctccagcaaggactcagggaagtgtctgggcatctggaaggtacctttggaggagcctgacttctatgtcctgtgccatcccagcctcacctctggtcattggctcagagggagtgtccaggtgggcactgtaagtccagcaggccaggactctaggctccctgttgtcttgttcccgcccttgcctagatgccctggtgccctctggccaccaggcctccctgccctcctgtggatcccactgcctctgctcctcctcatgacatctcccagggccctgcctcctcccgagaaccatcccggttgctggaccctgctccagctggctcttgctcccttcacacatgctggatgccatggcctcctctgggccctgctgggacccctgggcacttcctagggcccgagcctcaccggctctgtggcgtttccagccagcacgccaccactgggctctagcagtgggggcaggtgccggctggtgccacgtcgtgctcgctccaggccccacagtgtgactgcctggtcctgcaggttccagagc

SEQ ID NO: 61184 - DNA, 993 bp, Bovine  19866880895474
  misc_feature (1)..(1): n is a, c, g, or t
nccagcagaaagccccaccacccactacctcccagacagaccaaatgaagaccgctggaccctgtggggcaagcacagaggccccagggtacctaccaagctgcagcacatccagatcaccctcgagcttgttggacactgacaactgatttttcctagaggaaaaaaaaaataaagggaaatgtcagtgtaccataggagaataccagagaaatgcaaacaacagagaagaatgggaggagcactggctgggcctccaggagggagctcctctccagacccggccctgccgctctgtgtgtgccgtgtaccagcactctccctcgctgagccacaggttccatgtcagatgggatcagatcacttctggggcgcttttccattgtgtacacacacaagcacaccccagccagcgcaggattagagaccctgtagtttgacacttgccaagaactgaacgcaggctcttttgctgatgccactgtagcactgctgggaaacgcttgcacgtgcacaggcacacacgcacacacgcgaatcaggttcctgcgatcactgcacagattttcttatctcatttttttgttggtttcctttctcccagctttcttgtgaagctatcagcagccgtttctcagaaatctctagaatgcaccagacagaataccttctgtgattctgactagtagatttacggatgtgcacacagagctttctttaaacagcccacctgtacttcagctctctttagattttcttttccttcagcatgcttcatctgaactaaagtaacatcattttttttaatgtattaaaaaataacaacattacatcaccctcttgaaaactccatttactatgttaaaaatgacagctcttttgaacgtagcattgaaatgtattttcctccaacatccttgcaggataagatatgattgaagtaacaattgtaatcttgccacagtaggttctatgaatggcttcctccgaaga

SEQ ID NO: 61185 - DNA, 3712 bp, Bovine  19866880910841
  misc_feature (1)..(1): n is a, c, g, or t
ncatcaagcatagcatatccccgcctgtaattatcagagcgtgcaaagcccctgcctaatcttgtgagtcctggtgacaccctctgaggaaacgctcctatgttctcaccagactttatcttcaggcctgtagtcccttcagctgaatggtctagaaaagggagagttcatgaggaaggagcttgtacaacttaagtagaatggggaggacccgctgagccttgctgcaaaatgaaaagtagtcctaaattttaactggtattgtaacattgaaaaacttgtcagacttgaatttgtcttatttctcagtctctgggtttcttcatgtcttttttccttttgcttttggaaaaggaagtgtctgcaagcatgctttcagaatactgagtaagctgtctgagactgagcttgtctaaagccagtgttttggagaggatttacatcaaagagagtaaccgttggatgattataaaggaccatgaagtaaggcaaaacttggagcctatggaataaaaagtgataaacagggaaagcagtttagacaaacggtcccaggagttaatggaggaaagtccaatggggcttcctgccattttattccctggttttctggattttggttgattttgtcatgtgcctctgcaggatcctgggtggaaatccattcatccttcacaagtcagtatctccatggtttttattccatggtaagactaggacccagagaaggcaatggcaccccactccagtactcttgcctggaaaatcccatgggatggaggagtcggtaggctgcagtccatggggtcgctaagagtcagacaggattgagcgacttccctttcacttttcactttcatgcattggagaaggaaatggcaacccactccaagtgttcttgcctggagaattccagggacgggggagcctggtggactgccatctgtggggttgcacagagtctgacatgactgaagcgacttggcggcagcagcagcagcagggctacagcttgtttaatgttacagcttcttcttgacctagaattggcaggtggctaagtctttgtatagctgtgatccctttggtttaggtggggagtatcatttgttcatatgaaatttttttaaattaaatttcattttgattatctggctctgtcttctagtctgatgactattttgtctccacagttccaggtagagtctctgaactcaaagacaagagacagctgatacagtcagtgtttgtgttgatttccatctcctgtctgtgagcttggattaattgacagaacagatggaaagactttggcagctgattatttggggattctgggcagggtccttatattgatctgcccttcattttaagtgttctcttgctgctgtcctggttggaagctttgtgaggacagacatcaagcttctctgtctgtctctcatttctgtgctcgcagaagatgtttgatagcttttgaaaggcaattaaggtataggtgctgctggactgaataagagatgacattaaaaagtaaaagtaaaaaagaaatcaaaagctctttcgcaatgcatttcatgtatttttaggacccatttaagcaatttttcattacttctaaaacatctgagataatcatggaagtgccctagtaaattgtgtgtgtgtgttttaaagaagagaggtttgattttgactcataaaattaacttaaaacattcccccccaatagctactaaattgccattcagggaaatctttttgggaaaccattactatgtgcatatttatctcatcattatgcagtttgcttgatgttagcttgttcaattcatgccgtgtcctctgccttgaataacacatcatttaggaagctgttactctaaagacaccagctgtatggtgccattatcagtcatttacttgttcagagcaataaaaaggaagaaatcagactattataaaagctaaattcacttttaattcccattctttgaaaagtaagtatcaggcacttcatttagtgtacattagtaaagacttgccagtgctttaaagaaaatcattttatttggaaggcactatgcagtatctcattttgtgtgtgtgtctgacatttgctcagattctcttaattttattttttaaaaattgttttttgatgtggactatttttaaagcctttattgaatttgttacattattgtttctgttttatgttctggtttttcggccaggaggcatgtgggatcaagatcaagatcactcccaaccagggagtgaacccacatccctgcattgaaaagcagtcttaaccactggatcaccagggaagttcctgggttttcctaatttaaaaaaaaactgtatcaatctgttccttaacaactattttccgtatcattctgtgttagtgttaaatgaagtttaaaataaaggctttgtttatttttttttgagtgtgccacttttatcctttatatttttgctttcagagaattcacaatggcagaaattgagcattttgtagatcccagtgagaaagaccatcccaagttccagaatgtggcagacctctacctttatttgtattcagcgaaagcccaggtcagcggacagtctgactcggaaaatgcgcctgggagatgctgttgaacaggtaagattccataggtaacttaatttagagcatacttcttcctggagttcagcactcagcagattctgtgtactggatgataaaatattttgacagtcactttatttgatacagtatgtgggtttttttttttttttacagtatttattacacagtattattatagtgggagggaattacctgaacatgccaatgtgtgggccattgggactaacatgaaaaaaaatttagcagggcatgtggaaaaaatttgttggtttgaattgtaccgcatcagtttttgttttttttttggccacactcgtcttcattgctgcacgcagactttctctggttgcggcgtgggcttctcattgtggtggcttctctggctgtggagcacggctgtaggtcttaggcttgcgtagttgtggtgtgagggcttggtagttgcagcctgcaggctgtagagctcggactcagtagttgtggcgcgccagcttagttgccccacgatagctggagtcttcccggcctaaggattgaacgcgtgtcccctgcgttggcaggcagattcttaactactgtactaccagggaagtcccccatcaatctgacttttaacaatatggacttcttttggggagacattttgactcataggaagcaagccctttctattttaaactcttctgtattacccataacaattgggataagggcttgcatataatagaatttccctatgattatttgcctagagaaatgagtgagtaaaaacttggtaacagtagttgctgcctaataatggaatgaattgccctgggaacaatgagcttcctgtctgaaaatattcaggtggaggctgagtgataatttgtcagcccttttgcagagaagggccctgcaggtggtaggagatggggctagacagtttctaaaacccttctgtactaaagttgtaaagggatttatactatatggggtttgcaaatttcagtggataagaatacattaaagtcccctcagcatgtcttacgacttttgttaattcagaaggcaatatatgccatt

SEQ ID NO: 61186 - DNA, 1021 bp, Bovine  19866881018532
  misc_feature (1)..(1): n is a, c, g, or t
natagtatattctgctcatgaagttgctctgaaaagctaaagtaaattttacctacaccaaagttattttccctcaggatcaaagtttgagaaatgagaattcctttaagtcttttctacttattgcctaattatacacctagatatttctacagtatttcagaaattctagttctaatttttataattaaaaaaattactgttttatcctgagcacatgtttccagtaagatcttcaaaggccttgttatataagattgggtttcaacaacttcctttccccatagaaagaaattagatatttcagttttttttaaagagataaagttggtacgcgccactatccctgcccaagagctggcatatgtgggttgagttcttttattattttacccgaagggtataattacttacgtggagtgaaataaggagccgtccttttctaagtagccttcataatggaccaacatcaaatcccctcctttggtcttgcgatggcagatgaacggcttctggagaacttcaatcttcacttctggttctgggatgagagccccactcaaacaagttactaacagtgtcaggactgcattccacaagaaaagcctcatgttgccagggcaggaaagaagttgctacaaaaacacagaaagggcccccgacctcatagagttaagaaagtagttgaagacttaaagacaacagcctctggcaagtcatgactccctcccttcctagcagacgtggcacattcaccaccgacaactttcccacgctttgcgaactcacctctaaagagttaagcccaacccctgccctgactggctcttacaacgctggctcctggaaagacggcctcccattggcttgtgattctgtccctcaggagtctctcaagccaatggtgtcacaatattgcaatttgcagttccgctgaggggaggtagcgcagaagcaaaccacccggagtggtcctgaaggcccggggattacagaattccacaatttaggaatggagaga

SEQ ID NO: 61187 - DNA, 1262 bp, Bovine  19866881138963
  misc_feature (1)..(1): n is a, c, g, or t
naatagttgagacctggataaggggaggttttgaactttctctctttcctctaataatgtgagttcatcatccttcgctcctgtcattttctgggttccgaaaagaccacttgaaacgagtgaactttcagatcgtaaacgtgagaagctgtaaatgttcctgagttactcggtgaaggcagccatccttcatatggaacattttgaaatttgattttgcggaagggagggaggtttcatgggctggagagcttggtggtttaatccaggcctccttttcctagggcactgcatggacatcagaatttagagaggacagggtattctcacatccagtcaggtagaaccagaagcttggaattgaaccccaagagtagatgacctagtaggaagcacagaacgggtttctccagcaccggcgcctgatgcaataacttgccttggctacggagggtggatccctctctcggaaataattcattggggcagtgctgcagaaaattcggcaaattctgccactttatctacttctctctagtttgagcctgattgattctatcctatttaattttactgtgggcttaatttattcttttttcttggtatcagagctttatgaatgcatattctccatcttcctccacacaccctccttaaatacaattaagtgtgattcctttgtcttttctgtctcaacttttttttcccccctctttcttcatatccttcactttagaagggagaatacatctaatttgggaaaacgcacacccaagcccctccctctgccacgttaccctggaactgcagtgcacattatccatctgtagcgagactctggaactagttaactgaagtacactttgatgggggaatagccttccgctattattactgtcttgtgtattgtttgtgttggcttgattgctagatatttggcgcttcaagctattttccgaatatgtaagttagtctgtcagtttgtgttttcttttcctaatttttcaggaccacacataaatcagttaactacctgggactttgaatcacactgctttcagggtcaactggaagggaatttaaagattatctggttaaccttttttttttttttttgctttcgaagaaatgagatacaatttccactgtgaagtttgtgcatttgaaggcatccttggagtgggatttgtaaggtgcttaataacgggtttcgttagtggcatgtgttttggataaatagctagttcgtataaatttgccaa

SEQ ID NO: 61188 - DNA, 1351 bp, Bovine  19866881162823
  misc_feature (1)..(1): n is a, c, g, or t
ntgtgttgcaactaagacctggtgcagtaaataaccattaaaaaaaaaaaagattgaacgccattgtgagccctgggatgtggctgaagattcactacttttagcatgatgaatagtttccaaacctatcacagtcattttatgctcctgagatccatactttcccaccagcacttccatgtgctccgcactatttacacgcaggtgtctgccccgtgccagctcctcttctaactgcttcatttacatgcgcccattcgatcctcacagcaacttgatggaggaagcactaagattaacccattttatagatgagaaaagtgaggcacaaggcaatcgagcagcttgccaaggatacacagataagaagattccaacccagaaggtctggttcagggcttatgttcctaacccctaagctactgggcagtggtacaggaacgacagcaatgtggggcaacaagactgctgctgacctggagctgcggctgcttgggaggccaccacgtgatgtctaaatgtttgagaactcgcctctgtgttcaagttggagtgtgatgtgcaaaaagacatttcagaacatctgtgtctgatacagagaagggagggctttattgaagggggatgtacaaagttcaaagaatgctcctattttctttaaatcctagcttgactgtcaagatctagctcctaagccaccctctccatgcgacagaggtagcccactgtcacctccagccaggaggaacctctcatatctgataactccaaagccctctgctgcctctgctcagcattttgctgttttctgtaccttacctcccccgcttactcagaaactctaaaccacccgttgtttagcggtaatttgtaccagggttctgctctctggctaatgggcagttgtttgtggatttttcttttgcgcttacgtttgaatcacaatacaaagctaattaaaataaatggttcacagagcacagagtcacagagctggaggggggaaccttagattgtttttggaagcaatgaattctgaaataattaagttaccataaaaatccacttccgctgagctaacagtgagttaaaagcaatgaaattatgaaagcatacttgctgaagagcagaaacaatggcggagattctattagcctaattgttttttaatttgagctcataagtttttcaaatttggggttgttagtggcctactcctgactcctgggcctgtcacctgtcagcgaggtccccggccagggtatgagtcagttaggccagtgttggtctgacaccgactctgacccagtgcaaggacaccagctccttgcccctcactgggcacccagcc

SEQ ID NO: 61189 - DNA, 1478 bp, Bovine  19866881173592
  misc_feature (1)..(1): n is a, c, g, or t
nacctgagaatagctgtatcttaattgcttgcatgaatgtactgctaaaatacagaaagagaaaagaaaagtctcttttacctaatatagtaggcacactcaagtaccctgtgctccatcagagaaaaggagaaaaggaaaagaaaagagtgtctgtgtattttctctaacattcttgagctacccagttttaagcagcagaacattgggtatttagtgtccagccctatcttcacatattggaggattaaaccagaaatggaaagggaatagattaaacatttcacaaacatctctgttgtatgagacataatgctaggccactgtgagtttgttatttgtatctttcaagccctaaacgttagtcgaggggcattatacctgcttggttattcgttaatgctccatagtagaacgctagttgaggagtcagagaaacctgaggtctggtgccagctctgtcactgccaggggcaaagtcactttatcactctgagctttaatatcttcctccataagagtgatgagatttacccattaataatcgtaacaagagtaaaaagacttaaacacttctgatgttccagacactattctaaacattttgcacagattaagttacttaatctttgcagcaattgtaggaagcagttgactttattatttccagatgaagacattgaggcacagaaagatgggggaagggactggcccaaggttacggagttagtaagtgcctccagcatcagtgctccattcattacataatacttgcaaaggtccttcctgcttggtcattatataattctagctgattcataatgtacctatatttaaagtatgttggcctggaatagcagactctatttgggaatgggaggtggggaggagtctgggagcaaggaggactgtgcccagtgttgtgcatgtgttttgtcactcagaaattttcagaactgctctgagctttctgctttcagttttagttcgctttcctgcccactcagcacacaggagggctgccgtcatgagctctagccagctgcaggcttcttgggcccctccagtgcgttagggcacaagcacattgcagtcctgcattccaaaaataacagaagtttgcatcacactcgccagatgatggtctgcgaaggtgctatagtcttgcttatccccccaggtaggaggtgatgcttgtccacgtatgtttgtgctgggtagacagtactaaggagtcatctggagtgtgagtgatccagagcatgggctcacaaccacgtagtcaaccttttttgttgtaattatttttaaatatctttaccaagatagtaattaattaatctatcgtgaatttcacccatttaaagtatactcatcagtgttttttaatatattcacagagtacaaccatcaccacaatcaattttaaaacatttgccttatcctaagagaaatacccactagcgatcgttcccacc

SEQ ID NO: 61190 - DNA, 910 bp, Bovine  19866881201085
  misc_feature (1)..(1): n is a, c, g, or t
nctggagtggatagccttcccttctccgggcatcttcctaacccaggagtcaaaccccggtttcctgcatctgaggaattctttaccatctgagccaccagggaagccccctagaagaaagtgtctttgttctaatttggctgagtttagttatttataaggtgttatgattgtcccttaaacagaatcagctatttcacttgcatgttgaatagccttttctgttaccctgaagagcagcagagtctcaggatgtattgtgtcttcccaagttttttctgtcttcctggactacagcttgttgcttctagtcagttaattgctaggcaaacaaatggaagtagtcagtgatttgagacctgagaatagaaaaaacctcccagggagaagctgaggaaagtgagaaaagtgttaaatgtggtacctgtagaaaagttgtttgaaaaccaaagagctgtcagtgaatatttcctgttgctggtggggagcaggaagtttgagtaagcttagggtacataaagagccattcaacctggagtcaggcctgctccagtacccatcttggaagcaggagggtggggtgagagatttggcttgatttcacaattctgttttttaatcagtgttaaaagaaattggtaattgtcaaccctttcttccaaccctcagaattagatcatctgtgcagtgtatttataaccaagtaattggacttttttccttttaaaaaattttaggcaaatggagttaaacagttgtgaaaatggatctttaaatatggaaataaatgatgatgaagaaatcctagtgagaaacaagagctccttatgtttgaaacctgcggagacagattgcagcatatcaagtgaagaaaatacagatgataatataacaggtaaaaacaaaaaag

SEQ ID NO: 61191 - DNA, 957 bp, Bovine  19866881217725
  misc_feature (1)..(1): n is a, c, g, or t
ntccatgcgtgtattatctacagaatgaactgggagcaaggcagagggaggtcagaaacccagaagagccctgtctgggtagcctccactctacccaaactcctgagctttactggggccagtcactgaggacttctttcaaaagaggatgccagccctcacaacttctcctggtttatttatctcttcctagagatctctgctgatgaagaaggaaaactctgcaattggctccaaggtctcacccaagactatggactaaaaaagaagcacttatatttcctcaggatcttttagaagcggagagaggaaaaatctctcttttggcctgtgtgtgcgtaaagcatgcttctctgcagccaaaaaggcttgatgcaaacaagtaaggatgtgctctttatctccttgggttactggaaagcaaatgaacagagtatttttactcttctaccttcctttacgtgtcatattaaaaacgttaacaactggaaagcaatcaagaacagagtacttttccttttctaccttccttcactcattatgtaaaaaatgtgacaattcccttaaagcctttaggagaagaaacaagcaagccacactctccttcaccctccaagtcctgtgcccctaattccgttctaatcggtttctgagccacaccctcccagcacatcctaagattcctaaaaccaagaagtaaaggctgcttgtaggtctgttaggtgtttgcttgtttagagtatggtcgtggtagtgagaaggtagatatgtgtcctgatttaaacacagaagtgtttgatgttacaataaaaacacaaggttagaaaattgcctcaagtgccaggtgagcaggagactgtgaaatggtactagatgtgtgattaacaaacacactgctctcactattttcactacctcttaaccaatcttctgtaaaaactgcctgcagttttaggt

SEQ ID NO: 61192 - DNA, 2031 bp, Bovine  19866881265771
  misc_feature (1)..(1): n is a, c, g, or t
nggtctctgaacctgtgaaagctggctatgttacttctgaaagtgtatctgtgagcgtgtcggtgctgcggtgtgagtgtgtctggaggtgagtgcatacatgtgtgtgcccactgctcgggcctgatctgggggcactcatgataagcagatgtgggcgactgggtggaagctgtggaaaagaattcctcccgggccgcttagcacagctaattggccgttggcaggcagctgcctgctgtcgccgacctgggcttttccagaccctcagccaagtgcaaactcagacctggcttgggccacagcagggggaaaaattggcctgagaggccgaggaaggcttggaggaggtctcagagtgcccgaggaggtgttttcacagggagggagagagaaggaaccagatcagatctgggctggcgggacctgggcagggcaggcgggtgtggggacagtgagggaggtggccagaggctccacagagagtggcgggtgattagacaagcaaccgtcctcccgcttctcagccaaagtccagattcggctgcgaaggtccgtgcagagggcagttggcatgaccctgccaagcagggattagcacgccttgtgtcaccgtgacacctcacccagtccaggactgaaggttagcccttcgggctggagtttaaactttagtcaaggaagatgtggtctccgtgggtgtaaggtcctccaggcttgtctctagtgggggcagagctgggcgacctcagggcatgcccacggagtagggtcaggatcacgtcggggctcagctgggtatgatgggcaaggggaaggatccttcctggggaggaatagagtctccccaggccttctggccccctcttgaccttccttctcaagggcgagtcaggccaggcatctgctggtgactctgttctctcacacaggcatcccaggcaggcctgaggagggcaagcatccctgtgcaatcttgatctggccacaccctgattcagtgtctttttcccttgccagcctccatttttccagtctccccaatacctgagctgggtgggttgcaagagagggagaaaagggaacccaaccctgagcagggaagcagacaagttgggttcaaggcctggctgcttacttgttgactttcttggagctgagagccctcaagtctccaagaggggacctaggtctctttgatatctcttggccacacccatactgccagcaagctcactttgtggacttgagtttatctctcttcacaggaggggctggctaagaggagcccaagaagtgccaggctgaacataagggcatgaacattgttgtgggagcccagggactgccctggccccaccatggaagtttggggtccagaaacacgtgtcttgggctgaagaactcagaaagggttcagaacactgagcctgggatctaaagggacctgggaggtggcctcagtgcctcaagaagggcagagaccagtctgcacagcaggtgacatgctctttcctccaggctctgggagaggtttcccctagccccttgagtcccgggcctctccaaacccaaaccagtcgttggcatggagattttcaaggaaaatagggaaaagaagtggcaggaagtggttggagtgagtcagggggtgtcccatggggatatgttggcgaaaactttctcctcactgagtcagggctcaggatatgccctggagcaaccgtggacctctctccatcctgccacatcctagccggttctcaaagccagaccctgagtttatttctggagtgaaagacagaggcagcggcaggtgcctggcctgccctgccctacttcagctactaatacagtgtgatttcaggcaagccacctcatctgtgtggtcccaggtcccatctgcagaatgggtatatcgcaaggcgtggctgggtgctgggaagtggaagatgctcttgaaccttgaaattctgatcactcactgcctctgttcactcttcccctctcttgcttgctcacccatgttcg

SEQ ID NO: 61193 - DNA, 1601 bp, Bovine  19866881409985
  misc_feature (1)..(1): n is a, c, g, or t
ncagtagttgtggtgcaggggctcagttgctccttggcatgtggaatgttcccagaccagggatcgaactcttgtcccctgcattggcaggtggattcttatctactgtgccaccagggaaatccctcaataaagctatttttaaaaagaaagctatctacttacagaaaagagacatatttcattaagtgataatatatccttactcctgctgctaagtcgcttcagtcatgtccaactctgtgcgaccccatagacggcagcccaccagtctcccccgtccctgggattctccaggcaagaacactggagtgggttgccatttccctctccaatgcatgaaagtgaaaagtgaaagtgaagtcgctcagttgtgtccgaccctttgcaaccccatggactgaagcctaccaggcccctccatccatgggattttccagacaagagtactggagtgcggtgccattgccttctccaaatatatccttaggtagaatctattatagcaattatctgtgataagtgtatgaataaaatgtttataacatgaagaaaaatttaaaaagtcatatgaaattctgggtagattgaaaattttgtaaaaatctgtgagccaagctagaaaacacacgcaagatgaaaatacctgctttagggagggagaataccatggatttagaataccttggattttcctaataggctaaattttctgctctgatgttgttgcgttttctttggaatgaatcttctgatccttttgttttgtatgcattccattatctcggcctcttcagctcctgccctggcagtatccatcagcatctctgtctaaaatttgttcctgtgtgtgggtcactcctgacgaagggccgcttgttctgagcttcaggtgggggcagggcagtgctgcctcagaagcatgagacgcttctgggcctgtcagtcctaataacaggcttgcttcctctcccacctggaactgttacactggcttccaaaccttgacaggttctatttcatgattccttccctgttagtcattcacttcccacttccctttgctgtcacctttttcttcaacacactggcttagcaagctctgtgagtctgcatcaccgccaggctcccagctccccgactgcctgccccagctgctcccccggcactcagcagaaccgtacaaggcttcatttacctctgaagcccccaaagatgggaaaacagctactgtcggtgtcagctgcaaagcttccctcctgcccttccatctctctccatccttcctgacatattatcttgtcacaaaggagttacttggggaaacatgctattattctttccttggtgtgatgcagtcacaaaggcaattttccagggagatgggcccagcaagccagtgcccagaaatgggaagagaagggagatgggccttttactcacgtcccattggcttcaaggacctgtttcacccaccataatggtgctgactgcttaaggtcagctctgcctctcagcattatgagcatggaaagacaggcaacggcaggcggaatttaccatctcatgggccaaacagctgtctacatccccagaagaag

SEQ ID NO: 61194 - DNA, 829 bp, Bovine  19866881430290
  misc_feature (1)..(1): n is a, c, g, or t
ntagtataacacattagttatagacatttatcaattaaagaatgaggaagggcgatctgctagccttaaaaagtaaacagtgactcattccaactcttcacctcctttgcaatattttgacacattttattatgaagaaataaacacataaataaattgttctgttaatcatggtaggtcattcattgctagttatgtagcttaaatcccaggcagatttcaatgtaaacatttataaattatgaattttgttactcacttcagcattgcacatctcctcagtaaagcagttacttaaaagtagagctcaacaaccattttcctgttttcctcaagcagagactcaaaagcagtaataggcacactgtttcattacaacatgaaaataataagccttgggttattgctaaaggcttttcaaatatcagcatctaacttggagatgagggaaaaagaaatagagggtgctgatctgtgctgtaacctgttcttatgtggggcacgctcctggttgcaatatttgaaaattacatgtatgtaagtaaaacatacagcttcacatgtgaaagtgaaaaatggtccagaagtcttctcttcaaaaacagatcacctttttcttcccaataacttaccagaaataaatgtacttagaagccctaaggggttcttcaaataatattcagaaaaatatataaaaataaaaaaaacaaagcatgaacagaacatagttaacaaataagactttctttcgggataattacccttgcttttaaggatggatgccatgtaaaatgggagacgtgtctataattcatcatgtttatatgta

SEQ ID NO: 61195 - DNA, 1204 bp, Bovine  19866881448743
  misc_feature (1)..(1): n is a, c, g, or t
ncatcatcaaaaaagactttttcaagttacaatgagataaagggacattatctaatcagcaatataacccaatacatagcataatgaactttgataacaattcattcatttctttatgtctcggcacaataggatctacttcttgtcacctctagcccttagatgaactcataatctcattgtctggtgaaggaaggaaatttctcctttgctgatctacagatcaaatgagataaattatttcatcataaaagggcattcatcttttaatagagaaaacattcaccgagcaccctttatctaaagagcatgtatgtagatgcaggtgttggaaatggctgagaaaaactggtcaacatcctgaaagatgcagagcatttttctttcaaggaccaaacactgagtggacacatgttagactacaggtaaagagaacaagaaaggaacggtgaaacgcataaaatgattggcttaaataaagtgccaaaacatctcagtttatccacagaacaaggtacagtcttgaacttatccattttcaagatgtttacttctgagttgcagaagtgatcagaaaggatatgggctctttcaaaggtttctcggctacgagtgggactttggtggccctcgcatgacaagacaggtcataacaggaacggtcagcacatccaacaatctcgatccagccctgagaagacataataaacatctgtaactcacacaaggttcattcacaaatgcatgcagattatacatactcatgaataattcaattacagaatttccactcaacttttacaaatgcttgaaatgggtacagttttatacatcaagtagtagcaatcttataataaatataatccacacatgtacacaaagtagtctttttattttctggacagaattattttgccatattgtgaatgtggggtaaactagtatttgctgggatttagctatggaaataaaatgtgaacctagacaaaacttgtagatctctatcaaatttttgaccagaagtcaaaatgaatctggtagaaactactagcacaacactctgttccataaaatgctttagcattgatggattttggcatccacaaggggtcaccgatgcaatggacatgaacttgggcaaactttgggagatggtgagggacaaggaggccctggtgtgcctgcagtccacgggatcgcaaag

SEQ ID NO: 61196 - DNA, 1090 bp, Bovine  19866881474149
  misc_feature (1)..(1): n is a, c, g, or t
ncctaccatgttcagagaaacaaaaaacaagtttgaagattccaagaaagaaatagatatcaggggtttccctggtgggtcatgtgtcagtggtaaagaatccccctgccaatgcaggagacacggattcaatacctcatcagggaagatcccacaggcctcagagcaactaagcccgtgtgggattgagcctgtgctctagagctcaggaaccacaactactgaacccatgtgctgcaaatactaaagcccgtacacactagagcttgtgctccacaacaagagagaccaccacaatgcgaagcccaagctagactagttcctcccacaactagaggaatagcccctgctgactgaaactagagaaaagccagagcagcaacaaggacccagcacagccaagaataaaattataaaaaagtagatactctattaaaagatttgaaaaaaaaaaaaaaaaaaaggaaattctagagcaaataacattgaaactgtagagtgcttacagtgggcagggaactgaacttgggggaaatgtcacacaatctgactttgtcttccaataaagagagagaagtagtttataaaataggggtgagtattcatttcacatgcttttcagctagaatgaaacaaaccatcagctaaccacaaacatccagattcctaaatcctaaggaggctggggggcggggggtgaggtgggggaagcaaagctctctacaagagactttatcaaaagagaaaagaacaactatccagtttcttcgcctccatatccatccacatgagagtacatcctttataccgccttctggcaattttatattacaagagaacctccatagcacttgcaagcattttggtgttaagtctactggatgagaaccggaatactcagttgtctcataaaagactgtgtgcttcccacccaatcagagattcttaactcaagggatgctagaaataaccatcatccccgcaacaaacagctgtgtcacatcccgtttccccctccctctccgccttcagcctccctccacgaactgctatctttaagccacagggcagacaagagaaaaacaattag

SEQ ID NO: 61197 - DNA, 945 bp, Bovine  19866881487753
  misc_feature (1)..(1): n is a, c, g, or t
naacgaccccagccatggtgctgccgcaatgttttaccatatgcgttatcttggaaagaagaaatactctgtgaggaacaatttcatcaggatttgatgtgttatttgcatcatgtcctttctaatgtacatagcagcatattcctataggcattaaaaactgagggaaaaaacttaattacaagattatatactccaaaagtcctgagtaggaaaaacaagcctccagagattttttttaaaagaaaaattgaaaaaaaattttgatacttccactcttaccctgtgtcaatacagctgaacggtggcttattattatggttggaaaattcaatacatataaggaagtaaaaagggaggaaaggatattgtcatgtggagaatataatttaaaatacactataaaaatagaaaaatgcagttctttgaaatgttgtgtgaccctgagccagtcccttagccaacctctctaaccatctcttttcctctttgtaaaattttctctaagcttctcttcaattctaacattctattctgggatgtcatatgttagtcctagatgtcccataaccctggatatacagtgttaaagctagaactttgaaaactattatggaacagcttgaaattattaagctagatataaagtaaccggtgaggcttattaataaaagtcaattcatattctagactttaaagataaaaacctattttttttccccaatgagttttaggagattaaaaaacttctatatagtaattttaattacaaaaaataatctcaagaacaagatgactgcattttatgcaagggatatgttcctgaaggatttgaataattcaatatattccaaactgaaaactgatttttctacaggaataaacattctctcaggaggcacagctctatattaccacagtgcatttttatttcaatgctccatt

SEQ ID NO: 61198 - DNA, 717 bp, Bovine  19866881526002
  misc_feature (1)..(1): n is a, c, g, or t
ncctcccctgctcctggcactaacctcactctgatgggtgagtccatctcccctccactcccagggctgagccccccaggcagagcccaggcccagggcaggtgggtcagaaatgtgagaagggccagaggaagtgtaacccgggcagtccctggtgctccctgggctctgttctaaggagggggtcaggagggaaccctcaagctgtcacacttcaatcctgcaggagccttatgtccctcagatggcgctctggttgtgtccaccccgtgagaccagggatccgggggtgcagtggctccccctcagactgggcccaagttctcagacccagagatcccttgtgggaacatggtgcccaaagaagaaaaccttcattccaaggagtctggatgacctatattatgtttattttcttaacatataatgaaattccaattccaaagaggcatatatgcagagcagacagatgcagggtcctgtgtgcagcagccagaacaggacaagatggagtgcccccctctcccctccaagagtcccctcacccttcctgacaccaggccattacccaagcagaaatgcaggatctgggtctaagagggcccagtctaacagtccagggacatggccctggctgctaggcctggccaaatcatcatcttgctccgggtcctggaccccagtttctttctctgttaaatggactagaagcgaaat

SEQ ID NO: 61199 - DNA, 2335 bp, Bovine  19866881551513
  misc_feature (1)..(1): n is a, c, g, or t
naatgtgatcagatggaggaggtccccaggtgatccagaccgaagtgacattgatcttttacaaagactcctgttatgatgaaagtctagtgataactggaaaattcatatacaaaatagagaggctaacctggtggttcagattgtaaagaatctgcctgcaatgcttgatccctggatcagaaagatcccttggagaagcaaatgtctacccactccagtattcttgcctggagaatcccatggacagaagagcctggtggactacagtccatggggccgaaaagagtcggacatgactgagcgactaacactttcaacacttcagagaacatctactttgattcccttcctcgtagatgtggaacctgaggctcaatgaggggtgaggtgtgctcagcctcctcagtgaagctctgctagagacagaacttgtgtccccctggatggggggctgcactgcttctccagattcacttctctgtccatgactctgaactgatcagaggtttgaaggtcaaagaattggcagattgcctttgggaaagggcaaacacaagttagcatgtttggcactgtagtggtgtcaggattcacctagggagggaccgaggccattggtttaataagacctattacccgtgtgtgtgactagttaaccagagacttctttccaagagggtctcaccatgatttctgtcctgtccattgaggtctgaacctatggggccatatgcattttctagatcattgcaaccacagtggtgacattgtagggtctagagatgcctttctgtccagctcatgggggtgggggagaaggtgacaccaagagaaatattatttgcctcttagctagttggtgataggttgaagaccagaacccagaatttctaacttcccaaccaggaatctgactgcaagaaaatagtgcttcttagcaagccccctctaagtgatagttccagtaatgatgctttaaaaaatattgcagaaaatctcccagttctggcccttatcaaagatagagtctgtagacagaggaaagaggatatgatgctcatccaggtttaaaaactatagacacagtgaggagagagaggtgactctctaggggaaggtagcattaggctgttggtcatctttgtctgactgggactggcccttagagttagacggtgtatcttagggcttctcaaagtggggagggggtccatggatgctgtcagcttgtaaactttggactatcgtcttgcagtgagtacagaaattgagagtaagcatatggaaattttttcagcaattaacagagtaattttatggttgctaaatctgataatgaaaatgtgaatgtgtattttgtgtatctttatggtttatttcattttttctcaaagtctatttttattttattttaaaaatatattatttatttatttgggtgtgccaggtctcagttgtggctctgtggggtccttcatcgcagtgcacaggctccagccatacttcgtgggcttaattgctctgcaacaagtgggatcctagttccctgaccaggaatcaaatccccatcaccagcattacaagacagactcttaaccaccttaccaccagggaaagtccccgaagtctatttttactgtacagcctttgggggcaccctccttctagctgccttccttgaccatcctggggcctagtgatctccccactcctgtgctccccctgagtttgagcctcagactgcagccctggctcttctccccagcttcgtttcttctaatttgcacccatgggtattcatagacactaattttaaaaagtgtttcataacataagaaacactcaaatatattatcattattaaaaaataaaaccaaaagagacaaacagctactttggctgtcccaggtcacgtccccagagaacacattttgtcagttttctgagttccttttcacatcttaaattctgcatttacgtttgaatttttgtactatcttttgaagttgtttacacaaaagtcgtactgcaaagatgcactctcatttaaccacgtgtcttagaggtctttcggtgtcagcactgatgtagtaaatgtcacttgtgtatgtcatatatgtgtgtaatcaatcctatggcagaaaaatggcaggaaataccattcctggtaatggtggccttgtgtgccagagtggggtacagtgccttgttaatagaggcattctccctttccggaggttcacagtttttgactacaccgcagagaacatttttgcacacgcctcttcgtgtaacatgtgctagtatttcactggggcacaaactccaacgg

SEQ ID NO: 61200 - DNA, 1462 bp, Bovine  19866881751268
  misc_feature (1)..(1): n is a, c, g, or t
ntctgagtttctctatagatagaagggacacagtatgtgagaagttggttgcttggaacatctgggaaggctcattgaaagggtaatgacaggggcttccctggtggtccactggttgggaatctgcctgccaatgcagcagacatgggtttgatccctggtccgggaagatcccacatgccacagggcaactgagcccatgcaccacaactactgaagtccccatgccgtagagcccacgttctgcaacaagagaagtctctgcaatgagaagcccacacagcacaactagagaaagccagaacagcaatgaagacccagcacagccgaacgtgaactaactaataaatttaaaaaggaaaagaggagtgacagttggcctatgtccctttattctttcttcctttatcctgcttggaatgtgggtatgacaactggaactccagaaaccatcatgcaccctgaggcaactttaaggatggaagctacacccccaggagagtagggcagaaagagcctgagccccattgacaaggagtggccaaatctgcccttacctgcccacctccaggttttattcatatgaaataaagaccaattctgatcttattctagtcactttagtcaagatttttattattagctgaatgcaatttctaactgattcacctgaaatttttaaacatgtatacttaatgtaacaagatctaaacttaatcagtacctctatatacattatagaccaaggaccactactatcagaactttggatatgttgtcatttctcactttttagaaagcttcttgctgatctttgcagcatcttcccctaccacacacacactcacatatttattttctgattcttacaagttcaacaaggtatgtacccttaccccattttcacagaagaagaaattgcggttcacaggcattaggtaaccttttcaaggtcacataattaaaaagtggcaaagtctttctaacacccaaacttttcgattgtgtcagaaatcttgaaaagtaaaagtgttagtagctcagttgtgtccgactttgtgatcccacacactgtagcctgtgaggctcctctgtccatgggattctccaggcaagaaccctggagtgggtagccattcccttctccagggtatcttcccaacccagggatcaaacctgggtctcctgcattgcaggcaaattatttgccatctgagccttcagggaagtcacaaatcttagctgtattctttcattaactactttgctggcatcatagctgaggacaagcacaccctctgactgggggaaggctggagtaaagcaagctatgctattacccagatcatcatatcttactaaatggccatatataagagatcagtctgctaatttaaggacagcagcttctggtttagccaatttccaggatacaggacttttcccagagggaaatctacag

SEQ ID NO: 61201 - DNA, 1240 bp, Bovine  19866881842655
  misc_feature (1)..(1): n is a, c, g, or t
nccgactctttgcgacccctgaattgcagcatgccaggcctccctgtcctccccaactcctggagttactcagacccacgtggtgccttcttgctgcgtcctcacatggtggtggaaaagagggagagggagcattcttggacttcacttataagtcactaatcccatttgtgagggctgtgatgcataaccttatcacttaccaaaggccccatcccctagtatcctaatatctaggggttaggatttcaacatatagattctggtggggtgagggaggcaaacattcaggccacagccatctagttgcaggcaacagtttgaaccttggctgtgtcataggaaatgtcctgctaaagatgtcagagcaccgggcttggaggagcccctggtgctgctctggtgatgggaccctaccccttgaccgtttgcagttgaagtgggaaccatctggtctgctgacggaaaggagtgatgctcggaggtcatttaaagaatctgagggagaacctcggatcccttagtttctgcagagcttgtgtcccctggagaggagtgctgacttcctttcctcagagcttcaggccccttcctgaggggaagcccagggaaggctgctgtgggtcccaggagaaagagggccccagggggctctgtgccaaggatgagggtggctgatgctggagttccctcacagctggagctgatgtgtgcatgactctctctgcagattgggaaaaaacaaaataacaagcgaaggaggaaagagtctcgctctggctgtgaagaacagcaaatccatctttgaagtggggtgagtagaggcgaatgcccgtgggtgtttgtatacgacctgctctgtgtacactagtgcttgctggcctgtaactttccttttttgcgatatttttgtctggttttggtatcaaggtgatggtggcttcacagaatgagtttgggagttttccttcctctacaatattttgggacagtttcagaaggataggtgtttactattctctaaatgtttggtataatttgcctatgaagctatcaggtcctggccttttgtttgctgagagttttttagcacttgcaattggtctgttcatactttccatttcttcctggtttagtcttgggagcttatacctttctaagaatgtgtccatttcttctagattgtccattctattggcatatagttgctcatagtagtctcttataatcccttgtattt

SEQ ID NO: 61202 - DNA, 1437 bp, Bovine  19866880963889
  misc_feature (1)..(1): n is a, c, g, or t
ngggagcctgatctagagtggagaccatcaggaatgaatgtatttggccacaaaccactgggagtgcagttggcccccattgcacctgagaactgtgggtctcagacttcattgaacacaagtcatcagagtgacggataagcatgcaggtgcccgggccccatcctgaatctgacttagtacgtctgcagtggggacctgaggatttgcatggttaacaagcacagttgattctgttatcagaccccactaagaaccattaccccaaattcactggggactgtgggaactcagggacctttgttagtaggagtgactcctggtgggatttcctggggcagtgctgggaggggagggcgcacctgaaggtccagctagcatccccttctgttcccagtctctccacagcagggcagcagctgccctgagcatccagttcccagggacctgcctgtgggcctgtgtttgggcatctgagaaacggcttcccacagcccccatccccccaccccctgcccgctctgcgcataatctgaatttccgaacagtcattatctgcgatatttaatccaaattcgcttctctaccctcctccgtttccccttattaaaataattttagagttttagtaacagaggtctttttcaaaggatttctgataagaagtggactctcaagaagccttttgggaattatggatgtagcatgtgtttgctgatttcatgaagataagatttttccttgaagataagtcgatctgatgatcaggacacacaagtggtggtgactattgttgatattcatacacttcacctgcagtgctgttgtgtattctgtttgtagaatccacccccatacagttggagggcttttttattatgagaattttcagcctgacacagaactagaaaatacagttcccagagttaccaagatctgtcgtactttttgacagctatttttttcctgttcttaaatatttaaaaaatttttatttttgtattttatatagttctttttaaatttatttttaattggagtataatggctttacaatgttgtgttggtgtctgctgtacaatgaagtgaatcagctctctcttgaggcctccctcccaccccccatcccacccctctaggtcatcacagaccacggagctgaacttcctgtgttacacagcagcttcccactagctctctgttttacacagagtagtatataaatgggggcttccccagtggctcagatggcaaagaatccacctgtaatgcaggagacgtgggttctatccctgggtcgggaagatcccctggaggaggaaatggcaacccactcctgtattcttgcctggagaatcccatgcacagaggagcatggcgggctgcagagtcacaaagagtcggacatgactgaagtgaccgagcacacaccctgta

SEQ ID NO: 61203 - DNA, 1960 bp, Bovine  19866881846505
  misc_feature (1)..(1): n is a, c, g, or t
nctggaaggtcgcttcctaagataagacagccctgtcgtgttaaaattaggaattaccagaagcccagcttctggctctgagcacacccggtcccgtcctttggtgtaagagcagtgggagtgaacacagtgagtcgggtcacctttcttgaaggctggtcgtagagagtttatgtgatttttatttcttaagataaaattactactggaaaaagaaaacatgaagatgatgagccagtatttgaacaaattgaaaatacagccaatccttctagatgtcctgtgaaaatgtttgaatgctacttgtctaagaggtgagtatttatgatacttgatttttttaaatggtagcaacagttaggtgctgtgaatttatcagaggtgactttttttcattgatcctttttaaaatttttctcttttcttatttcaattatgtttttagtcctgttataaagcacccagcttgtatctcttaagcatatgttaagaaattgctctctactaaggaagttattgctgttgtagagggtgagacagtaaacagtgtaaagtttgggggctgtgagtctctcttgcagccagtgaaatttttagagatcacaaattattttatgcttgttcattattttatatatgtaccctctaatttttaaaaggtaaacatgaactcagaatgtattttcttaggtaatcagttttataaactgtccccaggttagctgtcaagaaccataaaaacagtaatgtcacctctaggatgattatttttaataattagtatttcaggtggttttgggtagccctctgtggctacaccagtatttggatcttccagtcatattttattctgtctctggaactgggatgaatcttgaagtattataattggcagtgctttacttgtttaatggcagtattaaaataatgattaaaaataatgtttctatcgatgatgtcttggtttcagtgaaatacagaatttaaattatggtgggaaaatactcttattatagaaattaactttcagaatgtctcaagtgatagaatatttaatgtagttaatcatgcatgtggtctgcccatgtaatgtggtaatggtagcagaattattcttaaaataaaaaaataagttgtgaggaattttgtatacatactgtgaaattgactttcttctttcttccaaagtccacagaatcttaatcagagaatggatgttttttatttgcaaccagaatgctctagctctgcagacagccctgtctggtacacgtccgcctcactggaccgaaacaccttggaaaacatgctcgtacgggttcttttagtaaaagatatttatgataaagacaattacgaactggatgaagacacagactaaaaaaaggaaggattcagaagcagtcaggataacagcgttaggcagtcatgctgctagatcttcattatggaaacatttcaggtttactcctcctgttctgggttttgtagcagtgcacccacaccgggtactaccatgtaaataatctgtgagtgaagttgccattattctttgtagtggttttaggatacttacaaatacattcaaattcttttttttttattattatttatttgattaggtatgtttgtaactttttacattacaaaatatgaatgagaatgtgccatgtataattttttcttgtagtaagaaacatccatattgcaccactctgctgttgcaaagcttcctggaaagggggctcttctgctgggtttctgaccgaatggttgtgtgtggggagcacctactaaaagtttagaacttgcagtgtctttcagaatttttaaaataaactgtaaactaatgggctggggtttttgttttgtttttctgggggttttgtttgtttgatttatgctttagttcctaaagccttacaagcttatgtagagagataccatctttgtaccaaaa

SEQ ID NO: 61204 - DNA, 2230 bp, Bovine  19866880972028
  misc_feature (1)..(1): n is a, c, g, or t
ncttcgcctctagaaaagtagcaaacgtcaaaattatgtaattggctgtcttgaaatattttaataatgccaaattctttatagtttgcaaagcaattgcaaaagtgttatcattttgtacccataataaaccctagagataactattgctatctccacttcacaaataaagataccacagctctaaaagattttctgctactaaaatatccttggttgttaagtgacagggctggatattttacatccagaccttctgacagtaagtcttgtgatggttcctgcaaggcagtgtcctctagtttcatgtatatgagggcatttaaatcctcttctgagagaagaaaagattctcagtataaaacattaaaccagcagcttttagtgtattatttggaaaatgccaagaaaaaataccttgaggtgtttgaaactcacatttgaaaatatgatagtgattgaatgaaaatgaaatacatgtggtcaaataaggtataaattgtatttttctttgtctagggcttctgaaaaaatgtgattgctggttagcagaacaagtatttctccagcagtacagcagacgttttctttccagtgacatgtgagagtgggtggcgagtatttcagatcagaacattgagttcttgtgaacaaagaatgtataatgtctggatctacttttctccctcttcttctcttagattagccatcatacagccttttagaattaaacttcagcccctcttcaaaaataaagaaaaactactagatgaactttggctatagataacctcaatacatattcgtttctttgtgatttgttttctttggagaataattccaaaacgcttaatcagacaagtattacattatggattctcctttctgaggataagataaaattaaattgtagtctttttgttgtttgtttagttgctcagtcgtgttcgactctttttgtgaccccatggactgtagcccatcaggctcttcagtccccaggatttcccaggcaagaatactggagtgggttgccatttccttctccaggggatcttcccaacccagggcttgaatccacatctcttgcattggcaggtggattcttcaccactgaactgcctgagtcttgattattattaagtacatttttcaaacctaaaataatttcttctcttggactgttcttagtggaaagtacatgtgagactaaagaaagggtatctataaaataaaatcatgaacagtttttcatcctcgcagaagactagattcaatatataagcaaaaaaaaaaaaaaaaaaaggtcatttttgtatgagtaactacacagtaaaacaagaattcattttgacagcacatgaattttaaatcagtaaaaatgtgcctttaaaaaacaacaacagcaaaaatacatggcctgcatattccagagaagtgatggtaatatttcaactaaaagggaaaaaatgttagtcactcagttgtgtctgactctttgcgactcctggaccgtagcccaccaggctgctctgtctatgaaattctccaggcaaggaatactggagtgggttgccatgcctgtctccaggagatcttccctacccagggatatatcaactcaagtttgtagaattctgagtcatttgtcagaaaaaccgaggagtctggtttcatccttgcttactaggtattaggtgtgtaattttgtgcaagttactcccatttcttgtgtgtcatattcctcttctgaaaatcaggaaaaataaattgtagagttaattttaggattaagtgataatactaagaggtttttagaatggctatttctgataattgagcctccaaactgagatgataggtgctaagagatgaacattgtttaaaaaaaaggaaagatttttacaaaggtgttagaaaaaatatacaatatttaccaaaagatatccaaaaactagacttgccacccttaggttaccactcacttctaacatttatatggagaataataaagactcaacagagagacacatggatgtttgtgactttaaaaagacttttcagaggcttctgtattttaccttcctttggatctatgagggtggtgatttttccttttgcaagactagctaagggagcctcaagagatttgatgggacagcaaggggcagttacaaggagacaagacacacatatctggctccagccagatgctttcttagctgataaa

SEQ ID NO: 61205 - DNA, 1878 bp, Bovine  19866880393521
  misc_feature (1)..(1): n is a, c, g, or t
natgcacctcatcatattagtttaaaaggtttctttttgcatttaacaatcttttcctaccaggcaaaatggcctttattaaaagactattctcagctttacttctgttatttggaagtcatttgaatctttttagctgctactgtacatcatataatttctgattaacattaaattgcatactgttttaattataatctccattcctaaatgattgagtatttagatcatttctcaaaaaggcaaaataaaaattatgtctgattgatatgaatgagtttgtgctttaaatattcaagcttagttatttaaaattcccaatttgaggtagaagagttggtgggtaataaaccaattttatttttaacattaactaaaacatactacatgttatatcataggtaaattgttattacatatggatattataataaaatttgaatagtattttataatttatttgtatatgaatgatcctttgctaaaatataaaaagtttaattcagtgattattttaaatataagacaaattcagataaatatctagctcattagttaaaaagtcttgccaatatttttattcaacttgaatgttttaaagtttctgtgtgtgtgcatgtgtgtgtgcgagtgtttgtataaaaacagcctcaggctttaaatatgttttgctactcttgaacatctgagaccaataattcaatggaactgaaacacaataacttatttattttaagtgattttgcattagagcatttaattccaacttttctttctgttaaaacctcacaaggttattgtttctctaaaagatttccaagttaaatccaaaacatttttagaaaaatccaggcagacttcatgctgagaaagatctttttaaggagcttaaaacaatttgaggaatcttggacgcaatgagataaactgaagggcattttctggtattagatgaaatttgaagattcggtgtttccgcaatagaggaagtgtgcctctttatgcgctgggaaccataacattatagtatctgatttgtagaggtatcacaaagttacaaatctaaaaaaaaattgtgactttgacaggtacggacaatgaagaaatattaggatagtagatactgaaaagcaattattgttttctaatattccatttctctattgggtttgatttttattttacaaatataataattataccatcatttaaattctcctttccaatataaagtttttggtctggcagctagagatctcagttttaattatgtccataaagagaatctaaagttcactctaccttagccacattatttacgagattagaaattaaaccttaaagatagtattatcaacataaaatatcagtgtattccagcattttaagaagtttgaataaatttacacatatatatatatatatatatgtatgtatacctgcatacaaatacatttctagactataaaacattatcttcagaaatttttatatttggcttcacccccattactaaattatagaaagttgtgactgttttaaattcatgaattacagattcatttagttcatattactctatggattataactgaagggtctcttcctttactaccaaatgatcaccctgtttaataagcacaagttagcaattttttctccacctgcctgcatgtttaagcaattaaaccaaagcataaacagtatctgcagttttactacttaaaactcatttgtgaataggaacatttccactgatatgatttctatatctctgcctatcattttgtcatccaatgcaacaaataagtgagacaaattaatttctttattatacataaaacacaaagttttaaaagtttcagttactcaaaacag

SEQ ID NO: 61206 - DNA, 1925 bp, Bovine  19866880400985
  misc_feature (1)..(1): n is a, c, g, or t
ntttctttttgataatgaaaagacagagaagtcttctaagtaagggaaaataaagcagcaagttaagatgatagttgtagtaaaatgtaatatttaagtgcaaaaaaagtctgagttgacattaaattggatagtaaaacttcaatttatagttagtatgctataatgtttttgtgttcttatttatcagactatccatgaacatactataatttgctccccactagttataatcagctcatattttatgtgaaatgtatcatctttttcttcttagaacattgtgccctccagtcacatttgttatacttttcgtcctacaacaaaccctttggaatacagagtgtgttgaattgaatctccatttggatttcttccagagttattgctttgagaagaacacatgaaatgacaaaattggcaggcactggtttaactccatgtctaactctgttgttttctgttgatgacaagtgcacggaatagttgaaaatgtaatctacaatgtcattcctctatgcagacagattacattatatataatttagcatttatcttcagttacatcgtgaagcttcacatatttcagtaaacatctcttttttagcttatgatggataattgataacaatagaggattggaaatgaagaagcagaatgataaaactcccattcactcacttgtgcacaatagccaaccttgggtttttctcttttattgtgatagttttctgttctggcaaaggcagtaatgtgatctgggaatttgatattctctctttactgcaatgatatcaaatacgggtaagcatcctggccctaatgaaatttaaaggaagattgaggacattaggtgttaatcagggtattttttagaggagtgtgtgtgaatactactgtgggatccttgttctgatttcgtgtgtgcgagcaacattctggaatcactcttctaaaagaaatgtcagtattaggtaagaaaaagtaccaataaattttgatgttcaaaaacttttttgtaaccttagaggtcaacctaggttccctgtgcatccataattctattcagttgcctccatttccttctcacaccacatgtccttgaacttcaagcttctgagtattttataactacaccacacaattctccacttcttaattatgctacctgtatcatctcacttctcatcctaaaagaaaaacaacagatgtgtatgagaacctgatgaactagtggaacgtatgaagggaatggtttcagtttcaactttggcaagagatatatatttcattagtttacattttttaattatatgaacccttattagcagctactaaatgttgctttgaaataatctttaaatgtttaaaggcaataattaatgttttaaaagccaaatgtctaaaagttaaatactaataagcttcagatgatttgagagaaaagaggaatgctgtgttttattaagctagaccctcacctttttggcttcccaggtggatttgcagaatctgcctaccaattcaggatatgcaggagatgcagatttgatccctgggtcaggaagatcccatggaggaggaaatggcaagcctcttcactattcttgcctataaaatcccatggacaagggagcctggtgagctgcagtccatggggtcacagagtcagacacgactgagcatgcacacactcactttttgtgaataaactgatgttcaagtagtaaataatagctaatctcttggcttaaatgctgactctgaattctctgattctgctcaaatatcatctccctgtgataccttcaactagattccatgatgatgagtctactatgaaagtgaaagtgtttgtcactcagttgtgtcatactctttgtgacccatggactgtaatcccccaggctcctctgcccatggga

SEQ ID NO: 61207 - DNA, 1738 bp, Bovine  19866880825792
  misc_feature (1)..(1): n is a, c, g, or t
ntggaaattccaggacttagtaatagcctggtttagcccatttgctctctgtgttccccactccaatattaatattaatatccaggcccagagtcctgtactatgtcatcctctaccacatgggatgaaaaggaaaaatgtaaacgtgagcaagacaaaagttaattttcattttataatcaatgcagtcctggttctactagaccttaacgtatgaattctcaaaaaatgctaacactttaattattaatgcacaaataaaggccattcacgtatgaatttgatccacttattggtccaagctcaaaaggaggtcttagtgcgttagacaattaattattgaatgtttttgaaagaaaaaaataaagtgtgtcttttaaatatgtaaaattgacataatacagttttctattttcattcagtttcttaaactaatttttcaataatattaaagatagtttaatgtacaaagctatattatcaatataatatttttgatatatatttaattatcaatatactgttaataattattattaacaaataggcatggaagagatatctcagaagaaaaaggaccacatgctaccaagtatagttctgcgagtgttttattctggctttgttaatcatatgcaaatatgtattagaaccttgatacattcatcttcataatgtgtttccagcttgttaaagtgaagtttaagaagctcctggaggagtaataggctgcatataatggactagggagtgaaaagtttggttctatatgcttaattagtttctaattttcctataatctcatcatgagtctcaaacagaaaataatattgaccattcatatagtacaagtgggtgctggcattttagatcattctcaagggggatgactaaattatttaccaagagtaatgtattacttattcaaattaaacttcacctcgagtgtagttttaaattcagtgagtaaatagcaccctgtgaacatcataggcttactgttaaatttaagtgaattaaggtccagtatcatgtctgtgaagaaataatctctgccctgccccccttacagaagaaaggttcacatcatattctatatcagggaaagagaaaaggtaaacagaaacaaagtgagtaaacaataatgacaacaacagaaaacagaaagattctgtctagttctagactcaaactgaaccaaatctggagctttcttgggaatgactctctaacaaaagtaatttcatcctgatctttctaatgtgatgctgctgatatgtgacgatctctgttaatatgataatcatgtaagaaaattactgattttctgccatgaacactcactacaaatttgataaatgcctggctgattttatatctttaaaattttactagttttgctaaaatctgcaatctgatgaaaacttttctgcaagtgaacttatttttttcccaagtactttttgtctctaagtctgtctttgatgtttgatttctagtaaatgctcaataaactgttgctattactgttgtcacctgataaacaaacattctggtggccttggcaaaaccatgattcattgagtagacagtgtatttcagtgacccttcttatatgaagcagtgatattcaccatgtttagctgagcatgtgtatttttataggaacagtgtgatcatataaaaccataccaggtgaaaatttaaggaaacattccttaaaagtccctacagcaga

SEQ ID NO: 61208 - DNA, 1003 bp, Bovine  19866880929623
  misc_feature (1)..(1): n is a, c, g, or t
nccaaagtggaaaattatgcaaagaaaattgagaaagtaggaaaagtgccaggcctggtgccttagggaaagtggagaatatgaaagtaaatacagtacagagtattttggttattgctgttggcactcttcttgattatgtaattgactttgtaaattgatatattacatgtttattacttattatcaaatcacaggaataggaaacaattttgttcttgaaagaatgatggcccattacacgagtcccatcaagaatgtatttggctatgcaattgcccatggtggtaaattgagctaatttcaacatcagctttgcaaagcaatatttatctgtgattaccaatagttagagtcaattttttattatattcacatatttcacatactatatgggcccatttcttttcatactgttagaattttgctaacaggctaaatttaattagcatgtaagtagaatctggcttcacattacaaatattgtgaaaccctggtgtcctagggacgtatcatttgttaactggaaaatcaatttaagttcatcatttaacaagtgcctaaaaactgtaattattggtcacaaatgtgtttctaattcttacaatatttgtgaagtacctactgtgtgaacttttactgaaaaatacacgatacaagtgacaatagtcactgtcttccatctgactcttaatttaaatgtttaattgatagtgtgtagtatgtggaatgaggagcccctgtcccaaaatatgcccatgcccttaaaatctgtgattgtggcattatttagaaaattctttgtagatgaaggtttttaatgagatcatcctggatttgggaggaccctaaatccaatgacaagctcttagaagaggtggagtcttgtaaaaagatactgaatctttataagagaagacacagacatgttaagtgaaataagccagacacagaaaggcaaacactatatgatttcacttatataggaatctaaaaagtcaaa

SEQ ID NO: 61209 - DNA, 874 bp, Bovine  19866880929758
  misc_feature (1)..(1): n is a, c, g, or t
nactaactactcattctcaggcagtattagcatactgattggctgttacttctgtcactcttctcactatggaattatgacaggccccacagcaggaaacaaatattcattaataccctgtcctctgggacacaataaactgccattcacttgcatacaaataaaatacacaagacttgtcaggcaaggggacataaaaacaaagatgcttttgcaaaatggtttgatactaccgggggatgggaccactgtgaaagggtttagtttctcattctatctcatcatggtaggaaaattctttatatggatttgcttttaaaatatcctatctttctcctcttgagctctttgagctcttcaattaaatggcaagttcttgcttctaaggaaaggaggggaaaaaagacctttacaagcctgtaattaatcccacaacacagaaacaataagaattctaaaattccattaaaatgtaagacagagcttttttttggttcaaatacgatatgcaaaaacattctgctaaatgtatttgaaaaacctcattagaatcagtagggatgaaatatacttcaatatcacatacctgatgggatcagtaagagaaaaatgatacatgaatggtatcactgttgaaactccactgtctacttgttacactaacagattaggtcaaatttcaccctaaatattaccacatgactgagtttacaccttgttataaccagaggatacagtattgaagaataaattaggcaacacactgtatgtaattctgaatgttaattcctttgatatttattagagcaacaaatactctaataaatttttaattttcaatcacctagcctaaacttcgaagatatgcagagaa

SEQ ID NO: 61210 - DNA, 1440 bp, Bovine  19866881293170
  misc_feature (1)..(1): n is a, c, g, or t
ntaagaaggaaacaagtttatttttaaatttcatgtagtacaacaatactttttagtaggaaaaaaatacactatgccagaaaatcagtctctgccccttgtatagaaggtgatctgtttgtactgctgctactgctgctaagtcgctactgctgctaagtcgcttcagtcatgtccgactctgtgcgaccctttggacggcagtccaccaggcttcccccatcccctgggttttccaggcaagagtactggagtggggtgccactgccttctcctgatctgtttgtagatgacaccttaatgctgtctattttgatgcacggtgggtgaacacagttcctgggaactattctgtccactggctttcttttggtggcccagcagatagactgagacatcactggtgaagctgtgaatataatgtaatggtcatctttagcattaatataaggtcaggaaagattctgattgctaagagacattcttaaaatgttttatacacatagggccatagaatccatttacaaatgtgttttcattgtacttctagtctatgatagaattaactggatttgcactttgatatgaagttaagaagaaatctcttagcactgttgactttttttaaacacgcacaaaatatctgtatttcttattaggaaaaacagagtactttgtgtaatttagatttgcttattttaaaatagtggagaaggaaatggcaacccactccagtgttcttacctggagaatcccagggatgggggatcctggtgggctaccatctatggggtcgcacagactcggacacgactgaagcgacttagcagtagcagcatttttaaaaagacatgtgagatatatatatatatatatatatatatatatacacacacacatatatatattctcttcatgaaaacataatagccaaattaatttttcttgagtggataaggagaaagaatatagaatgtataggatgatttaagtcccaccttcttcgtaagtcctgctctttactcttatctctataaaagtataggatagaataaattgtttctgaatggaggagacaaatagaagtaaatgacaaaatgcaatgtaaattggcttttgaagagaaaaagcagtaagataaaattattgactcctataatggaaagactgatccaaggttcaagcactgtcattgggatgtttgggttcccccccccccaactctcacccagttcctcaaatagacactttcttcattgagagtaactccaaccatattctcccaagtgcaaataaagactgttaaatagcacctttctttccagcctagatcctaaattaattctgattagctgtgattgaatcatgtgctatacataaaccaattattaggcaggaaaggattactaatgggcagtgatgcttccccagaataaactc

SEQ ID NO: 61211 - DNA, 1307 bp, Bovine  19866881419296
  misc_feature (1)..(1): n is a, c, g, or t
nttgagggggcaggaaatgtatggtggcgtaatgttaaggctgctaagatgtatgctattgaattcatttcttttattcacctgagtcccacagtattatccaagctctgaaaatatattttaagggtggtttccaggatacaagtgacaatctgccctgatgcaaattagtggtctcattcattagccgttgaaagcatctccaaaaataaaaatatcctcttttaggctgattgtttggtattgtcttaatttccttctttgtgtacgagaagaatggcgggggggcggaataataatgaaagcatactgtgcacagcagttcaagtggctgcttagaaccttattctacttgtatcatcagaataatcaatttcacataacttcttttcttgtttcttttcttttttggtgggggagggagaacctcgtacttgcaacataaaccttttacatttcaggtcatttatcaggtttatcctctttggtgtgtgtgcctgaacatggcagattctgagcagaggagtataggactcctcactagtattttgagagtagcactctacagtactgtggaaaagaatagaaaggtagactgtctcaaagatactcttgctacctttggagtttggcatgacgtctggaaccaccagtgcttttgcaggagccagtcattcacctcctgctgccagaagagaagagtttgcacctgctgacagccttttcatctggtgctgggtctcccttgaagaaggcaaccagaacctagttgacaagagggtatgtgaaatgtaatttgctgtctttagcctgtcggtacaaaggagagtctagaagaaagaagaatatgatagggttgaacttgaactaatagtgtgtggtaactcccaacccttggattacttggcatccatactttctcttgccatatttaaactttgaatagcaacaacaatgcaacagcatatttctactcacatggtgcaactattctttatataaatgatgatactttcattcttttcctcctgaaagtagaaaaatagtcctaaaaatagccctagcaccataactagttttggagaatgttaattcctcttctatttcagtcacagtttcatcctcaatattctttatttaaaataatgaggaaagtaattgatcataagatggtgtttaacatttctgatttccttcttctactacattcctttaatctgtcttgtccaggattttccacagtttaagatggcctagcaacctaaatatttgtttcccaaggtctaatcactaagtaattttccctt

SEQ ID NO: 61212 - DNA, 1894 bp, Bovine  19866881433501
  misc_feature (1)..(1): n is a, c, g, or t
nacagggcagatacttaggtttagagaatccctcttcttctttaccctggatcttttactttccacttcactggaatttctcaattttaataatcacagattaatccttccctggtagaaagaaatgagctagacaattaaaactatgtttctttttcatgtcaaagtgagacgttccttgaagatcaagggtataagcctcaattctctagttttataaagaaatgaatataaccatatcacctatcaaacatggtaggtatttctgtatataataaaagtagctctaaggaaagctactttatgtactcagtgtgtaagagaggggatcactatacaaatatataatggaattaaagtttttataaaatacatacttgtttgatagagtacaagatgtatttcataagttaaataggtatttaatttaaaaacatgtgttatgattaaaaaacccagaacattaaattcttaaaaagcgtatcatgtgtttaagaataaaaattaagcatgttagatcatgtatattttgtgatgactgtttaggaagcatctgagtccattttccatatataaaggacataaaaaaactatatctaattacttctagatttagaaggtgttgtccaaagctgatgggggtgttcagttgtacataaactatcacaaataaattaactatttgacttattatttgctgaggtacatatcatacttcacagagcttttaaaacctcaaatataaaaacgattgtgaagaaatttccagaaaagtttcaaatcctcatttactaataatactaataaatccaagtaaactttcaacattttattaaatatggatttaaaccttatgctgagttgagaatttaagaggtgtactccttgattcaattaacaagtatcatatttacaaagcattcacagtacatctagtattgctttgcaacttgtagtccaaccaagaatttacagggaaaatagcaagataaagttggcaagaagtagaataattttaatgaaaacacagtattaatgcaactacgtaaaaaattcattgacgcctttcacattaaactttgtaaaactatttgagcagaatcacttatcattatagttaatatcagattctggaactagcaacaaaactataaagcttagtggtcttttgatgaaaattgtaggtttttttttttaaataatagtacgctttaaaaaaaaaaaaaagtcaagaaactggaaatgctctgttccccttcccagcgcccagagtcatctaccctgttttataattcaacctgcaaacagattaagcagctaagtttgtggaaagtatgtttgctctccgctaagaaccgttgtgtgacactatggcgactcccctgatacctcaaagtgaactacagactgctctcactcatcagcagggaaaccaggctgagaattcacaacttctttgtaacttcaacttcttcatagaaatcagtatttggccaacggcaggaaagacttttattagctttacacgctcttttctttttttttttaaaatagcattcaaaagccacaggatgccctatatttcagaaagaaatgttttatgctgatttttgaaattttaattatgcaattaaaaattagaatgcctgcaaatgttaagtaactgatttttttaaagtacagaaagaaaattctaaatagttgatacatttttcttcttgaagatatattaaaagtttacaattttagtccaacctattcattatatagttatagtttatgaggaaataaacatcagtgtaaatttggcccacagtaaagatggtacgtgatgaaagttatttcattttaaaacctagatctttggagaggttttctaaccacatcagtctgg

SEQ ID NO: 61213 - DNA, 978 bp, Bovine  19866881905839
  misc_feature (1)..(1): n is a, c, g, or t
natatttctctctgaatttcaaaatatattgaataaaattatttaaaattttttgtgaacaataatgttgagacattaacaatagagcaaagagaatacactttatagattatctgataatattttgtcatttcctttttctatggtaaaaaaaatattaaaaccacacttagactcatataaaggtatgatatttgacagaaaaaaattagaactgctgataataaatcaattactttaaatatcctaaatgtaagtatgaatgtatataagtattgttatgtgctttaaatttagtttgattaatccagtccacatatgtttattttctactgtaatagataaatcacttattcgtgtgtcaatgttttgatcttctggaaggtatgtaccaaatgcattgatatattaattcttaaatatgtaatttgttttgctgtagatctactgatacctataaattaaaggtcttcttttgtctgaggaaaactaaaccttgaaatatacggagattgtatagaagatcttgagatgatacaaacatgaatatgatcatagtcttctcatgggaagggaggcagaaagatattggctccagattataactgaaaattctagtctgcattagtcttacaaaaagcgggtccatttcctgaaagcattcacccatcctgaattccttaagataggtatttgagagaagcaatgatttcaaattcttcaggagttctgaaaagaaacaggatgcaagtaaagtaatggggagtccaatccactccttagtctgagaaattaaaccgtcctttagaattcagctgttaacctttatctcaacttagtaccaagatacattgctaagtataaaaagcagttacacagtagtgcatattgtagtttgtgagtgtgtgtgtgtgtgtgtgtgtgtgtataaaatacatttagtctttgcatatgtttaagatttctctaggagaatgc

SEQ ID NO: 61214 - DNA, 1644 bp, Bovine  19866880452375
  misc_feature (1)..(1): n is a, c, g, or t
ngtggcctagtggtaaagaacctgcctgccattgcaggagatgtaagagacatgggtttgatccttgggtctggaagatcccctggaggagggcatggcagcccactccagtattcttgcctgggaaatcccatggatagaggagcctgatgggttaccatccacagagttgcaaagagtcagacatgactgaagggatttggcatggcacgtgggagggcaggttttctaagagatgtgtatccttccctctttactgctggtgatgcaggacaagagcagaaggaagcctccatgtggtgatcggtacaatagcaaatgacgaggtgctgacaccaggcaaatgctaactagtacccagggtcacaatttacacatgaaacatgtaaaaacttctttgaatgcacattcaatcagagattttactttagaaataccaaatggaccataattcacctatattttaaaaaatcttccatatcaggtactgcttatctcctgtgaggtattgaaatccttacatttatatgccaggataaaatattaatagtaagtaacaacaaccacggccaccccctcaaaatccacaacaaatggaaaggtaaacagaccctttataattaaatctgtaatgataaaaaatcaacgttagataataagtgtctttataaaaaacagtctcccaaatcacctaaccattaaggcatttattttagtttatcagttgacagtgacttttattcctcaatgagactcgtacttctcattctttaaaaggcagtctttacagggataatacaaattaacaagacaagtcattcttggaagaaagggttgggattttgtcaattgatctttaacagataaatcagcactatgacttacaattagggttaaagatcctagacaatatttgcatatgaattcctggaagaatgtatgaggaacaaaaataaagcagaatctagtgtatactaacatatttttcaaaatgatagctcttataatcaaatatatttgagacatcattttatttatcatactgacaaacatttttaattttttaaaattaaaatcaattctattagaagtttattattttttttaagaaaattaccatcacaaatcaagattttgaaagctacgcaaccaagagatcagatgtaatattgcaattaaatgaacaggctggatgaaggttactggtcacacatattacataatattgaataatctaaatcttgtattgtttcataagatgtcaatgaaattactattaagaatataaaatgcttgaattaaaacaaaaccaaacaggaacatgaaaataagaatatattatttcaatatcacttacaaaagaaaaaacattcttatgaagggcagtaaaggaactcgaaacttaacgagtttagtttgtttttaataaattccacttctgaaataacatattaaggaaatgatctagaagtagaggagaaaactacatgatgaaaatttaaacggggactttcctagtggtccaatggttaagaatccacctcccagtgcaggggggacactggttcaatccctgttcaaagaactaagatcccagatgccacagggtaactaagcccaagagctgcaaaaaaagaggccacg

SEQ ID NO: 61215 - DNA, 1581 bp, Bovine  19866880871181
  misc_feature (1)..(1): n is a, c, g, or t
nttgtgaaaaccctcctcccccctgccctggcgcctggcaccatcctagactgacagtcagtggccaacaaattgttgttactcaaagtaattaaagtaattaagcacattgggttattgcatgagagtaataacttacttaatggcccacttaaatactttttaatgtcagtctgtggtctgctttagagcgcctgcattttaaagtgagtgagattctggatcttccactagctccaagtcttgattcattcgtttattcattcatgtatttgtattttcttgagctacctctttggctagtccctgtgttagcaacagacacgcagtccactggacttcactggcctgtggttaagactccatgctccccatgcagagggcatggtttcgatccctgatcaaggaactaagatcccacatcatgtggcccaaaaatttttaaataaaaatttgtcatttagttgataagtcgtgtccgactgcttgtgaccccgtggactgcagcacaccaggctcacctggcctctccactgtctcccagggtttgctcagattcaactccattgaatcagtgatgccatccaaccatctcatcctctgttgtccccttctcctcctgccttcaatctttcccagaaacagggtcttttccaaagataaataaataaatctttttccaaaaagaaatacatagaaatccagtacatgccttcacacaactcacaatctgcagaaccatcttgacagctttaaatacagatataataaaggtatctattcattgcattggagaaggaaatggcaacccactccagtgttcttgcctggagagtcccagggatgggggagcctggtgagcttccatctatggggtcgcacagagtcggacacgactgtagtgacttagcagcagcattcattatacaaatgaagaagacagattagcttaatacatggacactaagggtgaattccattggaaacacatagccatagacatggaatctctccccacttcctggccctcctaactggtggctcagagacaaacagttattccctaaaggaactgaggaaggctgaatgattcctgcactgcaagctggcattgtaggaacacagatctggaagaggctttggtgggcccttggctccatccaggaagaaattaatgacctttgaaagcagcatttcatgaccttccatctgtctttggcctcaaggactcctgagtataaacacagatactacctagcaatgattcaagccattaggtcccattggggaagtccagagaaagtttgttttggtgaattcaggcttgctctggtaagaaatgataaagggagtccctcatgctgaaataaaaggatgctggagagccacttaaagttggataaataaagatcctcgataaaagtaaatacatgggccagtagaaaagccagtattatttttattttatatatgttttaaaagacagacacataaaaatcaaatcatatgatgctggacacagtgtacagatgtaatcttttgtaacaatataacattaaagaggtggataaggaattgtat

SEQ ID NO: 61216 - DNA, 2229 bp, Bovine  19866880974007
  misc_feature (1)..(1): n is a, c, g, or t
ngcacatgctttagcttatacatttgtttcaccctctacgggggaaggtggccctaatagtaaagagcctgcctgccaatacaggagatacaagagacacaggttcaattcctgggttgggaggatcccctggagaaggaaatggcaacccactccagtagttttacctggtgaatcccatggacggaggagcctggtgggctacagtccctggggtcacaaagtgtcagatgcaactgagcatgtgaacacacactaagggggcagtggtctggtggcaccccatcttctccagacaaactgctttccgattgttttcaagtaagaacgtgcaaatggaaaatgagtggaaagcgggctgtaacagatgtctaatatcattaaagctggctccaaaagaatccagatctcagattggtatattaatgctctatttatctttaagcacagatggatatttttattagtattactttgtttatctggtttcaggaaaggttagcccagggggcagatgcctcattacgagagcacattcctgccgagagtcagaggagaggggttgccttttcactggaactttaattagaaaagccaaagttataaatgttggcagctctcgcccaatctaataaggccagttgcaacaacaaacagaaagacgaatagggcattggcaagccagtgcctccccgcctctcttcctcagcaacccaagagaaaaacaacataccaccacctcattcccagatgtaaaacagatcaggacagagtccaagttctcagaaaacagatacttcataagcagctgttatcagtgaggacaaccaagagcaacaaggctgttatggatgcatggaccttccagaagcttctggatgaagcagtttctattatggactctgtgacttttattattcatcagcatgggatcctggggagaatacccagtgttcctgcatgatcattacctctcagtttgtttttctctagagctgatttctcattagtctctctttttagaggacttagtgggattatggatccactttcacaggaaatttctcactgggttggattgttgttgttgttcagtcgctgttatgtctgctatcccatggactgtagcatgccaggctcctctgtcttccactgtcccccagaatttgctcaaattcatgtccatagagtcagtgatgccatccaaccttcttgtcctctgtcatcccttctcctccggccttcagtctttctcagcatcaggggcttttccaatgagtcagctctttgcatcaggtggccagagaattggagcttcagcatcagtccttccaataaatattcaggactgatttcctttaggatggactggttggatgtccttgcaagtccaaggaactctcaagagtcttcttcaataccacaattcaaaagcatcaattcttcagcactcagccttctttatgatccaattctcacatccacacatgactactaggtaaaacatagctttgtctaggttggtcatagcttttcttccaaggagcaagcatcttttaattccatggctgcagtcactatctgcagtggttttggagtccaagaaaataaaatctgtcactgtttccattgtttccccatctatttgccataaagtgatgggaccggatgccatgatctttgttttttgaaagttaagttttaagccagctgtttcactctcctttttcatcctcagcaagaggctctttagttctcttcactttctgccatgagggtggtgtcatgtgtatatctgaggttactgatagttctcgcagtagtcttgattccagcttgtgcttcatccagcctggcatttcacatgatgtactctgcatataagttcaataagcaaggtgacagtatatagccttgacgtactcttttcccagtttggaaccagtctgttgttccatgtccaattctaactgttgcttcttgacctacatacagatttcttaggaggcatgtcaggtgatctgtattcccatctctttaagaattttccacagtttgctgtgatccccacaaagattttagtatagtcaatgaagcagattttttttttcaattctcttgctttgtctatgatccaacggatgttggcaatttgatctctggtttctctgccttttctaaaaccagcttgaacatctggatgttcttgattcgcgtactgcggaagcc

SEQ ID NO: 61217 - DNA, 2896 bp, Bovine  19866881172792
  misc_feature (1)..(1): n is a, c, g, or t
ngaagccttagccacaaagtgaaccttgtttcccccagtaaagaaccacagggtgaaaagtggatcctaaatatttccagggacacccatttccccatcctctgtgccacttctttcactcaggcaactattttatcatttggcctagattacaacacctcccaacacttcctgtctgcagtactgaccactcccccaacccccatcaatttcaaacacaatagtcaacaccatcttttcaggtacagacctgatcattctagttcccagaacaaaactctccatggctccctcctgcccagggagtcaagtccagcgctagcacatggcatggaaagcccttcacagaagctccggcccctttacctcccccaaccttctcttctcttcccctgacaggctctgctctcagggtctgaactgcttgttgggtcctcagtttgctgtcagttcttccacagtctcccacgtttctctgcagggacccatagttgttgccaggctgcatccgtcatcagtgcaggacttggggcaggggtctgcccttcattctggtgttctgtgtgacctcagctgtggagtctgcccaacaaccacccacaggaccataaggattcactacaagttcacagtcaccagcgtcaaaggggcttggaccactcactcctggaccaccccctttgacctctctagcccactggatctgctcctctccacagagttggtttttaatctggttcgctcttaaccctccccatggacagaggagactcgttggccgcagtccagaggattgaatagagtcggacacgactgaagcgacttggcaggatgcattctcaacccacatgcaacctccaccttccctccacctgggctggcgaccccatgccctcccacctcccagaacacccattccacgcgtcagccctctccctacagcacatccggtctgcatcttttggctgcgttgttcctatccatatctcaatgtgcttcatttcctccaaccccgcacatctcctgacattatcagctgatgtgaacacaaggtgagcatttggaaacgaaaggaaatggtctctaagacgacgtgaagtctggggccctcatcttagccagcatgattagtagcaggaggtgtctgtggcaaggttatgaaccctccagaaatctcccagtaagctccaaggaatttctattctaacagctgccaaggactataatcctatctttgcagaaaccatttttaaaatagttaattctgatggccagttttggagaacaggaaacaaataaatgcatgaatgcccactaaagaagacttatgtgaacagactaaatcgcaaatattttctttaagcccacctttgaactcagatttcacaaattaaaaaaaattaacctttcctcaactagtgatacttcatcctaatctaagaggacataagactagcaagttaataaattcctgcggattcctccacaactattaaaaaaacaggcatgttcactgaaaccattaatggtgataatacaacattctgacctctgaaatagtcccctaaaatactatacagagtttaaatgccacccagagcatagaagatgaacattttaaaaggcaagaaataagtaagatcacctttgtctatagaggaatccacagcagaagaatgatgatactcgacaagaaaaggtggtataacaagttgagcaataaaactggccaatctgcaaaggctcagatgctgccgtaataacatctggtcccagcggggttggggggtgggagccagagaaatcattaagccatctgagacgctccaaacaaagaaactgtaaaattctgaactataaagtgaaggaaatacacttaatcccggaggggttgcagtatgtatttcaactgggtgatcccttctccagtgaggacacggtgatatgccgaaacctggagtgacacagaatctcaaccgactggatgtggcccggagccagcccgcgccagcacccaggcacctgttggtttaatcctagcattactccagacacccaaggcgggtgggggtgcagagaggaggaggccaggggaatggggaaaaatacatctcattcattctgccgatcagagaatgcataccttaaaaaaaatagttacatgtgctttctgtaaatgttcaataacgtgttagaagattaacacatttcttctaagattacggtttattttttgaacttcagatcctagagggtgcaaagggagatgtttgtgagtaagcaactactttacttactatattatcttaagcaaagtgactcgaaactctcttgaatgaccctgtttccttctgtcactgagattctacgatgggggtacaattatagttgcgtttcaacttcaataaaatttctctgctgcccattttcccagatcattctcaaatagtcttctgccaattagctaaagttatttttaaataagcttttgaaagtctttgttgaaagcaggtgtattacaaaatgtgcttctttaggaacttatgtgaaagagaaaaaaaaaaaaactgaaatggtaaataaaaacaatgactattacatcaaaatagtaagagataaaatacttgtatcaaaaaataaaatagcacataaaatatactggggcattttcaaagctttaagatgggaacacaggtgttatatgtgtaagtcgtcactaagtggaacactttagacagcttttcacaatcttttctgttcctctattcccactgcttttctttcagtctaatgactggacatgcctcaatttctgtgtctcatatattcagaatatatatctcagcacagacgtgggccctatggttcctttgctgaaagacaggaaacggctgaa

SEQ ID NO: 61218 - DNA, 732 bp, Bovine  19866881400715
  misc_feature (1)..(1): n is a, c, g, or t
nctctgcacatacacgcagggcacctgctgttcgcaggctggtgcccctcctttggccccctgagcatgagaactctgctctctgcatagaacgccctggctcccaccgtcttcacattgcttaacttggaggagagcggatttcttcctcaacttcacagtttctttgggatccacgatttgcattagcatgtcataccaaatagaccacagaaataacattcacattctctattgaatgcctttccttataaactgccttcctagttttatgattggtataaaatttttctttttaatcagacaaattagtttcatatgtctccatccttttccgggctacttcatccgctccgggaaaaaaaagccctgagttctgagaaaagctttcattttcacagcttgtgcatcaataatatgacctatgtgagtccatttctagactccaatagtcttaagaaaattactgcgttgaggctgctgaaaagagagttacgattggggaaattcagattcatgatgaaagattttgagtctgcaacttagagaaaagctctgaaactgtcgcctccccagaccaaacgttcactgcatgcactgtgaacaggcggacaggtgctgtgacaggagaaatgaaggccaaatttgggcctctggtgcccccggcacaatgagttcaactctgaatctcaggatcccgagctgtgctcctgctcagcctctttctctgca

SEQ ID NO: 61219 - DNA, 2059 bp, Bovine  19866880462523
  misc_feature (1)..(1): n is a, c, g, or t
ntaatgctcaaaattctcccccctgccaggcttcaacagtacatgaaccatgaacttccaagacgttcaagctggatttagaaaaggcagaggaaccagaggtcaaattgccaacatccgctggatcatcgaaaaagctagagagttccagaaaaacatctacttctgctttattgactacatcaaagcttttgactgtgtggatcacaacaaactgtgaaaaattcttcaagagatgggaataccagaccaccttacctgcctcctgagaaatctgtttgcaggtcaagaagcaacagttagaactggacatggaacaacagactggttccaaatcgggaaaggagtacgtcaaggctgtatattgtcaccctgcttatttaacttatatgcagagtacatcatgcgaatgccgggctggatccaagcacaagctggaatcaagattgcctggagaaatatcaataacatcagatacgcagatgacaccacccttagggaagaaagcgaagaactaaaaagcctcttgatgaaaatgaaagaggagagtgaaaaagttggcttaaaactcaacattaagaaaacttagatcatggcatctggtcccatcatttcatggcaaatagatggggaaacaatggaatcagtgagagaatttttcgggggctccaaaatcactgcagatggtgactgcagccatgaaattaaaagacgcttgttccttggaagaaaagctatgaccaacctagacagcatattaaaaagcagagatgttactttgccaacaaaggtccatctagtcaaagctatggtttttccagtagtcatgtatggatgtgagagttaggctatagaaaaagctgagtgccaaagaattgatgcttttgaactgtgttgttggagaagactcttgagagtcccttggactgcaagatcaaaccagtcaatcctaaaggaaatcagtcctgaatattcactggaagaactgatgctgaaactaaaactccaatactttggccacctgatgggaagaactgactcatttgaaaagaccctgatgctgggaaagattgaaggagggagaagaaggggacgacagaggatgagatggttggatggcatcaccgactcaatggacatgagtttgagtaagttctggaagttggtgctggacagggaggcctggtgtgctgcagtccgtgaggttgcaaagagtcagacacgactaagtgactgaactgaacttgttgtacactggtatctaatacaacattgtaaatcaactatactttaatttttaaaaattatttattatttatttatttatttggttgaactgggtcctagtgtgggatcctggcatgtgggatctagttccctgaccagggatcaaacccaggccccctgcactgggagtgtagagtcttagccactgaaccaccaggcaaatccctatacttcagttttttaaaaaaaattcctttaaaacatcaaagagcctgagaagatagtaagaaagtcctagggaaatcagaaactgagagaaatatgcagaatactgaggccacacttggccacgaagggaattgatttattactgccctaaatccctacagataggggtgttccagtggactgggaatttgatggcataatttatcttcacccaacttatgcaataatgaccaaaagaacaggctccatttccacaatgaatccgttatttagtattagttgtgttcaaagattaggatgttcagtctggaatgaaaattggcattatataagagggtactggctgagcttttagatcatcaactacttgacatgatctcaagttcttatttcacagtcagttcttaaaccatattccctagtccttctacagatactagaaaagatgtcaaatttcgaagggcaggtcctccccctcattctgctgctaacttttttggttgcttttcatttcttccaccagagagatgtgttgtgaaattgagtttcaataccattcttttccaaactgccagctcagatacgatcagaaaacaggtcaatg

SEQ ID NO: 61220 - DNA, 1545 bp, Bovine  19866880541223
  misc_feature (1)..(1): n is a, c, g, or t
nctgggccctttgctttgggagctcagagtcttagtcactggaccccctgggaagtccctgaaaactattacaattaaaatgggtaaacaacaaggtcctaccgtacagcacagtaaaccgtactcgataccctgtgatcaaccagaaaggaaaagaatataaaaaaggaatgtacatacccgtataactgggtcactttgctggacagcagagatcggcacaacaatgcttatcactatacttcaaaaaaaaagtcctggggtgcttactttataatcacccctattttaaggatgagcaaactaaggctcaaagaaccctgcctcactcaggatccacagctgaggtggagggagtctcagaactcagtcctctggggtcactggaagctgcctaggggtggcacttttcagagcaggggtcaaccctggggctggaagtggggcctgtgtgacttcaggctctctttcccctactcagggctgtggggtccctcctccacctctcccacccctcagccagcaaagggctcaaagcatggcatgatggggactgcaggactgaggtttcgagaagctgtttactctaggtcttgaattttaaagagtttaaagtccaacttggaccctcagctcccgggatgcctgtaaccatggcagcagctcatgaacaatagcaaatatttgctgattgagagagagagagagagagaggtagggagggaaacaggaaacagggctttgtcctgggtgtctgcagatggcctgggggctgtccccagggggcacacggatgcttccagtaataactcctctactgaggggggcacattccccatctctggcccaggccctgggtttctgcctgaaacatgccttcaggacagcacgtccagggccagattctgggtggacctctgcactaataagttccttctttttctcgagcctcagtttttttcatctgtaaaatgggaataacagacttgtctgcctttttagggaaagtcaggtagcttaactaaaggtcagctgccctggagcatcatcatgaggaactgttgtaaagaccaccccctcaattggattccagattgaagagatgtcaggagctccaggccaccgtccaggtggcccagagacgagcagtggcttgctcaaggacacacagcaagagcagctggatccagaagccagccacccaggcctgctgtcatcaggccaggaggccctccccgaccagctgtcaccagctgagaggttgtgaacaatggctgtcgggtgcttctgtgaggacatgcttggggcttaactggaatctgggtcagggcctggacagtgtctcagcagagagaagccagggaagcagactctgagctgctgagaaggggttcagcgttccctgcagaagcctgaggaaggaatcagggctctcgccacaggccagccccctcacctgggctttccaggtcagccgcttcatgtacacaccttgatttgtaaataggccaatattttaaattacattctagtaaaaaaaaaaaa

SEQ ID NO: 61221 - DNA, 2072 bp, Bovine  19866880566517
  misc_feature (1)..(1): n is a, c, g, or t
nagaatgcctggactcactgatggccatgggggtcacctttcagggaggggggtcacctgaccagcatcttgcctgcagcaggtgagggggttgggtttgatgctcctgctgtaggagtttgctaggcctgcggtgaaaagtcccgcaaactcagggagctcagctcatgctctgcgatgacctagaggggtgggacggggcggggagggagggctcaggatggaggggatatttgtattcatatagctgatatgtgtgtatatgattgtgtggcagaaatgaacactgtaaagcaagtatagtccaataaaaagtaaattaaaaaaacactgcaaactgggaggcttaaccaccagaaacacactgttcctcagttctggaggttggacgtccaagatcaaggtggtcagcagcgctgtgctcctccctgtgggcacccgttccaggcttctctcagcttcagatagcttcttggcttgtggcagcatcattctagtcttcatcctgcattctctctgtgtttgtgtccatgttcaaatttcccctttttatagggacgccggtcgtattggattgcagcccacccaccctcgtccagggtgacctcatcttgactaatgatggctgtaatgaccctccttcccagtaaggtcacacacagaagaactcggggttacgacgtcaacacgtgactgcggggaggggagacatcagtcaactcatgacacccaccaggacagagttcaggaggcaaggtggcccctcaagatgaaacgagagagccatccccagaaaagaggggaatggatgctgagctgtttgaccacagttgccctgggggctgtgagattcactaggtcatgagctgtcagagagccagggtgtaaatgaacaacttgccttctccgcaacagaaccttgacttccatcaggtctacacgatgcacctgctgaagaggtgttgcctgagcacctactggcagccaagctctgctcaaggcacctggactttggaagtgaagacagagaaaaatctatgccctcctgggacttccattctagtgataactgccctccccaacaccctgaccatctgttgattccctccagagggaggcagggcctcatttttcccactgtggtccttcctgtggtttcagccacacgatcccagcaacacttttcctggggggggatacttgcctccagaggtgtcagcccccatcccccaaccccatccatctgtcttctccgcccccaccccggccccccaccccgtctttctttgtctcaggaactaaaacaggaggtgagtttatcagacgcaaattgctcaaggacctcattcattttgtgcagtaattaaatagaagctgtttggaaatataattatagattggcccatcaaagcaaattaaatctttgaagagtaatggcctaattagctgctagattctgccattaaaaaaaaatccaaatgccctgttgtcccgaaccaggaaatatcagggcccagctgtgaaaggcatcaaagggacattaatatcaggtggctgtggattctgagcagatgaggggcctcagggtgtagactcatttatcaagattaacctggctggctagactaggggtcctcgtttatttatttgcttcacagagtcttaacagatgtgtatacactatccactctgggcttcttggctgcgtcccccttggacccccttcctctccaagccctttctcttccttgttaatgctgactctgcatatctcttctgtatcctcaggaccaaccccgtctctgccacagcctctcctatcccaactctcctcacgatcccagttttccattgatctgggaggtaggtgaggctccggaaagttctggaacatgccaggacgtctcaggtccttgcccctatctgagccttgactctatgtaatgggtgcctgtggggcctggggctcccccagcggggctgacaatgctgccacccttcaggtcctcttgtagcaccagcatcctgactttccccataggtaactgcactccacccgtggtccacgtgga

SEQ ID NO: 61222 - DNA, 1353 bp, Bovine  19866880692685
  misc_feature (1)..(1): n is a, c, g, or t
nacccgctcctttgagcccaggatgatgcttgccacgtcaaagatgacggcgagggccacctcccccaatcttgcagagctccttctcctcgtacgccatgcagatggcgatggcgtcgatgagcaccagggggtccatccctttggagccgttctcctcgctgtggaacatggcggtgctgggctggctgcccacctggtagcaagggagcaggaaggggcctgggaggagaggcgggcggcaggcgggaaagccgggcttagcgccacagacacactcgtccctccaactgcaaaactacccgtttccctggagattaggaatttaataaaagccaaccctggtacctgaccaacttctgttaaaccgcaatcatttacaaactaagcaggtataacgtaactgactccattacacagtgttaactttcagattttctcaatcacagctcacagacagacttgtttaaagggagaaccgtaatcaggtctcttcgttgaaaaaactcattaaccaggccacgaggcacaatgtgcgagtgacgatgggttatgcttcggacattcctgacacacacagaggaaagagcaagagcacccagctctaaaacccaatccgcgcaggaggggttggagcaactaacaactcacacccggcaggcaccggcccgaggcgaggcggcagtgactgagacgcgtgcgggtctgccgggaacactgggagacaagctccatgttaaatgcacggcgctgactgttcggacaggaagactttaaaaaggggggagttctgcgttctgcagtgctgggagaaaactacttgtcgcccaggataagaggtttcgaggacacaaagtgctactcaagaggtcatgcccacgaccggcgccggtctgggagcagctgcaaaactgaggctgagtgttcaggaacagcagcgggtggtgctgtgacatcttcactgtctcgtacaaaaccaccagtctgcaacagattggaaacactaacagaataggtccttcggcacccagagccggggaaggcctgaagcagaggggaggagcggccaggcaggggaaaaggcacagatgagggtccaggagcagactgaggagccgggggaccggggcaagcggtgatgggggctgggcctggcaaccaccaccggggacagggggccagcaggggcaggaccgcacagtcaccgctctacacgcagaggtccaaaagtactcggcccccgaaacgaaaacaaagggccaaaacgctaaacccaccgtgttaatattttatacgtaaaaccaggtgacaattttccagtgaatacagcacctactgctaaacaccaactct

SEQ ID NO: 61223 - DNA, 1122 bp, Bovine  19866880698809
  misc_feature (1)..(1): n is a, c, g, or t
nctgcatcctgcttattgaggtagcagtgtaacgtggcacacctttcctcttcctcagcctggaaacactagtagagagggctgtgggcaagtctgttctctgttgttggaggtggagaacgtgccgtgttatcttcatggtcctgaagaaaggggcctcctagtactgtggggctgatgttgcatacgtgggcaggatattgagcgtccctgccccacgtcaggcgtgttttattaagaggaatgttgtgtttgactttaggaaaaatgacttctctgctttttctgtagaaccgctactttgagaaccctcaggtgatccctgagaacaccgtccctcccccagagatggtcggaatgatcacgacgatcgctgtgaaggtgaaccccgagcgtgaggacagcgagacaagaacagtacgtgtctcggttgttctgctcctagctttgcttttatccacatcttctcccccggtggaggaagcccgaggtcttgactttttagaccctaagctttttggtttttcataaaaattaaactcatggaggcatttaaaataagcaaataaatgtgtgtgcgcacaagagagcctcactgattgtgctctgcaggtgtgcgcgtgaactgtcgctcactactgatgcagacatgcagaatcatggtggaatgagagcagctaaccctgcagggggccccggcctgttcttagcttcaacagtagtgaagtccctttaaactacgtataaacctgtagttcagtgcctgcccgtgtgggctccggggacagaagttctagaatgttacagctccaccacttgcgttttctcactgtaggaaagttcatgaaccatgagttttgtgacggtaacagtgttattttctgcagctcatgtgttaaatctatagcactggccacatagggaacatgtattgaatatgtactatgattgtgttttatgattaaatcaagacaatcatctgtgtttgttctactgcgatggttttgcagactgtttcaatatgagcataggaaactacatttttagtttatagggaacaaagctgtcatttctttgctcttcctgaattacaaacttttttcacttcccttttcctatcca

SEQ ID NO: 61224 - DNA, 1796 bp, Bovine  19866880740702
  misc_feature (1)..(1): n is a, c, g, or t
ntttgtaagatggggaggcagggggcattccaaagtggggactgaggtggggagagggtaggtctcagagaatctggctcttgtgatagccctgtggagcagggcatgtttccttccagaagagactgggtgtggcagggacctccctggggactccagaacatcttggggtcaccctagggaaggcactagagacagagacaggagcctgggaaccccacagtccccagccgcaagctctgagctggggcaggaggcagaagatggacccgcctccatcctgtgggagaagcaagagctgcagagatggaccgtgaaggcttccacccagctgatatatggggctgcttcattctctcgaagaagaagcacgtccccatcagcgaggggctcattggggagggaggctttgattcctcagtaaacaaaccacctcattgaatggagcatcgtggcacgctgggcaccccccacaggcctcctcattaactctcacaatcctcaggtaggccgtttgtctctgtctttaaaaagtggggaataagctcagagaggtagagtgactacccaaaagccacgcagcatggggatgactgagttggtattcaaacacaggtttctccggctcctagtggattctaccaacccactgtttgatatctgctcctgaatcctgatctcaagaaataaagttttgaggttggagaaaatattccattttcaccttgaaaggatgagtctcctgtccccagagttcaaaagggcttcagttactcttcctactgtcatatttcccaggaggaatcaaaggcgctaaatttatggtgtctgaagtgagatttatggtgtttaaagcgacttctcgagcatcccaataaaggctctgatttataactaacgcattgttttaaacgcattataaatgataaaaatcgggcctgccgatgcacctcatgagaagtcatattaagggaggaaaagaaacggtgagattagatgttgcattaaaagatagagtgatggattaaggcccagagtgtgaatttagtgtgacttgccagaaaaagttggggagctgtaaatctaaagtgacaatctgtgtacagtggaccaatatttgtcacttttattatactttgttcagaattggtgatgggtcattatttagacacacacaccaacaatgctcaataaagctcagaagtggaagcttcttctggtaaggatacaggctaacagacttccctggcagtccagtggttaaaactccatgcttccactgcagggggtacgggttcaacccctggtcaggaaactaagatcctacatgccctgcagtgcagctccgccccccacaaaaggggagggggatacagggtaaaacctcaactccaaaccacaatgtcagctcagaggccattgcataatggaagattctccccgtcgtattcagaaaacattccaaacccataaaatgtgggaaaggctctcagagggtccccaaccattctcaggaagcgaggggagggtgacacccacatcttccgagtggcggaggcccacccccgccccatgtcagcatcctcatcaatagcaatagcagtgacgatgatcagagggcctgacattgctcctggtcacttgttcaaagagcttctgagagcaaaggtggctggaaccaagggcatgctggctcttcaccttgggaggtcgcaagtccctgtcttgatcagagatactaggctagattggattgttgttcccaactctctcctctctctgtacctggataacag

SEQ ID NO: 61225 - DNA, 1407 bp, Bovine  19866880824548
  misc_feature (1)..(1): n is a, c, g, or t
nctttgaactggcgatcttgacattggaaacatcaggctgtgaggctgctggagaagggacttggggaaggtggatttctgagacgacattcgttacttcatttaaccagccagccaaccgatcaaccccagggctgactgaatgtatcctgtgtgtacagatatctgcaaggcaaagctcaaggcccccacagcaaagaacaaccagtcaacgagaaatggggcctcctggtccacccactcatgaagagctgccccctgcctaacattgctgagctgagcttagagtctgatcccctaccagctgagtcttcacaaggaaccatagtcctatctgacacccatttccagccttgagagaggccctgagcctggagaacccagctcagccacatccgtattcctgacccacagaaactgagatagtaaatgtcctttcagggtgctaagccttagagcaacctgttatagagcaatagatcacatacacagggtgatctaacagccatttgggacttactcttctaattgcagctgccattagcactatcctagccctctatgggccatgcccaataaattttgatcaagcaaagatcacaggctttcaaccagagctgagcattgtcatcacctggggaaattgaaacaataacactgcaaagactgatgcctggcttcaaccgcagagattcttcattatttggctgggagtgtggtctatccattaagggttttaaaagatccccaggagattctaactggagtaaacttgggtaaccactgttatagacaatagtttttccccttagttcctcttgtgtgctgtgctcagttgctcagttgtatccaactctttgtgaccccattgactgtagcctgccaggctcctctgtccacggcattctccaagcaagaatactggagtgggttgctatttcttactccaggaaatcttcctaacctaggactcgaacctttgtctcttgtgtctccctgcattggcaggtgggttctttaccactagttccacctaatcagtacagtgggtcctcgtgacacatgattctgtatttgtgaattcacctacttgctaaaatctattagtaaccttatcaatacttgcagcactttgcagtcctttgtctgataccaagtgagcaataaaggacatacatggagagaatccaaaacacataaatcagctgacaaagtccgagagaagctagcctatgtctgcttttccctggcctgtgtccacttacttacacatgcatctccctgtgcatctcctcacaggttttttgacacttcgcaggtgtgcggtctgggccctttctccttgcttctagcctcttccacaggtcagggttggggggtggtattttggcacctctgtggtcgaag

SEQ ID NO: 61226 - DNA, 2148 bp, Bovine  19866880930906
  misc_feature (1)..(1): n is a, c, g, or t
nttttcctctcttctgctttcctgtgggctggggcagggatggcagagaaagggctgcctgtcgcctttatttgttcgaggtgcgccgggagaggccggcggcctcctggtgtgccagttggcctgtgccagcaccaggccctgcgctgagaaggggcggctcgcggttgacgctctgccttcatcatgttgaaattctccatttctgaataaggggttctgcattttcattttgcactgggccccacaaattcagtagtagttttgagaaggtatttgaaccaagggcgcatgaagtgtcatgcagatgacctctccagagtcgtgctcttatgtgacctttgatcgggtgggtcctgagcgcagcctgtgagtcactgattcagcttcctcctgtgggacgggtctcctgagaacctggagaaacacacacctgtctgccctgccggtcagcttcctaacactggtgttctctgctgccccctgcaggaccacttgtcttacttccatttcgtgggtcggatcatgggtctggctgtgttccacggacactacatcaatgggggtttcacggtgcctttctacaagcagctactggggaagcccatccagctttctgatttggaatcggtggaccctgaactccataagagcctagtgtggattctgtaagtaccgactcagggaactgaaaattcacctgtcacctgtcttagggtgcaccagatccatgggtgtgaaactggagaaaccaaccaccagaatcataaaaactgatctgacgaaaatatttaattgacttactatctcatatactgtttgaccagcttctcttcatggactagtttcctttgttgtctccttgaatattaggttacgattgtggctgttaatccccaggcctggtggtttttttttttaacactctgaggtgtctcctggtctctagagggaccaagtgaagtgaaagtcgctcagtcgtgtctgactctttgcgaccccatgggctgtatagtccatggaattctccaggccagaatactggatggggtagcctttcccttctccaggggatcttcccaatccaggggtcaaacccaggtctcctgcattgcaggcggattctttaccagctgagccaccagggaagcccctagagggaccaggaagatatcaaaaaagtcctgatattcagtcacctttaagattatcctaaaactcttaaaagcaacaggcacacagctacatggtcaccgtggatgtcgggggtcctcgtgaatgggctgatttcacaggaatgggaggtccacatcctcccacatgtcctagctgctaaggctggggtgcgggggtcaggcctgcatcctgtggagaaccaccccagctgtgtttccagaaatgtggcggacaaaggagccagtcctaactttcaagggcttctctgcactgaagccttggaaaggctgcctggaggcagggcggtgatatcttcttggtgtggctgccccttgactcagtttccccgtcacgcttccctcttgtctgctcggagacttggatgccatgtctccggaggtcccagcagcgtcgctcccgtcaccctcctcttgaggccagcctgacccccgcctgtgctcccccgcagagagaatgacatcacccccgtgctcgatcacacgttctgcgtggagcacaatgcgttcgggcggattcttcagcacgaactgaagcccaacggcaggaacgtccccgtcacagaggagaataagaaggaatatgtccggtaggcagtgttccggggcacccggggcggggcttgccaggcagcgggcacgttgagatggtcgaggctcctctgctgcgtgagcctcccttcccatacttggaccagagtcacagtagagacttcccgaaagcagtggtgtcagcagtgggagctctgagtggagggctgacctgttaaagggggattcacgaccccagagaccaaggcggggactcgcaagggagcactcggtgctgctgtgacggtgatgaccacaggagagcgcgggggaggagccgaagcttcctgagctcagtctaagggcatcttccctccggtctgtcctccccgctctgaaggcaaatagctgactagcaactcca

SEQ ID NO: 61227 - DNA, 1047 bp, Bovine  19866881025866
  misc_feature (1)..(1): n is a, c, g, or t
nctggaccgcctgccggagatgggctccaacgtcgagctctccaacctgtatctcaagctgttcaagttggtcttcggctctgtctcgctcttcgcagctgaaaacgaacaaatgctgaaggtagagtcaggcccagcccgcgcgttgtgttgggggttttttttgttgtcgtttctcaatacttcattttgagcagaaaccggagtggctctttatattttcaaacacaataatattaaatgaataaaggtgtacaaccagttggagccaagtgtggaaaacactgcagttttaaagcagagctgttcctggttgcctgctgacccaggatgaacacgtgagcagtctcactcgcagggcttgtcagtagtctcggcaccactgattcttcatttttgaagtcatttcttacatgaaccacacaagtagggtaggagcacatcatgttcttttaaaagaaaaaaaatcgggtgacaccaaagaatagaagaggaaggaacatctgacctctcagagccgacgagaagcagttggctgttgagcagctcccatcacatccccttctttcccgggtgctgtgtctgtgttcgtaccttcttgcgtttggtgcacagacgccctgtttcaggcctgtttgctcattcccctctgaatcaagggctgcagccagcttgtgtccctgtattaaggccgtccaggagggtgtgtttgctgacgcgctcctccatgcgactgaccctgtacgtgtcgtggtgtctcatcagttacttgactccagcaaatggcagaagccagtgcatgcttatggcagccactgaaggcagcgcgtgggacaaaaaaccttatcaaaattctcttctactgaccgcaggatattttagtttctagaatgctgagtattatcagttctgtctgaagagagatgctttcctgtagggagaaggtttgagaatgtaaaggagacccgttttctgctgaagtaagtgtgacgtaaagcaccagtagtctgtgcttgtgtgagacagtttcctccacttcttcagtta

SEQ ID NO: 61228 - DNA, 1748 bp, Bovine  19866881085704
  misc_feature (1)..(1): n is a, c, g, or t
nttaaacccgaggagtagacagatgaaggagtttcagctattaacttcattttgcattctgtaaataaacatttataaataatttgttaactttacgattttgcagtacgttactgcaaacatgcatgtttttatgcagcttctaagcttcacttgctcgtttcttcatgtctgtagataccaaagaaatgaaccatggcccaaatacctaactgggaattgactggtcctaaaatttttaagtgatgccctaatagtagagtgtaatgtaagtgaattctccaaattgcaaggccccttccctttaagcttccatatatgatacagatatgtacctaccggtctacacgcatacgacctggaacgctcttccctatgcttccggcctggccgcctctgtggggccctcctgtagctggttcctgctcctgtcacgtggcggatgcctgagttttacctcgtttcccctgctgtaaaccggagctccacaggctaggggtgccgtctgcttggtcatgtctctgccctgatgcctagcctggctgctggctccaggcagactcgggggaccgccacggcacagagtaacaggaatacaggtcctcttgttggaatgaccagttgtaggacatctcctgctgtatcagggtaaattcagccttcctgtttatagaacataagaaaacatgttactctcatcactcatttggctgcactatttcagtaattagaaacattgccattctcatgttgagtaggttgggaaatgatcatatataggttttcacctattttggaattgagatgctcccgttgtcaagaaaaaaatgtctaaggatgtattttttttttaacagcaacatctgcgaaagtggatggaagtggtggtcctcacccacaaagggggccagaggagtgacggaaaatgtgagtgactcgtttgtttccgggggcagccccgccgccgggcactgccgttagtgatgcgaacgtcggagccatgctcttaattaaatcccggtcagaggtttagttgtgtgtgactctagtccatgtaacctgttacacatattttgttagcgttacattttcgcttttatttctcttaatcattgaacgttcctttttgtgtttctttaaaaaaatctcccttttgttcactttaacacgatgtttttgttgatgagaatcctgggaagcttgacatgttagtatttcacttttactagcttttctttaaagtgaataaagcgtgctttctggacggttcttggcagctgtcgtttgcacgggggtgcagtgctcagctgctgttcccactgctttccgccctcattgcctcataagctgagcagaggtcttaggccttcaccacgccccgaggacaacgtgatgaagcatcacgtgagtcctggcacgcgtgttctcgaggtctgaatcccccacccccgttgtttgcccaaaggccagatggcccgtacttcaaaacataattttttacaatttcgagggaaaaccactctagttaaatctgtaggctacagtccatggggtctcgaagagtcagacatgactgagcgacttcactttcactttaaatcttttaaaggatccgacgtgggtcgctaaatgaatgcttcttgctgatttgactctaatcttattcacagatgttaatactcttttaaaatatcttttaagttgatgtctgtctcctcggtgggctgtgttgccacaagctcctgttc

SEQ ID NO: 61229 - DNA, 515 bp, Bovine  19866881098087
  misc_feature (1)..(1): n is a, c, g, or t
nccggcgaaggagaaaaccccgcccagcctgctacgttggaggtggcctcttcccgggcccgtccgccgcctgctaagggtgcccccaccgccctcgctgcagcggcaagcgtccctcctccccagcttcctggctccggagaagacattcaggacagaaagagcccagagacgccggtcacctgcctgcctctccctcccgggccggcagccccgccccagcggacgcaggcttaaaagcgccgggccgagcccacccgggcgtgacgcccctccccgctcccgctgcccgcccaggccgcacccactggagggcggtgcgcccgggcctagtcctcgggcggccggcgcagcggctttaagcgggggcgggactgcgcgccgtgcagcgcgacggagactgggactcggccgggggcctctgcgggcggccggccgccgaggtgggggtaagtacggggaccagggcggggctgcgccagagggcagcggaactgccccgggaggcgcgcgcg

SEQ ID NO: 61230 - DNA, 946 bp, Bovine  19866881121113
  misc_feature (1)..(1): n is a, c, g, or t
ncaaagggggaggtcttgattctggttgtgcagcttcctggctccacagacctgggcttctctgcatctgcctctgcactcacacaccttcctccagaggctgcccaggatgtttgggagttggcggaggagggggagtgtggggtggggaggcgggtggtggtctgcatgtgcaatgactccacgggctgtaggggactctaccagccaggatatttgcaaacaccatgcacaggccagcccgctttctggggaagcatgagaagtggagaaggaagaggagggtggccttgggggcctgggctgtatatggaaagcccagctgggatccaggttgcatctgaaagtgttttgaaggtagacagcaatggcaacccactccagtattcttgcctgggaaatcccatagacagaggagcctggggcgggggcggcgccagggttgggggtttggggagttacagtccatagggtcgcaaagagtcaaacacggctaaagtgacttagcatgcacacatgccatggaacattctaggtctgttggaacacttcctgcaggctggaattgaaggaatgaagaaggaggggcattctatccctgtctcataaaaaagcagcacaagccatcctcaactactcctggccccatgaaaggcctaatttccatccacctataactttattaggctcctccgagctattcatcagacaagcctgtcttgaaaagcggtgtgtagtgacttttattaaaatgtcttccccgtggctcacacattaggttttatggtcctgcacacagatcagatcagccttcacaatggtaaagagccagctcccttgcgctgggacccgcagaggttacagtgagaccctgggagaccagatgtccggtcgcaccgtttccccggaacatgggcctcagcatcggaagggtccttgctgcaac

SEQ ID NO: 61231 - DNA, 524 bp, Bovine  19866881153052
  misc_feature (1)..(1): n is a, c, g, or t
nccccacgaggcccgtgcccccgccccctggacctggttccctttcgggggtggcccaggccccgcccttcctccgtggcagctgtgcttgtgtgtgtgttgggggtgccctggtgcccagcacgggcagccctggggcgggccgaggccaggccacgctcctgaacacgctgtcccgcatctgcaggtgtttgggcggagccagtctctgccgggcgccgactcgctgctcgccaagcccattgacaagcagcacacggacaccgtggtgaacttcctcatccgagtggcctgtcaggtgtgcatccccgcgtccccgttagggtccttccgcacaagggctgcccgtagactgagtgcattcagccgtctgaccgttcggtcagaaaaaaaacagacaaaccaggtctgggagcttgtcttcagtagcttgtccctttcttaccagatctcgtttggtgacatgctgatgttcctgaaacccgactgtgttttataataggattttttaaactttttcatca

SEQ ID NO: 61232 - DNA, 905 bp, Bovine  19866881246242
  misc_feature (1)..(1): n is a, c, g, or t
ntcttttttagtgccatgtgttttgcatttttgtgctgttatgggcctgaccaagaaaatacatgtgttagacaaccttcgctcaattatgagttatatagagctgtttgccattcaatgttaatgaatcaacaatatgtagtgaattaagtatctttaatcagaaacacacataaaacaaagttatatatttctcatctgttaaaaatgttgtaaccagaagttggaggaggaatctaaccctatctttcctctagaagtaatggtttagtattcattaattcagggtttgctgcatctttatacaccataattaccatgaataacaagaattgactgtacttcctccttttccctggcgatacttcactacatcaaaactgagaagcctaacgtgaaacctgataaaagcagaaaggtggacaaatgctatctattatagagatggcaggactcatgtggacaaaggcagtcctctgttgttcttgctacactgaggcagtgggttgtaatccaaggttggaagaattaatgcacttttcttatgctgtggcatgtattattatgcttatactcagtgcgttttgtgtatctatattttttgaaccaattacaaaggtaaaatgcaaagatgattcaaaacaagttgaaaagtaactaatcttccgcactttcaacagaccaagaatttttccccttctttgatgcaaaaagtatttgacatgccctcattgattcataagaagcaaaaagttaggaggttactttcaatatctcataaggacatgcaggacccaaggcagaatatagtcaataattgtcatagttcctttaagacaattttttttttttcattttacttaacaattttataatttggcatacatttaatatacgctttccca

SEQ ID NO: 61233 - DNA, 722 bp, Bovine  19866881318197
  misc_feature (1)..(1): n is a, c, g, or t
naaaaaaagctggaatctcttttgcacaccaaataacagacgccaaaaacgtaaagtcgtgagtttattgcatatgtaacaaaatgaacctgaccgccggggtccagcctgctgttcaaccactgttttgtgtttccagctggttctataaccacattaaatagaactagtattctttaaatacttttgattttgacataaaacattagtgtacaactttcacaaaataaatcagcaataaaaaccgtgggaaggataacaaggatagcagcagtacttaaaaacaaaataaataaaaatacattataaagtggttgagagacaaaaataaaccaactttaaaaatccatactatgtgttgggaaggctgccgtgcagcaacacctggctgcagccggggcgtcttctcggatagcttggcctggacgaccgcccgacctggactgggaccctgggctgggcgagccccgggcctcattcccaggcgcttctcccgggaggagtcggcggacggctggcagccgccccgcagcccctccggtcttcctaaagcactgaggagcggtggttggctacatccctgagggtcggctgatggccgctggtgaggcaagccttggaggtcgggccctgaagcttccgggcagaggcggggggacggggttcgtctgcggctcccgggaagggcagggggcggggggctcacccgggaccacccaggg

SEQ ID NO: 61234 - DNA, 1886 bp, Bovine  19866881377973
  misc_feature (1)..(1): n is a, c, g, or t
ngttgtgggaatcatcaccagctccgaggcacggtgtctgtcagcctgcctgcaccccaacgaaggttttctctgctactttgtagagagaaaatcttgtgacgaacggacttccctggtggtccaatggctgagaatccgcactcccaacgcaggggcccaggttcgacccctggtcaggtaactgtatcccacaagaccaaactaagagttcacacgccacgatggaagatcaaagatcccgtgtgcagaaacaaagacccacacagccaaataaatgttttaatttttaaaagccccaagttaaaaccaaaccaaaaaagcactctaaacagaaaacgtgactcaactgccgtggtcaggtttggtaagcccagtatgcagtcttatacaaacacttgcgtaaccttgtcttctttctactcaaaacttgaaatggacgaatcttattaagttctaaaattcttactctttgaaatagaaaacatagaattgagaaaatatggaaggataagcacaaatgcagataatctgtcggagaagcttgtgaaaagacccgcaaaatgatcacaccgacaaagtgacatatcaaactccaacaggaaggaactgtcagagataagacgccgggtcttaggaagcctctttattaggaaggcaggatttcccaactctggtgctttgttcagccccaagtttcagagttggatttacaaagaattattttcataaacgccaaggacctgcaactgtctagacaggaagtgattaaaatacaagcaaacattccgactgagctgtggacaaggtatagaacatgagaaaagttctagaagtggtcaaggaagagctatccccagagtcagaagagagagaaaggataaaggttcagagccggaggcaggggagaggagcagacatacacgcgtgtgtaacacacaggtcactggcatctcggccttccacaacaggtatggaccgttcagacacggggaagactcgagagctgaaacaacgggaaatgagactggcagcagaaaagcagggctgctcagctctttcccctgcagcaccgtgttcatcaaggcagctacacgagactcacctccacctggaaggtttcacaaccatggaaaacgggagaggaagcaaactccttccaaatcaaacttcacccagctgttcacatgcttgcctagggaccaaaaccccagctacgcacagaacaatgtaaagtgaaaccattcaaagatactgactcttgagacatcctgagactagaaagaaaaaggcagaggagagagaatggaagtagtttgatatgaatttcggacaaacatgaatgaggaaacagaggagtctccctgaagagagggacagaaagcctaaagcccttgtcttgttgggaatgggatttatgttttcagagcaaacgtaagttacatttgccagaagaaagatgctttctagaatcaatatggagaagatcgaagaagaaacctgggacaatctggaaagaaaaagcacttctcggggagaggcagttgcagtgtgagcatgtggtcaggaaggcctgggctcaacctgtatcccagacggaggggcaggaggggagagaggcggacgagatggcaagaggcttggaggaacgattctgttcccggccccatttacttacttacttttggcggctggaaaagatcccaacttcacccagagacgtagtgagacccccatatcacttctcagaacctaattttgctggtgctgactgctgcagggctgccaatctgcttgtgtattctaaactgtgagggtgggaggctctcctgtcccgtgacccccaagatgggaccactgtcacacacgactgcacattaacgagg

SEQ ID NO: 61235 - DNA, 1643 bp, Bovine  19866881450903
  misc_feature (1)..(1): n is a, c, g, or t
ntgacttcctttcctcttgagtcttaggctggtcaccaaccgcagggggcgttcctccctgtcagcgggcctggcgggcagggcttagctgatgtcagccccgactaacggaggaaagaactgtgctgctgcttccaacgtgtgacttgccttctcaggttgtatgtaaattggaggttcatgaggggaatcgaggcccagttcctggctcttcagaaggggtttaacgagctcatccctcaacacttattgaagccttttgaccagaaggagctggaggtgggctgtgcggggctggggtgcgaggggctgttgtgtcgggggcggtccctgcctcctggccaggctgcgggcgaggctgcatggtccccacaggcgtgggggtcgctgtggctgcaggagcagggacagggtggggggacaggggtgtcggggagccccgagcagggctgacgaggcctggtgtctatgtggtggcagggagtccagctcatccgtgggacatcagtcagggtattccgaggcttcccctgacttagagacctccagtgtagagcttccccagtgcctcctcctgaggggtcaccttacggttactgagcatgtgaccgtaaccagctgctcccatcctagccagctgctcgattttgattccagctgttatcaggcccaggacggggtgttactgtcctttcttgtccatcttcatgggacgcagtgattcactcacgtcttgtccacctctggcaccaagtagcttgggcctttcaaagtgtccccaaccttctgccctggtatgccggagtgcacgtgatcccctgggggggagtcacactttacaccccacacgtccccaggtgtccccgctgggcaggtgaccctgtgcagcctttctggctcctcagggcacacacacacatgcgctcagctgtagggaaacatcacgtcagcggccgcccccgcaccctgggggtggcagccagcctggaagtgcagacacagacgggggccttgggccggctgtgtgtgtgttgggtatccccttgtctgaacatcgcccggttgactggggcgtggttggtcggtctctccatgacccgggagcctggggcggcccgtcgtgttgtgtgtctgggaagtgacccaccttcatgccccgcagctgatcattggcggcctagacaagatcgacctggacgactggaagtctaacacgcggctgaagcactgtggggccgacagcaacgtggtccggtggttctggcaggcggtagagaccttcgatgaggagcggcgggcccggctgctgcagttcgtgacaggctccacgcgggtccccctccagggcttcaaggcgctgcaaggtgactgcagtggcggccgggccaggccgggtgggggcctgggacgtctcctggcatcgggtctttcatgatggacgccgggcacggcagtgtcgcttgtccagagacctcttctctccccactgctgctcccggggtgaaagaaacgtctgtaaacagtgggagcccgtgtcagccacacaagtcttccacaccacctgctcggggtgtctcagcctgtgggcccacagcggcggatgcggccggcggcctggtgtccccgtaggctagaccaggaat

SEQ ID NO: 61236 - DNA, 940 bp, Bovine  19866881908738
  misc_feature (1)..(1): n is a, c, g, or t
ntgctgatgctaaatctggaggttttgtcacttgataaccctggcagaagtaaggttgagaatatgagtaccttaaaacttagtaactggacttcacatgttcttagtgagagcaggcagttttcacgcgaacgttccctgtagcctcgtccttcgcctgaggccctcctggactgagaagtcccctcctgtcctggggcttgggtcctggtgtttgtgtctgtcttttttcccaccgcctctgcacagggggtttcctgactccagaacctgcttttcttgtgatgctaccatccactgcaaacagggggtctgcttgctagaaattcctggttttttttttaaaaaacaaattcctggtgacttaaggattctgctttcagacacctgccctggggcaggctcatgtcctctcagctgtgagaggacagctcggtctttgctcttcctgcacccatgaattttctagaatgtctgatgttagtcactccgtagccattgtgtgcatatcccgagactgcacagagctcctagggttacgtgaaccctgacaccatctgggaggatgggcgtggggccccgggtggtggcagggggcccgggccccacctctgaagcatgttaactagactgttgtctcgtaaggctctacaggcgccgcagggccccggctcttcaccatccacctgatcgacgccaacacggacaacctgcccaaggcccacacctggtaaggaccggcgccccacccggcggtccgtgtgcgggacagcccgcacgtcagggtcagcacgaggctctttcaggagcgcagttaagtcctgagacgtggctgttcttggagctactcccctggctcctgctgcgtgtgtgtgtgtccatgggtgcgtgttaacctgttgcccacacaggtgccgtcaggagggagcactgcaggttt

SEQ ID NO: 61237 - DNA, 764 bp, Bovine  19866881918759
  misc_feature (1)..(1): n is a, c, g, or t
nttgtgacctgagggaaaccagcccaaggaataagccaacaagcggagaagggaagacaggagaacagcagagaaactgggtcagagcctgctcagacggcctgcggcagaaccctgccgtttcataagaggacaaatcttgcttagctcaagcgtgtttgtactggattttccaccatctgcaaaatataccctcaagtgatttactaaggacagtccctaaacctctttaccttcctcatcttttctcctaatggattctactctgcatttcattttcatttctctcttagatacacagctgattatttcacttctaagaaagaaaacccggtgcttatcttgtttaagtaaccactttcatttcaggcctttataatcacgtttatccttaccccagagtctggcaccatcttccattaatgtgtcagcattgagttccctgaaataaagtaccagagcacaattgttgtgttgggctaattaaagatgtgtatcatgggtggaattgtctctttggaaccaagaaattaattatgtttctttggcctggtgaccagatttggaaaacaaaccagtagatacacataatcgtttgctatctacagtcgtcccaataaattatctccggtcctcatttactttctcagattctatgggtacccgaggatgacagtctgatgggatctaagaagactgacttcagatgggaacttctcggaaacactctctttcctcccgggacagggaccagggaggaggag

SEQ ID NO: 61238 - DNA, 866 bp, Bovine  19866880479215
  misc_feature (1)..(1): n is a, c, g, or t
ntgacagggccgttccatgctgcagctcagggcccaggcctgccagcctgtgcttggggcccctggtccagccgagtggcctgaggtgagccacctctgccctcacggcctccagcctttcatgtgaggattgagggacagtagccactccccctggggacctgggtgcagaggcctcaagactgagctgccacccctacctgtgccttccctgtacccatcctggcagctcagaggatccctctcaagcctcctgggtcatgggctggcacttctaaaccaaaacacattgtcctggaccagccgtctgtgccagagactgttgtacagaaacatccacaccatgaggctctacctgggtgaaagtagatgcaacctctgtcgtgggaggcagttcactcaaggctggtacagcctacagctgtgagctagttctgatcagaagcgtaaggattcccaggttcatcagattatagaggcaagggtaggactacacgcacaagatacttttgtgtaagaaataaagagcacaagaaaaagggagacagagagaaggagagagacacacacagtgacatggagagacagagacagggaaccttggagacagagatatctgtgttgtctgaaataatctctctacactctctgagggtcacacaagacgcaaccagagggttgtctctggtgaagggctgaacaaggagatgccaaggccagggggttgggacacgcacttacgcagggcgtgccggctaggcaagcagctgtgcaggggctgggcgtggatgtacagggcccggtagaactcctggcaatcccgctcaccgctccgctgcaggtgcccaagaggtcgcagagacgca

SEQ ID NO: 61239 - DNA, 1722 bp, Bovine  19866880538756
  misc_feature (1)..(1): n is a, c, g, or t
ncgtctggacacatcccacaattttactgatttcctcctgttgaaacacaaacccatcactgtgcccatgaagcagaggtggggccacctacctggatgctttggacagtgtctttaaatacaggtgagcgctgggtccaggtgctcaccagctccatagcccggtcaaagttcttgacatattcaccatacatcttgaggaacggggccaacttctgcaggatgtctccaagtcgagggttcacatcccttcaccaggaaatgagatcatcacacacatagttccagtgaagggccagggtgggacagggacttcacagggagccatgggacaatggcctgactcccaagtctgtgtgatggtgggcaaactggtcaccctctctaagccttattttcctctcctgtatcacatgggatggaaaatagtgtattgcctagaggatcatgtgaagtacttcaacagtgcagtcacagaaccattgctcaaaaccaggagctgttagtaataatggaaccacctgatgagccacagttatcgaagagaaccaagaaaaccccattatacttctatatgagcaacaattaggaacaataggatgatctaattctggcaatatcgtgggaaagcagcactgtgtaataatgagtggtttggacagggatttagaaataaatttaaaggaaccaaaaatatatgaatatattagactttagaactgtggggggatttatcctaaagaaataatccaaaagaagaaaaaaaggcacaggcaaaaagtcatcctctgcagcattactaggaatgggctttcaaaggcagaggggaagcccctggactcctgcaccattattacacaaggagtgtctgtgtactgacagtcttttcagggccttgaggggcaaagtcatttctagcaggtgtgcgctgcattagccagaaaggcaatccagccctgagctttaacctcatggccttgcacacagtataacctgctctgcaagtggagcgtgtccttctaaatatttacaaattgacctggatgcttgctgagccttgcaggtgcagggacaccccccaatcaagcccctggcccttggcctctgtgttctctctggcctggctctagcttagagagtggactcttggggacaccacaggccttgcagcttgagctgtccctctcctacaaataaatggaagcagcagagggacagagggacagccctctggggacactcacgagagagaaaaacatctcagtttttaaagtagaggtgcagtatatactaggaaggaaaataaacccataagcatggtatattcactggtgtttgcagacgtcaaacctcatttaaattctgcaaagctctggtttggtggttttagttgttaagtcatgtctgactcttgcgaccccatggactgtagcccaccaggtttctctgtccatgggatttcccagacaagaatactggagtgttttgccagttccttctccaggggctctttctgaactatcagtcaaatccacatctcatgcactgcagtctcctgaattgcaggcagatttttcactgactgagccaccagggaagcccaaacaattctatttacagtagcacctgctcaaggtgctcggtcacatctgactcttttgcgaccctgtggactctagcctgccacgctcccctgtccatggaattctcaaggcaagtata

SEQ ID NO: 61240 - DNA, 2570 bp, Bovine  19866880544026
  misc_feature (1)..(1): n is a, c, g, or t
ntcttgcctgaaaaatccctggacagaggagcctggtgggctacagtccatggggtcgcaagttggacatgactccggactaaacccccccaccaacaatttgcagatgaagaagctaagacactgagaggccatggggtcagggttggcccaggaccctgcaaaagagagcctaggaccctaggagacaggtttcccaggtagcccctggtttgggggcatgcaaaccccagatttaaaggctgcttggcagggaatatacaacaaaacactgcaacaggatcaccatgaccttcaatctccaaaggcataggaatcaaactcccagggaaatgtcggcccctccactttcccaggcaccctgagttgcacttaccactcattcgtgatccgcgcctgcagctcaggcaggaggaactgcccgtggaagcgatagatggaggagatgttagagaagatgcctgtggtgacttctgaagggatccctgcttctgtcagcccagtgcagaaaacctaggcatggagaaacccttgcagtggtcactaaatgtgggtcactgcaaatggttacaatcatgcttctgctacaaacatgggagctcaggagagggctgccattgccttatgttttcttaatgaaacttctgcttcaacaaactgccttaaagaaccttatggtcttaaagcgagcttactgatggccaagaattaggagtgaggcagcgacagtcccctctagactgagacagaccatctttctcccatctgcctttcatgggaaatggatgatcctgatttcctttctctgctttgtgagctacaaacagaagcagcacctgtcaaaacctggtttctattggagttttacttcctgtgctcataaaccccatgttgccaggtaaagagggagagtgccactcactgtcatagggctttacatgctcagataatttaactgccatgaagaaaaacccccaaggtgactagacaagacctttgccccagagccacaagttgtgaaagcaaaaactaaaaatttctggaggagacttaaatatatccaagttttagtattcgtgtcagtcatattccaactgcaaggcctagccaatgctaagatagaaagcttgcctctgaaactgcccactgaaactctggaagtagacaaaggcaggctccaagccaggagggttacctggtctagcaggtacagccgcttcacataggtctcctccgtgtgcaggagctcctgggcgatgtggagcaacttctgaggctcagagcactgtgaagagaagagctataactcacctagggatggtgagtttgggggaggcagcatatgacactgcataccagggatgaccacaggcccccaaagatcagaggaagctgctggaactgggatgtgaggctcagttctcacagatggaatttccagggaggtttctgggggagacagaataatttttaccaatcccctcaaatcttctgcagccaagagaaaactctatcctcccagggctttgactgcagaacagctacaatagccacatcaaaatatactgtggaatgacatcatcaagatggcaaatcaaagctacaagcccacccaatagacacatgaaaagatgctcaacatcattaattgttacagaaaagcaaatcaaaactataatgagggtatcacctcacactggtcagagtggtcatcagtcattaaaaagtctacaaataagaatattagagagagtgtggagaaaagggaactctcctatactattggtggggatataaattgatgtagccaatatggagatttctcaaaaaactaaaatagagttgccatatgatcttataatcccactcctgggcatatgcccagagaaaactataattaaaaaaggtacatgtaccccagtgtttattgcagcactgtttaaaatagccaagacacagaaacaacctaaatgttcatcaacagataaatgaataaagaagatgtggcgcatatatacaagggaatactgctcaaccatcaaaaagagtgacataatgccatttgcagcaacatgggctagatattatcatactaagtgaagtaagtcggacagagaaaggctatgcgatatcacttatgtgcttagttgctcagtcgtgtccgactctttgcagccttatgacccaccagggccactgtccatgaggattctccaggcaagaacaccgggagtgggttgccatgccctcctccagggatatcgcttatatgtggaatataaaatacgacacaaatgaacttatctatgaaacaaaacagactcacagaattagtgaacagccttgtgattgccaaggagaagagtgaggtgtaggagcgatgaacctggagtttgggattagcaaatgcaaactactatatatagaatggataaacaacaaggttccggtgtgtagggaactatatccaatagcctgtgataaaccataatggaaaacatattaaaaagaatgtgtgtgtgtatatatatacttatatataaatgcataactaatcactttactataca

SEQ ID NO: 61241 - DNA, 1874 bp, Bovine  19866880586806
  misc_feature (1)..(1): n is a, c, g, or t
nacgtaattgtaaaggagcttcaaatagccaaacaatcttgaaaaagaaaaacaaagctagaagactaatacttcctgatttcaacaagagtggcataaggacagaccgatagaaaggtcagaattgagacctcacgtataaggccaataaatccaccaacaccaatcaatggagaaatgacagtcttttcacaagtggtgctggaaaaactggatatcacatgtaaaagaatgaagctggacccttatctaacaccaaatataaaaactaactcaaaacagatcaaagaccaaaacataagagctaaaactataaaactcgtagaagaaaacatatcagaaaagcatatgcccttagtttaggtaacaatttcttgaatatgaaagcaaaggcataggcaacaagagtgaaaaaagacaaatcagactttatcaaaatgtaaaacttctgtgcaacactgtcaacagagcaaaaaggcaactaacagaatgggagaaaagatttgcaaatcacatatctgataaagagattaatatctaaaatatacaaagaaccccgaaaacaactaaaaaaatcacaactcatttcaaaaatgggtgaggaatttgaagagacagctctccaaagaagacatacaaatggccaataagcaaacgaacagatgttcaacatcactaacctttggagaaatgcaaatgaaaatcacttgagatactactttgtatccattaggatgactacaatcacaaacaggggtaagaattagtgctggtgaagccaggatgtggagaaaccggagccctcatgcatttgtggctgctgttgttcagttgctaagttatgtccaattctttgcagccctatgagctacagcatgccaggcttccctgtccttcactatctcccaaaatttgcatttatggtctttctttattatccgctctcacatccgttcactgctggggggaatacagaattgtgctatagctatgcaaaacagtctgccatttcctcaaaactttaaacataatttcccccaagatccagcaattccactcctaggaatatacccaagaaaactgaaaaaaagtgactcaaacatgtacatgtacacatacgtttacagcaacattattcacagtagccaaaatgaaaaagccgtatgtccatcaatagatgaatgggtaaacaagatgttcccatacaatggaggattattattcagtcataaaaagaatgcggtgctgataaatgccacagcatgtattaacctcaaaagtattatgttaactaaaagaagacagtcacacaaagccataatttgtgtgactccgcttgcatgaaatgtccagaataagcagatccacagattcggtagttgccaagggttggcaggacaatgggtgactgctaatgggcacaggacttctttttgaggtgatgaaatgttctggaattccatagtggtgatggttgtacaatcttacgaatagactaaaatctgctggattatacactttaaaagggtaaaccttaggatatgtataactatctcaattaagaagaaaaagatgaactacttttgaaataaaaggtaaacagtatctccattttattttactcctctgaaaactctagatgacccagccattcaccccaggctctgtgcagtgagcgcccggaggccagctcctaccttgaggtgctggtgcatgcagtaacgacacaccctgtgcttcagctcgtgtgtaacatcactggaggagggaataaacccgcatttgggctgcaaaacagataaggaagaaaaaacgcttagggagaaaacatataccttcaggcagacatataactacaggatgatgaagtgcaa

SEQ ID NO: 61242 - DNA, 892 bp, Bovine  19866880594973
  misc_feature (1)..(1): n is a, c, g, or t
ncagaggatatgctcagtgaggacacggatgtggaccgtgcctccgaccctggggtgagcccgccacacctcagcacctgtggcctgggtgctggggaggtaagtccctgttatgaggtcctgggaggggctgggcctacttataccccagctccaggctctgcaagtacagtgctgtgatgtggcctgctagaggaacctgtatgccatgcagtgtcgggtgaggtggccgggagggtaggcgccttctgtccagttagaaatgtccaagctcttgaggcctcttagaggatttgagacagtgttgtgttctgaaggaagttcttgttccatgcagtcggctgagttctgatccttcacctctttcaggagaatcgccaatcccaagcaaacgccccggtgtaccagcaaaatggtatgtctcccttcacggctgtccctgccaatcagacatgcctttggaggagtcatgtctgccattgtcctttctctgcttccagtaggcatttgataagggcctcccactgagcatattgtatgggttttggccatcacactggggggttgctggagtgtatggtgagcgtgtccccatctggggacagctgccctgtctgaagagccatgtctggtctgggtggggactgagcatgatgtggactcactgccctgctggtcccccagccagcgttaccacttcactgatgtacttccggtgaccttggaaataagcccgtgctggggggacttatgagagcctctaatgccagtgaggagccccctgagcgggctgcacatcctccccactggtgtgagatgaattcctcaaatccccattatcaggtctgatattggcggcgaggggtcacctactcactctcaccagctgctt

SEQ ID NO: 61243 - DNA, 1589 bp, Bovine  19866880596117
  misc_feature (1)..(1): n is a, c, g, or t
nctggcaggcctccagtccctgtggttgtggagctgcctgagccccgtgtctctcttaggagaaaatgcacaagcttttggaggtgtacgagagactgggtggggaggaggacatcgtcaaccctgcgaacgagctgatcaaggagggccacatccagaagctgtcggccaagaatggcaccacccaggaccgccacctcttcctggtgagcccccatccaatcacaccagccctgcccactcctgcccaacccagctgcagagccacaaccctgccgggcctcacccagcccagacgcagagtcctggcccaccgggtcactcagccacaccctcacccagcccagacccaaccagcggcaaagccacgcccagcggctaagccacaccctcagcccaccccctagcatgccctcgccacgcccacattcagcccagccccacctagccctgtccaccaccgccagggccacggccccacctcctccctagggtgctcctctctggggtcagacacccctcatcgcgtgcctgcccgtccctatcgcagttcaacagcatgatcctttactgtgtgcccaaactgcggcttatgggccagaagttcagtgtccgggagaagatggacatttccggcctccaggtgggtgagcccctcccacgcaatctgttcccctgggaaagcacagagcaggtggagggacacagggcactcactgctgtgcgactggtcatgtgcctgcttctctgagccttgcttatgtcctgatccaggcgtgcaggaacatctcttgagtcctggcatcctggactgagtgggcaggatccctgcccctcagcttggcctaccttccagcacgtgtaggcttcatgttggcaggctgaagggccatggcaggaccaagctgtctcctgtacccagcactcagggttccctttacagactctaagggaagcttgaggtgaatacagatggggtgcccatgcttgggcactttgctctttgggcatccttgttctttggtccttggtcctatgctccctccactcctgcaccaatctggaacccggatgaggttctgctgacatctgtaccccaaatccagacggcttgttgttcttgccgtccctcttccttgagtccatcgatgtcttatgctgtgcggctactggagctggaatcagtgccccttctcctgtgggggagtactttgaattaacaggcactccaaaaatgctggctaaatcaaagtacttagttattctgaaaagtaaagatttgctagtgataccaaaaaaaaaaaaaatcccttctgatagtggcctgcctgtgggccacatccagctgagggaatgaggagtgtaggggatgaaggatggctccttgttgcagatgcccctggatccaaggcaccagcccatggggcctcagaaactcctgcagagaagtggggatcctcctggctcttctcagattttcatcctgtgtgtcaggagtgtctggggggtaccttgtggggaaaggcactggcactgacttcctgggaaactccaagaacagacacatttggctggcacagttctaagaa

SEQ ID NO: 61244 - DNA, 1239 bp, Bovine  19866880599759
  misc_feature (1)..(1): n is a, c, g, or t
ntgtcagtacctccctggcttccccatggaacagggctccctgagggcaggctgggcccaagagctggtcttgtctccctcacagctgtgcccccctacgaaacctttggcttcaaggtggccgtgatctcctcaatcatcagctgcgccatcatcatgctcatgtccatggccttcctcacctgctgcttcgtgaagtgtttgaagaggagtgagcagcggcgatctgacaggtacagtgacctgtcactgctgcgggcacttgctagtcacggcgggacccctggggtgtcagggagtggggctgctgggatcctggcgtcttgccgttcacagaacatctaggctgtgcagggcgcatggctcacttgtttggtcttttgtaagacaggtgacaggtacacgcgggattttctccttctgcagactgtgcacacccccagcgtgtgctctgctgtgtgtggacgtgcagggctgaccacacgatggttaactagggcctgcaggtggagtctggctcacctctacttttcttcacagaaatttatcctgtttttgtatgtgtgtgtggcgggtgggggcgggtatttttgttttaaacagtggtaaaatatttacaacataataaaagttaccatgcgagccatctttcagtgcacaattcgggggcattagttatattcacagtgttgtgccatcactggcttgattctttgcaagaactttccaccacctgtctttgtaagtagtttttctggcacgtactcatcatccacgactgccttctccctacagcagcagaacggtacagccctaaaatactcactcttggccttgcagaggcttgcggtagtgtcctggacacgctcacacctgactgtctttcccccatctctccccagggcaaaccaactgtggctccagctgagaagcgaggatttggagacggtacaggctccctacctcggccttaagggcctcaacagtgacagcagcatcagtggagtgtccaggatccagcctgtccaagtgcacgacaatcacagcttcaccacgtgggcacgggcagggcaaggagggcggtggggcagtggtaagggcagggggagtgcctggcttggccagcgaacctggacaccaagggcactcacggtctgcgcatgctgtgagtccaggcccaccaaggccccagctcccatctgtaggacaagctgatggtccttctgcagcctgtgcctg

SEQ ID NO: 61245 - DNA, 1254 bp, Bovine  19866880860747
  misc_feature (1)..(1): n is a, c, g, or t
nccccacccctacaacaaggctgggaagtcaagaaggattgagataggaattggtgtttaaaatcttctaagagaactacttcagggaaggactgcctagttttaccactgcaagatttcttggtagcccagtggtccaacctgttcatcccagagtaaaaatatcacaggagagataaggcttcacctgtgacaaaaatccacagacgtgtccctcaactttgggaaagggcctggatgggcatctagggcaggaagtggacagaacactgtatcccagagaagtaaccagcggggtggtcagagagcagagcatggggaaggcctgtgggatagataccccggccagctgtgatcgccacatgcaaggcaagtccccaacttgaccctttcctggtgtcccggcgctcacaaaagacgctgaaaccgctgaaggcagctgcgcccagagacaggagatgatatacatagaaatgatggatacacacgcctggtgtttcccagccggccacctgcatccatcccacgtccaaatccccgctactcaaaaagtgaaacaccgcaaaggacaccacccccaccgtgcccgagacctgccatcaagagcagaaaggctaaccaccaggctccaccgcagcccttgacgcggaggccagggcttctagaacccaaatcgcccacagcacctaaggcccgtcatccactgcagggccgcctccgggacggccaaccacactgaccccgggtgctccagtgctggtctggtcggcgcggagtcagcagtcggctggtggtcgacctaactcgggctaaggggtcagttcggcctgggtcggcggctgcctcgggggtcgccttcttggctcgggtcaagggccgattctggggtcggcgcggaggtcaattcggagggatgagggatccgggtccggagtcggaaacggccgggggacacggagggcgtggcgccagccacccttgttccttacctccttgagctgctccatctcgccgcggatggcctcgtagtccacctcaagctcttcgaactgcagtttgagttggtgcttctcctcgaggactgccagcccgtactcggccgcctggatcttctcacgcgtggtctcggccagctcgtgcgacagccgcttcacctccgcgcgcagccactctggctgcgcctccatcacgagccgcgcgtactcttcttcctcggacggcgcggacatggtggccacggcccgagtcgcacca

SEQ ID NO: 61246 - DNA, 927 bp, Bovine  19866880881132
  misc_feature (1)..(1): n is a, c, g, or t
nccctactgcaagacgttttccctttgctggaaggatattggcagctgctaagcattctgcccaaagtattgttgagtctcctctgaatagtcatgttagaacttagagtgcagaagctggaggactttgcccttagtttgtgtccagctgtaccggcagttttctgaactccctcacacggaggtctggtggttctgggcggtgtgggcacagaagggatgctgcataaagctgccagcagctgggatcctgtcccctgactgttgagatgggtgatggctgcctggcaaagccctgtagcctgaaatcactccactgtgtctaaaactgcatggacccccaaatgcagaccatctcctgaagcaaggtgttgcctggcttaagcaagaccattgtttaaatgactgcagccggccagtggtgctggtgggcggtgtcaccaaccctggcctgtgtgtgctccccagggtcctccaccagcagcctggtcccgggccctgagccgggcccccaacctgccctgcacatccaggcgcaggtgaacaacagcaacaacaagaaaggcaccttcacggacgatctgcacaagctggtggacgagtggacaagcaagacggtcggggccacaccactaaagccgtcactcaaccagttgaagcagacgcagaaattgcatgacatggaggccacagcaggctggcccctggcctctggcgaggcacgggctgtaagtggggcatggtcggggggtgaaggggggtggatttgcccagagtccaggggacggaatgggagtgaagccatgactccagatctcagcggagcagtaggccccaacccggtgttgggcagtgcctaggtgggactggccagcagcttgcaggtatggccttgtcctggggccccaccttcacttcttccatcag

SEQ ID NO: 61247 - DNA, 1615 bp, Bovine  19866880887688
  misc_feature (1)..(1): n is a, c, g, or t
nacggaacccagatctctcgcattgcaggcagattcttcaccatctgagccatcagggaaggcctgtccctcagcttcagagccctgctaagggacacttaggtcctctcccctttccctcccctaattcttccctcccttcactcgtttttggttttgttttttttttttttactaggacagtggtgctgtgagtagattccagttctctctagctatcttctcccagagctgccagcatatcagtgccctgaaaggaagccctctaaataagcagagctgttgcgttctgaactgcctttggttgatcaggagcaaagatgaaggaactgaacaggaaagaaagagtccaagtgactgtgcaaatgccaccaggccaactctgatgtgggtggagcctgagcatgcagaggagaccctaatctccctgggctcagccatgttctgcttgaggctgtgcagttgccagaacaatgttggaatcactctgtatccagacacctggacctgaagagtggggcaaggccactcttatttccttactccttcatgtagctctttatttacacaatgacatttttttttcttacagggttaaaaaaaaaaaaagcatcccagacacagcactttcctttcagtgtctatcatcagagctctttgttaaagataagaggttgcttccacttcaggcttgaatgtcactgcagcctatgccagggcctctctgtaattatcctgtcctgtctggaaagctcttaaatgccacttcatctaagggcttgaggccgagattgcttctccagtgcgatgccaaaggctcctcttggctgagatgactaaactgtcaaatatttttagagcaagtcttcttttaaaaaataaataagaaaagtaaagtgagtgatgattaatcagctcctcactgcctccaccttggcatctgacatacaattttcccagggagtccctgtagcctcgcgttggggtgaaggggctcccccactgtcatctggccaggatgtggcctctcaggacctgtgttcaccctcctagctgcctgattgatggtgcaaatgggtgaagttcctcaagtttaggaaaaattttctgcctttgagcaaaacatactttcagtttagagcaatctagaaagctttttgcaaaaacatgttctcggaaagcagaattacattcagagtcctttcttttggaattgcttgaccacatttttcctcagagagatttaggacagctaagtagaaattaaaatttccatacgtaaacagacatggagacagctggctctgactctgtaatgacgtggaagttttgaatcttgaaagagcatggagattttattagcttatttttaaataggttggcttttctcccaattgcaaatataatacatgttcttcatagaaatttagatattactgagaagcgttgagaagaggaaacccagaagctcaccacctgaaagtggcaagatttatgtgggcctggaaagatttccctcttcctttcctgggtcttgtctactgataagtggaatattcatcagaatttgtcattggggcctgaaagctgacaaagttgccccccctatccaaag

SEQ ID NO: 61248 - DNA, 1284 bp, Bovine  19866880939855
  misc_feature (1)..(1): n is a, c, g, or t
ncatgcccctaccttggtatgaatctaagggcagaggcggcaccatctcaaaggctggccctcctcctaccatccaccactgaaggactcctggagggcttaccagtgcagcctcattcttttacattcctcagacaccccaggggagccacaccaccctcctcacctcctggctctagaagcagcactggaggctttcacagcacctctcagcagcaagtcctccgacattcactcttcatggtctttcacaaaaaagtagagtggttaacattaacaaatgcagtaagacagcaaacacggcattgtcccttcacacagggccttagccccccggcccctctgcacagaagaaacagtgtcttcattaaagtcccccagagtcctaagtgctgcactgacctgagtcgccagtttaaagtagaatgggtgaaaacactgtttccatcaaatgaaagcctcagggaaggggctgaggtggagtgtgagaagtgcaaagggttgagtcaagaccctctagcaagacatactcatctttaatttttttccctcaaatagagggtgattgttttcagactgttcactccagtcagaataggcaacaggaggctgcccagcctacctccttgaggggctggggtttcagagctccacacacaagagattcaggatcccctgcataccctggtgctgggcaagaccatcctcaccccaggccagcaacaaggaacaacctcaggccaaaacaactctggcagctacctacttccatacactctggagcctgcaacttgaccatgagaacagggctccatgcacacccctatgtgtggaatctccaaagccctgtacccagcatcccacatgaatgagaggcatgtgttatttgagtatctttttgaacctctgagtgaagaagtaagaagtaaatggtaggacaggactgaagaataaattctagaagagctggcttgattcaaataagcataattctcaatttatcacaaaattccccacaaaaattataatcagcaaaatattctcattttttgtatagtattttcatacaatctcatggtttcactattatattacaataagccttcattagtccctcaaaatgatgatataaataatctatacaacctaccatagaataaaaaactgaagccaagattcccaacagttttcatagcagctgggcacgccttttgtgaccccaacaagaaccctcttggtgccagccaggcgtcgctcgtcatgcagaagcagggctgtgggcag

SEQ ID NO: 61249 - DNA, 1123 bp, Bovine  19866881151115
  misc_feature (1)..(1): n is a, c, g, or t
ntttgtgacacctgagacattagcctctgtttagagaggcagaacatcgtctacactgaacatccggagtgtgaatgctcagggccaatagcatgacccagaagtcaccaccagagatttggagaaaggaaacaatgagatacctgggaggcttcctgagggagactcaggtggccatgctggacagggagtcacagagttgaagcaggggagtgacccttctccagtaatcactgacctccactagacaagcaacatcctttgtagcccctacctcaaggtggggaaagtgcactccaggcagatgacccatggatttacaatttctcctttttccccaataccatttccctttaacaaatatgcaccttgatctccacacacagaatcggccggcgctctgcaaactggtaggtctgcagtctggctaggttggggaggcacagggcatagccactgagcgtgtccaggtccttgtcacagcgagattctggagaacagagagaggaagataactgagggtcagcgagagcagcaagacaactccatggcagcctgggctcctgctgggggcaggaccaactcagcctctgctttggggaggtcacctctaaagcttgggttatcctgcctgaggagtctctgtaaggacctagagtcacacaaggataacactgtgattcctggtaggagtttggaccttgtagtaccagctccacctctggaggggctggaggttgagggcagccacacaggtggccagctgtgtctacatgccctgctgctgctgctgctaagtcgcttcagtcgtgtccgactctgtgcgatcccatagacggcagcccaccaggctccccaggccctgggattctccaggcaagaacactgggagtggttgccatttccttctccaatgcatgaaagtgaaaagtgaaagtgaagtcgctcagtcgtgtccaactcttcacgaccccatggactgtggcctaccaggctcctccgtccatgggattttccaggcaacagtactagagtgaggtgtcattgccttctccagtctacatgaccaagccccagcaaaaaccttgacccctcttctctcagctggttttaatctgtgtcc

SEQ ID NO: 61250 - DNA, 1406 bp, Bovine  19866881212263
  misc_feature (1)..(1): n is a, c, g, or t
ntgcttttttgaattttaaaaatggttttatgattttgagtccttgaaagttatggaactttttatttgggtttggcattgaattttttaactgaaagtgttttcctaagttaatcataagttgcaggtctttgtattcattttgatgctttttgtgttcccaaacttcatattcagtttcatgtattttgagttttatccctgtcagtcattcatgacccccaagtatttcctgccccagagtccttttgtcatttccctttacaagttttgtgctcacctttcctctccttagatctcctacaagtgttgttctcctgtatagctcttcaggttctattttgatctctctataccacttccccagttgtggcaagtgggcagaggagaccttcccctggacacaactgcccacgccaccatcaccaccccactgccccagcccagctctgcccattagccacaggccaggcaggtgctggtttctcttgaactcctccctgtgtgcgtccagttaaaatgtctccttgaaaacttcttgcttgcttctggctcttctcaaaatctgagtcctagctcttgtgcatgtctctttctcatttaaacagtctttagtgcttatacctctgcctttggatttactttttagtcaccttcctttcccagcagtatctttccctgaggcagctgtataccacggcactctagcaggtcacctcaggaacgttttgttttcaatttacttagaattttactaaaagttatctctatatgtttacatcttactgtctgccacccaaagtcactgagtaatcctttttacaaatgtctttagggacaagatgtggcgtttgacccctggggaggagggagtctggttctgggagagtagcatgtcagggtccccaggaatgtggaggtggacagaagagccgtcatgtctcatcgtgcaggccacacatccccagcattctccaagtcatggcaaatgacacggcttgcagtgggccctcagaatgaagccaggacttgaaggatctcttctctcttggtttcccggaaggggctctgtgggtagcacctgctgaccagtgtccagccaagcagtgattttcatctccactccgcatggcccctctctgggtttcacatcatggagccagcttccagagagaagagcagcatgatttcaggccttttgaagttttatggtatatctaacatactgtgcaactttactagagtgaggttggtgatcggactttctggaatcttttttgaaagaaagttgaatataaattgtgcatgaagagaaagatgggcttcatttattttaagagttctaccttttaaggcattgcaagaggggcagcatgggcactataggacattctaaagaaggaatt

SEQ ID NO: 61251 - DNA, 507 bp, Bovine  19866881299500
  misc_feature (1)..(1): n is a, c, g, or t
ntgcctggaatgccacagggtaagccgggtgtggcagccccttttggccagctcaacggccctccaggtgggcactaattgtcaatgccaaacactaaagtcactgcccatctgtcttagcacaggtagccgctgggagtacagggtctgggagctcttagtgatggtgtggtaaggaggcctctcaccctgccccatggacagggaatacccaatgaggcagccatgttactgagaatgagggtcagcttccctccagcctctgtagacagggctcctcatatttccacctccacgctcaccactggcctgttcagggcagcccaagatctgggattggcctcaaatctgcaaaacaatgtatctttttgcacttggaaaactgcccatgagccttatgccaggcagggccaggctgtgctccattgagagctctcctggctgacttttagtgggcatcctgcctcaaccagcaggactccccaaaaccttacatttaaagccaag

SEQ ID NO: 61252 - DNA, 2474 bp, Bovine  19866881686247
  misc_feature (1)..(1): n is a, c, g, or t
ntctgtaatctttggttgatttccagagcccttgttaagttattgtttccagtttctagttgtgtgtttagtgtttctgtaggtaaacaaaggtttgttcttcctaggctgtcatcttgctgacattcctgctctacccttttaaagtcagtcctccaggcctagacaggcatcagcttcctttctgacaccatagacatcatttcatttgttctataattccgtttaaatggaataatcctatattacacagtatgtctaatatgtgattttttcccttcagtttaatgtatttgagatatatacatgtcactccttgtagttcattccctttgccctatagtattccagtttatgggtatatcacaattttttcccccatttacctgttgaaggattaatattgtttctagtttttgggtttttttaattaaggtgcaatgagtatttgagtataaatcttgataagggaatatattttcattaaaaaaaaatgcctaggaatagaaccattgaatcatacgatatgtgtcagtttacctttaatgaaatagacagaccattttccaatgttataccaatttacatccccactgatgtctcagagctccagctgctccacagttccaacatttgtcattgtaggtccttttaggtttttggttttttaaaaataattttgtagacttttagtgggtatatgaagtagtgtatgattgtgaaattttagtttgcatttctggggattaataacattcagtctctttttatgcatttttcacagtggccagtctaatatcttcccacaggcaatggatgatggatgtgtttatccatccatttatttcagcaaatgtttactgggcactatatgccatgtgctattttccagagattgagtatggactaacttgagaagtaagtccagatggcacagctttggaaattgggggtcatacttttgtgagttttacctccaggagccccagcaggttctcagcgtgaaaatatgagaactggcaggaggaggtaccattttgacatacactagagcattcttctctctgtaacaaaacctgccctcaaactatttcaccagattcaaacctcagtgggtttcactggagcctaaactgcccggaaaagtgaaatacccagctctaccctccttcagctaaaaaagcacaaaacatagcttgaagagaaagtgagcattaaaactacactcagatatagcagggatgttggaattatcagaccagaaatttaaaataactaggattcacatgttaagtgatttaatggacaaaatggacaacatgccagaacagatgggtaatgtaacatagaaatagaaactctaagagaaaatacagaaagaaatgctacaaaaattgttgcagaagtgaagaatgactttgatgggtttattagtagcctggacacagctaagaaaagaatcagtgagctggatgatacgtcaatgcaaacttcctaagctgaataggcaaagagaaaaaagactaggaaaagaaaaggacaggatattcaagaactatgggaaactcataaatggtgtaatgtacatataatggaaatagcataaggaagagagggaaaggaacagaaaaaacaattgaagcaatgatgatggaatttctcaagattaatgtcagacagcaaaccatagatccagaagcttcagagattatcaagaagaaaaatgcccaaacaagtacacctatggatatgatattaaaatgaggaaatccaaaggcagagatggttgaaagcagctggggtgggttgaggggtacattgcttatagagaagcaaggataagaattatgtagactttagatatcttacaagcaagagaagaatggaatgaaatattgactccatccaccattatttacaggtattgctggctctttggtaatcatattatttgttcattattttgctctctctatttttcacacacatgcacagagtttttttttttttttttggcttcagttggatattaatttcttgagagaagaaatagaatgtcaatgtaattgtctcaagtacctcctatgacactttccaaacagagcaagctaattaattctgcttcacaagaggcaggtagattgcatctttctctgtgtctgcatgtccttcctgagtgtagacacaatcagacatttatttatttgtgatcataacagaggtgacaataataatgaacacaggcaacttttatttgtgtagtgatttgcactttgctctttctcctcctgagacgttcttttccaacctctttgtacatctggtaggtcttctgtatcttctaggccccattcaaatgctgcttcttttgtcaatatttcctagttttccttggtcccctttatcttaataatctccaatctccccaccctggctggggattgtagtcatagtgacctgggaacatttttttt

SEQ ID NO: 61253 - DNA, 756 bp, Bovine  19866881909941
  misc_feature (1)..(1): n is a, c, g, or t
ncttccaggggcccggcgtgtcctgggcttctcccctgtcatcattgacaggcacgtcagccgcttcctgctggcctttctcacagatgacctggggggcctctgaccgaccccaagccctgcctgcccgcgtgttgctctccaggggcttgcttctttcctaagtgtttatttcttgctatttataatttctgtaataagcactttactttcattgtacagagatgttcaacaatattaaatgtttgagtctcatcccttctctcaggagtgttttctagatgattccaattcaagacacgacagcgtctctaactaaggttgatcctgtgggttcttcacttcctgagtccaacccaagacccaggtcctgcccaggctgccttcccagactcctctgagcctgggtctcacccctctgtgtggacttcccaaccccaaatgtccccggctgtcccccagtgccctcttccagatgtaaccctgccgcatgtcctgcccctcccctggggcctccttccactgcttctgtccagaactccctgccttgagccctgcttgccatcccccacctggagcactgttgctccccacacctgccccccatctgctctctgtcccagtcctcagccccaggcccggagggtggacaggcaggccctctggactgctctggtaccctcccttggctcacagggccgccagggccaaaggcggagcaccgagccctcttggatgtgcacagggacgtttctg

SEQ ID NO: 61254 - DNA, 777 bp, Bovine  19866881268556
  misc_feature (1)..(1): n is a, c, g, or t
naaaagtaatatatcatccaagggctaaccattctagaacaagtttcttaactcaagttcttcccaaaccaaaaataataaggtccaagtaaaaacatacaatcggatactttaagactcattagccaccaattcttttcaggagatgacattaatagaaatgtaacttaaagttcaattaaattaattctcatatatattataactcccttaattttctttcctatggaaaattgagctaagctagaaacaaattttacgtaaaaacagaaagaattttcacataagacttagctctaaaccttcaatatacatcttgggttttcatcttatttttttttttaagttgaatgttcatctgatattgaggacatacttattttctacagaaagcccaggctttcaaataatcaaacaccgagaaatgtgattaaatcacagcagaaagtagtaacagcaaggtaatataatgaggtcacaactcgagcagccaatcaaaagcataaaagcatttcctgcaatattaatagtcaaaagagaaaaccaatcacagaaaccttgggccttcttttgacagtcacagaagcaagagaaccaatccacacacactcggagttgacaataaggcgggaccacaggttcattgaagaaattcttgagggtgcagttactatgaacttcgcacgcaagtaacaccactccaagagtcaccaacactgtcaagccaggtgaaattcaaccgtatccaaaatgtagaccatcggggggaaagcattt

SEQ ID NO: 61255 - DNA, 1325 bp, Bovine  19866881913326
  misc_feature (1)..(1): n is a, c, g, or t
nttgcctgtagcaattgtttgttttaattgtgtgaattgtgtagatacaccataatatatctatccactctcctgttgaggacatgtggattttctctttttcttggctataataaataaagctgctataaatatttgtgttatgggtctttttctgggcatttattttttatttctctttgataaacaccttgaagtaaaatttctgggatagaatgttagatatttgtttaaattttattacagacagctttccagagttaatgtgcaattttacacttctatcagcaatataagaaagttctagtttctctacaaccttaccagcgtttgctgtcatttcatttaagttattctagtgagtatgaaatggtttggcttttatttccatttccctagtgtctaatggttgagcatcattagtgtctattggccattcatactacttcccttgtgaaatgtttgcttaactgcctgtttgaaaagttcttttttgtcttttcattatttgcagacattttccttatatatgttctgaatataagtatcatatatatatatatatgtgttgagaatttctgcagtctgtggcttgccttttcatttcataatggtgtatttttgagaacggaaaatttttaaatcgaagtatagtggattgaattgggggcttcccaggtggcgctagtggtaaagaatatgcctgccaatgcaggagatgcaagagatggagtttgatccctgggatgggaagatccccttcagtaggaaatggcaataccattccagaattcttgcctggagaattccatggacagaggagcctgtcaggcttagtgtgttaagctttctataacaaaaaacacttttgtgctatgatgatctgatagtagctaataatcactctgcccagagagaattctctacacattctccctgcacactcattgtaccaggtacgcacagtcaaagtgagtggttttacaggtattggtttggaacttttggttaaaatgcaaaccacaataatagtttagtttcctacattgggggaaaaaaaaacataggttaagctaaaattcctttcctcagtaggatcatgaaaataaaccttcaaaattcatcctgaaaggctatttagtggataatgaaaaattaagaagagaagaggatatacttttaacaagtagcaacttacctgatatgccattcttgctggtgttcaataaagctacagatgctacagaaactcttctattgttcacagtctgccctggttttcttgaggtacattcttcactatcactgtcctgtaaatttagtag

SEQ ID NO: 61256 - DNA, 1608 bp, Bovine  19866880395168
  misc_feature (1)..(1): n is a, c, g, or t
nctcccctcggccttcccatcccccatcctcctttagcctgtctccaccgtcctgcgtgagtcaggagtcttagggttagcaatacgtgataagccaggtgaaactgagacatcaataatgagggccctatggttcctactgttggaaacttaaaagttcttctattaatttctagaaatgtggcactgattttatctgattatactataaatgtatgttaaaaaaaaaaaaaggaagacaaaagacaggaaaaaaaaactcacctaccattcgaagatagcctctgttaacattttggtggatgttcttcaatacattttttttctgtatatacttattacttaatgttttaacattgactagactttcctttttacgataagcagaaaaagaatttgaccagttaacatctcagggagctgattaaatttttttcacataaaattaagaaatatttatcttatagtgtatttttaagtgtttataatcttagctgtccttttctcacattattttcttaaaagccaagatgcatctgaaaagtctcaggattgtgatgtgcagtttaaagcaaagcgtgacttcctcatgagcggtttgccagatttgttgaaacgacaaattgcaaagaaagctgctgtgttagatgtgtacaatgcagtgagctccagtttccagagagtcgttcatgttcagcaaaaagaccatggtgagtttattattacgagatatttttaaacgttaaaagcagcaatatgaaactatgtaagtgggttttaggtgagacaaaggttcaggtataattcttatgtgaatttaaagtagctttttatcctctctcttcctgggaaatcccatcaacagaggagcctggtgggctacagtccatggagtcacgaagagtcggacacgactgagcaactaaaccagcactaccgcatcctctctgctgcagccttgggctgagaaagggggtggggcaggaaagctgaagcccttagccctgatgccaggggagggcaggcacgtgtgtagagctgaagtgaatgctgtccagagaggcgctgtgttcttgaaacctgagcctgtctgtgcacagatcatcttgtaagagtttctgagaggaactccatccctgtctgtccagtctgcagctcactgtttaagagaaatctgtctgcctccttgctgtaacagcttgttctgtttggtaccacacaagtatcttgtgaaccatctggagtggtaacagggagccgtgctccactgttctagctctctctaccttcacatgtaccgcactctagagcaagatgtttacacaagccataggatggtgttaacttgatcttggtctaattctctgtggattcacgtgttctggtaaccacagtcttactttacctatttagtttttataagtactgatgatatacaaagccttctatctttgctttgttgttgttcctgaaaagtgttagtcacttcagtcgtgtctgactgtttgtgatcccatggactctgtccatggaattcagaggcaagaatactggaatgggtagccattccttctgcagatcttcccagcccagggatcaccggggtct

SEQ ID NO: 61257 - DNA, 833 bp, Bovine  19866880433266
  misc_feature (1)..(1): n is a, c, g, or t
nctcccaagtacgggaataatgagtgacctctagggtccctgctggtggatgaacactctgtgctcctggcggctacgagcattcggcactggctgcctctggtcctcgagcggttttgtacattttgctctctgggacagtgtccatttggactcacagcagaggggtagaatgtgccacaggtccaaggccaccgatgagatcatgccctgcacaaaggcaggaagggaggcaaaatccagcccattccccttctcaaggcttgtgccacaccagggttcccttagccagaagcagattgtctatttctacctggtctgtccagggggtgaatctttttgcaatttatactaagagtctgtacaccctgtggtcctgcaaggacctgaaacgagtgagcttctcggccaagaagaccataaaaccccaccagccgatgtgttgctatttcagaagcagaggaacccacaccttggtctctggggccagagcgagggcggctgaccttgttcctaatactcaggcactttgttttctagaatgcatcagaatcagccctcaagagataatgaaaataaccttacctgggggtgagatggttttcccatcggccataaattcctgtctctcatacttagctcgaatccactgttcttttaagaccctaaaaagagagaaacttgagtcagctgtgtctgatgcatcctcttttcatggcaattttatgagaccctgtagctgaggatgggagcttctcagcaaggcctggctgcctgcccagcctggtcaagtttctccatctgcatactattaacacttgggaccaagtaat

SEQ ID NO: 61258 - DNA, 1625 bp, Bovine  19866880540168
  misc_feature (1)..(1): n is a, c, g, or t
ncttctgttgttaagccggggtccccaacccccaggtacagactggtacccattgctcacatgaccgcctgagttccccacccccaccctatcccctgtccacagaaaagttgtcttccacgaaaccagtcccagatgccccaaaggttggggaccgctggtttaagctgtccagtctgtggtcatttgttacagcagccacaggaaactaataagtttgaagatccagaaaaagtgcccagcgtgatccctggcatggctaagtgctttagaaaagttagccactgttatcatgcctgtgcatgctcagtcacttcaatcgtgcctgactctttatgaccctatgtactataagcggccaggctcctctgtccatgaaattttccaggcaagagtactggagtgggttaccatttccttctccaggggatctttctgacccagggattaaacctaggtctcccgcaatgcaggcagccgctttaccgtctgagccaccagggaagcccttctcactactaacccacataaaatactgtacatttataaaatgagttttgatttacactcttccttgattatcttcagtttcccttctatattaccttctggattactctgctacttgactccactggcatggaaaatcaaaacctgatgaaaattatgtaatgatgggaggagaagcccacttacctatagctagggtcaccatgatgaatgggatatgtatccataggaacattttccattgaaatatcagtaagaagcagagactttctatgttttaggctacagcgacttcgaacttcctcagacactgtaagtaaagctaaaaggaacaagaaggaagatttaacaatttaataaatcataaatacgacttaaaataggatatacttcttacaagctcctaaagagaataacagctgctaaacacgcatgtaaagagtcttggagagtatgaagtttaagggtataaacccttaggacagatttgtttatcttaaagggtttgccatctgttttggaaggctgcatgtaaacactgaacagagacttaaacagtatctatagagtctagcgctttaatgtatatttgacctcaacaaacataaaaggtcagcaggccaggactataatgtccatttcttaggtgaagaaaaatactttgaaatgttaaatgatttgctcaaggtcaaatgactcaaaaaagttgctacaaactgaagtctgctaaactgggaatcagcactttccatcaaatgactatgtttatactcaataccccataatgacctatatgggaacagaatcctaaaaagagtgaatatatatatatatatatgtatgtgattcactttgctgtacagtggaaactaatacaacactgtaaatcaactatactccaatttaaaaaaaagactgttcaaaaactgtgttacatataagtgctaagtgttgatgagaagagaaacacaaattgggcaacagcaagcgaggatggtataatggaaggaggggagggcagacagtctaggcaaaacaaatggcatcaggaatgaatattaaagagacataaaggcacttctagtaaaggcaagcagactagacttaaaatagcc

SEQ ID NO: 61259 - DNA, 2973 bp, Bovine  19866880559371
  misc_feature (1)..(1): n is a, c, g, or t
nagctggcctctgtggtcccagtcccataaacagaccagttcccatgtggtaactctctgctttgctggagcatactcaggaaaagattataaaatatctcaacacaacgaatgaggtaaaaaaactatcaccattttacaaaatattttatatttcactagcatctatcaatctttaacttttggtaaacattatatcctatttcagggattttgagatttggggcatttaataaatactacatgtcttttctcaagttatctttttatttacaggttttttcccattgtccaattttcagaagagcttattcaaattattacctgaatttctctaaactccccagcttacatatgtgccaaaaatgaatgtatttatttatggtaagggtaatttagatttcagttgttatgttttagagatccagcctaaacacacagcacttttatcctcattgatgcctttataaatcagcattataagctaacaactgatatgacccataatctcttgatcagaagttgctaccttaaaaaaaaaaaaaaaaaaagttgctaccctttgtgctggcttttaggacaatttcctaaatgaaggaggccattccatacttgactcttcttcatctgactgactttatttctgagttctgagaaaacattcatactggattcttactggttacaatttgtactacttcaaatataatcatccaatttcttaagtacagattccagcctgtactgagataaatgttccctggttgtcctttgtcaacagtctcctcgttgctacagttccctggttggagtgtcataagcttactttaagaaacattttgtgacctggggacccatctgtcatctggagatactgttttcattttaattacaatttataatcttaaacaaactgaaagcctattaccactaatgatttgctactatgttgccatgttaagattaatcaaaacctacaattacagtaaaaaaaaaaataaattttacaaaggaaaacatagctcaagccatatgcaaagtgcttagttaagtaaatggattggtaagcagcgcggcacagtggtatttggaggctgatccctaaaccgtttttttaagtctttattgaattttttacaatattgcctctgttttatgttttggttctttggcagcaagatacaagggatcttagctttcccactggggatcgaacccaactcccctgcattggagggtgaagtctaaacctctggactgccaggaagtcccatgatccctaaaagttttatggactatatatgacctgaagttttcttcccaactttcttactttttcagaacatgtttttgaggcttaagaaagcacttgttaaaccacattttcttaaacacacgtacacacgcaacttccaagtaaaatctctggaatggttcaggaatgttgcccattacaaacagaaatttgtttttaacatgaaaactaacagatacttggctctgtccaggtttgttttacccaaaaagtactgaatgcaaatcgtatatgtaaatctgagatctattgccaacttttaaaaataggcttttaaagggttcttttaaaaaatcaagtgttaaaaaagtgagaccacttttgctaaagttaatatatacctatacacacagaaaaaaatttgtaaaaaaaaaaattccaaatattaatgccaaatagctctggggtttatgagcctggaggacatggtcttttttacacctttctgtagcacctaaacttttatagtgattctatattgctcttataatcaggaggaaaaaaaatcaataatccattttttattttcaaaaatgataaaggaggggaaatggctaatgaaggtgagagttgcccacaggcctgggagctggaaggaaccagaaggactaattgggaaacggcacgggctgacccagacagtcatggctcctcaaacagtctctgaggagaagagccaggcacacaagcaaccttggagtcacatggctccagaaagagccagacatgtgcctcagggaccagcggtcctaggaggagggccctgccctacatacaaagatcacttggatccagtccttggagaagaatccagtgtagaagagccaaagaaaagcatggtgacatcagtgaagaacaaaccactagtataattcgcaacatctcctagaaattagagggaaaaaacaatgagacagtgtcattgccctccacctgagaaaagaacaaagaattttagaaggctggtgagggtgtgtggagactaacagtcactcacggctggtgggaattattatatgactatgtgctcctgaaaagcaactgtaccaatcgttgaaagatactcacatccttttgtaattccctttctagaaatctaccctaagacacacgtaaaatgctttattgacagagatagtcattgcagtatgatttataattttttaaaaaggaaataacctgaatactgtcccacaatagttagaatggtgattttcaatataactttcaatgggcattatggagccattaaaaacaaggtttatggagcctttataataaacacataggggaatggtttatgttgccatgttaaatgatacagtaggatataatactgtatatagaatactattttaactacataaaagttcacataaaccaggaagaaatgctctaaaactttacacagttccctgtagattggttgggttatgaatgggtttatcttttaaaaaatattttgaaataatttcaggcttacagaaaatctgtaagaaaaataaaagctgtcatattccttttactcaggtttccagtgtcaccatttttctacacttgcttcactgcctgcatgtgtgcacacaatcttttttttttttttttttagccacaccgcacagcttgggggatcttagtcccccaaccaggaactgaac

SEQ ID NO: 61260 - DNA, 815 bp, Bovine  19866880659160
  misc_feature (1)..(1): n is a, c, g, or t
ntttgccttcttagcatgagggagtgctcaaaatgtgttcagaccctgagaacagagtatagtatgggaatacatgctttgaggcctacccctgcttttattggtttacctgttttatttgattggcttccatggattttcattataaattcttttttttttttttttggttgcacagcatgaaggatcttagttacctgaccaggaactgaacccgtgccccctacagtggaagcgtggagtcctaaccactggactgctaagggaaatcctaatgatttattttagaaaaagttctatggctgaaaaacttgaaaagtgccaagttacggtctttccaagcccccttccagctcagagaggccgattaagcaggattagtgggatggctggatacagagaatggtagaatatctgtggatcttgatattagagcaagaacattaaaaacctgtgtggagttccgaattggtcatgtttgccttaaggcttgatggcaaaggtgaggagaagtcactccactgactgtaggcatcctgagtacccgattcctctcttttagggtaaagaccccaaagctgtcatcagcatcaaggacttgaatgccaccttccagacagagaagattgggaacccccacgggctgcagatcacctaccggagagatggccgcgttcggaacctgtttgtgtaccacgagaatgggaaggtgagagggtggcgttgccgctcagcctccagctcagcagccccgaacctcgcaggcccagctccctactccctggcgctgcagcctcttagacacgatgctgctg

SEQ ID NO: 61261 - DNA, 2779 bp, Bovine  19866880930143
  misc_feature (1)..(1): n is a, c, g, or t
nctttcctgtaacttcttttttttccctccgtctctggattaagaatggagttacaaacttgaatggtgattttatactggaacaagggcacattcattaaactctccaaattctgaaatggtccaaacttttttctgtgttctacaatattgaaggacttttttccacgaagcaatttgaaagcttcaagttctttattagatgctgtattcaacacatgcaagatggaagcctgctgttctgaagaaaagagcttgtcaagtgtctttccagactcctttgcagtctcatcagaaaaatcaatatggggaatgattttctttggtgcagtggattctttccgacagcaggaattatgtagggcctggaataaggatgacgctaatggaagtggaaaacatctccatctccctaaaagaaaattttagcaaaatttaagttagacatagttccttttagtgttgtggcctaacgagggcctttgcaaagtgatacggactttcccataatttaagaactatccataagagatataggctgatttttgtgggtaacagacttaaattttactacatacaaatcttatgtccaacaagaagcatgtatttaaaacgattatttccaactttttaacgttttttaaaattttaaccttagagaaatctttttgcaattaactgatattttaaacaatatttatcttcactagtttctttctcatccagtggaatcaaataaaactaaattttagagaattccctgacgctggagtggttggcgctgtcactgccagaggccaggcggggaactaagatcccgaaagccgcacagagcggataaaataaaactaaaatttacccgtttacaagaaatattttagctgagtgataaatttaagagcggtttttattttctttcgtacgcttttcacgatttctaccataagtctacaaagaagaaaacccatacaaagagcaactctgtaaaaccaagggaacgttttacattgcggccacaggacaataacgcatccagaagtaagcaaggcagctgtcagacaccgaaccctctgccctctgccctcagcccagtccgaggagtcgctcgtggacccttaacccagggaaaggaatcccaatagttccgaggctcggcgatcagaaccgccccctcttctcggcagggtctccaagagggagaccaggacacgggacctgagagggtaaatacgccaggcgctaaaagcatacggcagattcatccagtattccaggcaccctacctccagccaagaggagactagggacggtcatcctccacgctaaagcactaggttcccacggttcagtcttcccccacggaattccggtttctgcgtgcttcgcccaaaagcgcccggcctgtcaaaggttccggcggaagcggcgttccggcccgccactaggggcttccagctgggctgtgggcagtcgtttcgtagagcctcgatgcagactccgccggcgtagtagtgccaggatccgcagctccgagctgcgccgtaggttcgttcctctgcatccggaaaacggccttgcccactgtggcccctgaaagcagcagagccgaatctctgggaagagaacgcctgggccggttttagcttgtagttggcaagatccctcctttggggagcctccctgggtttggatccaggcatctagattggtgaactcctatctgggaccctgtctggggcgcaaggaggagagtctggcgggggaacgtaggcaggaacacacataaccaataccccaggtagaatggactaactgggacaggtgcgaggtggtgtttcaggagcccagcaagctgaagacaagctccaggaagggagccttaggaggaagtggctttagcgctgggcctcaaaagtatcccctgtggaagggatggatgcagatcaggctggcaccaaaaatggttggtcctgttccaccagctaactggaaaccacctggacttttgtagagtcagacttgaggtgtgtttctgaaaaactgaccatacgttgaagtatgaggctggattagaggtaacaaagtgtatctggaagctagtgtatcctgaaggcataagcaaccgtcaggaattgaaccggggcagttgtgtgatcgggtaaggctggatggctgttccttgctctttgtacactcactgctagaacagtccccgcttcacctacaccaccctcacatgactgatcatccctcctagtcatagaacctaacgagtaaatgccaatgtacttgcccccagccccagctagtgattttcctaatctatagctcaaaacatctctactaggatagtttatcaaaggggtgttgaggggcatcccccttccctggtttctgggcaacctggggtcatttccctcacatccagtgaagacaggctgtcttgtcctgcctgccaccatgcagtgcctctccagaacccttttgcttcagacgtgtaagattccttatccgcgaaaccactgatatctctgttgccgattctgggctctttcacgaaagatgggcatggtatggcatgtgtcctcagttgtgtctgactctttgcagcctcatggactgtttgcaatccaccaggctcctctgtcgggattttccaggaaagaatactgaagtgggttgccatgccctcctccaggggatcttccccacccaggggtcaaccccacgcctcttgcatctcctgcactggcaggcagattctttaccactagagcca

SEQ ID NO: 61262 - DNA, 6485 bp, Bovine  19866880931034
  misc_feature (1)..(1): n is a, c, g, or t
nactccatttcttctgagggattcctgcccgcagtagtagatataatggtcatctgagttaaattcaccccattccagtccattttagtttgctgattcctagaatgtcgacattcactcttgccatctcttgtagatagggagttaattgatgaacatgaagctaatgtatcaagagggttgatttagggagcactgttaggtaatttgatatgatattcaaattttataaattcataataaaatatgtgacactagaatttaaaaaaaaaaattgtatctttaaagtctttacttgttccttttgtcttttatagaagagaccaagcaagttttgagactcagcttgacagagttctcattaccgaaattttacctgctatttggcattagcaaagtcaagtcagctgctgtcattgccttccgctccagctaccgggacaggtcattctctcctggctcctatgagagggagacttttgctttgacatccttggagacagtcacagaggctttgttggagatcatggaggtatagaaggcaaaatgataagaagctaaactcatttttaaaaatccactggtactgtatagaagaaatactgttttattctgttttgcacttaatgcttaaataaaaacattcccatagactgtgtttagaattttctagaaatatttatgtacataaatatatttagagtatcttttttttaggcatgtatgagagatattccaacatgcaagtggctggaccaatggacagaactagcacaaaggtatgtcccacatttaagttgcaaaagtatgtgtactgttgaaaagatagatattactgcataattgatattctaagtaattattctatgtatttatatgtatgtatataaacacaaaggttttcataagctctttgaattttttaattgtagatttgcattccagtataacccgtccctgcaaccgagagctcttgttgtctttggctgtattagcaaacgagtatctcatgggcagataaagcagattatccgtatcctcagcaaggtacttccccctctcttcccaaatatttgtggttcccaagttgtaaattatatcttgaatttttctaagggacatttaaatttgaatttaataaagtatcttatatgttgtttattgaacctttaaaaatgggttttgattattataattctttgaagtaaagcctctctagagaagatatcttaaaaaaattaagtatttcttttggcagaaggtactcttactgttttattataagcattttactagatggtaagacgagccttacctttctaaggtggctcagtggtaaagaatctacctgcaatgcaggagaggcgggtttgatccctggatggggcagattgcctcgagaaggatatggcaactcactccagtattcttgtctgggaaatcccgtggactgaggagcctagtgggctacagtccatggggttgcaacgagtcggacacgacttagcgactgaacaacaaccacaaagactagccttgtataaaattatgtaatttgtaactgctataacaatgcctgacttcctatattagcatataatatagaaatacttcttaaaaagattccaaatgtgcttactagctaccaagatcaccacagcattggaaataatcctcgcacttattaaataaagaattgttctgaaataattctgaaattcagtttaggagtaaatgttttgtttcaatgaaagtaacataaaaattctgtttctctaaaaggctcttgagagttgcttaaaaggacctgatacttacaacagtcaagttctgatagaagctacagtaatagcactaaccaaattacaaccacttcttaataaggtaattactgtgtagaaaatgagtgcatttattttgggtgttagtgttaaatgttattttctttcaaagagttcagaaaataagatggatagagaaattataaagaaaaagctatagttaaagtagaacgtcttaccttaaaattcagttgttttatttacattagaggaagagtaaggatggagaatatgttcttaagtgcttaggtattgtcttatcagtgcttaaaggaaagatggatatatatgcttaattctttcatccagttgagcatctgctatgtgccaagtactgttttaggtgctagagatataatactgaacaaagccaataaaattatctgccttcagggaactttaattctggaatgaatgtgaaagttgaggagtggctagataataaagtgattaaaatacatgatacgttagttggtgatcattgttgtggagaaatgtaaagctggggtaaagcacacctgataatcaaaggagtttgggtgctaagtgaagataatgtttaaaggaaataagataatagcagccactgttttaggatggtctgagctcatctcagctttgtgacctcaggcaggtcatctgtataacatctggacattatgtttctacattaataaattgactaagtaatggcatagtattatcttccaactctaaagttgtattctgtgaattgagtacaaagatacgccaaattgagagagattacatagaaataaagacctgtatgttcttggtcttgagctatatgttctacaaacattataaaatggccaaattggggttcttttgctattccaaaattgatatttttgtgtgcacagttagaaaaagacgctgtgcaatgctaactgtaaggtcaaactgaatggaatgcgtctggcccagatggtttttaaaaaagtcttccagctcttctgcctcctgcttctcacctttccccagcaaaggaggataaaaaaaattcagaagtgattatagctcccttaaggagaaacctattacagggagaaattaatcatcctcgatgcttacctatacaccctggatccgaacagaatttaggggtttagctaaggaatttcccaatcccagctaggatccgttgggatttgttaaggaattttaattgaccatctggacctaagagcccaggttttcagatctgtatcaactaatgcagatgttagtttctgaaaacagaacaagggaatgactagagaaagcaaggtgaaaataccacttaaaggactgtgaatcacatagtccagaagcttgcaccaaatacaaggaattagctcagaaattactcaaacccatctcagagctttctccaaaaaccataaatggacaaagattcaacagtgcaagcaaagatcagatgaatcaatccaaactattaaggaagattggggggaaaaggttttaagcaatattctggcttgacatttgagtcattctaacaactaaaatgatccttttgcttaactccacctttaaagaaggcttagatgaggatttagctacttttgtcaaagacagtctaggttggtctgagtgacacacaaaacactcttgttacacgggctgaccaacttttcaaaacccttaaaaaaaaagaaaagggggtatctgtgaaaattatgaaacttcaattgcaccactttattaccccaatgccagtagaaaattaactgacccccaaccaatttaattcccaaaacagtagagaaagcttgaaggaaaaaaaaaaatctctctttagaattcttgtcctgagggcagaaactcctactaggagaacctgattttctctccctgtgccttgagacccagagctctctggatcacttatctagactgtctcttaattgctgaaactgagttgggggggaggaaagaagccttttaaatttttttattccaacttattcacattttgttttatattgtcatatttgattcatgactaagtttagaaaatgaaggtatatctctgactgtgtctgtttggatatatgtacgtctcagtatgtttctttggataatattgctgcggttaatttgtaaaatgagctctaacctaaccagcctaaagaaaaataagcacttgcaaatcaagcagttctaaatacaagagaaattaacctaagtgaatttcaggttcacatgaattaagaaatattcagtattaagtacctggtattaatatttgttgatctaattaatatagacatgcttaaaatattaagcataatattttcattgtgcctaggtttaatatgttaaataaagtgttgttatatctgttgcaaatttgtaagcaaggaaagtaactcaactaaagaaacttttaaggaaagaaagcgtaaatgagataggaacttttagataaactctattaaggggctaccccaatggctcagctgtaaagaagcacctgccagtgcaggagatacaggttcggtccctgggtcgggaaaattccctggagtagaaaatggcagcccactccagtattcttgtctggaaaataccatggacagagaagcctggtgggctacagtccacgggatcagagagtcagacacgactgagcgcacacgcatgatttcttgtataccacagtgtgttctgatgagacggtggtgtatcttactaacctggagtgcgtctcccctgcctaggactcccctctgcacaaagccctcttttgggttgctgtagccgtgctacagctcgatgaggtcaacttgtattcagcaggcactgcacttctggaacaaaacctgcacaccttagacagtctcaggatattcaacgacaaggtaaacaagctttcggttggtgtttctaaattatgcatgttagagtgtctcctttttttgttgttgttttcttttaaaattagaagagatccatctttaaatatgaatttccgtgtaactggttgtgaatatattccttactagctcataaaatggtttaaactttgcatacttttttatataaaaatagcaaaaacacagtacttgcccaatattggtaaacagaataaggataaaaatattgagtaataataatagctaccttgctaggctctatgctgtcttatgcactgtacattcattaattgtaatttcataatccaagggtaaaggttagcattccccacccttacttcacttcatgaagaaataatctaaaaataagctcacttttattgaattatggtacttaatgagaaataggtataattagaagcagataaggagtttggaggtgtctaaaggaaacttttggatatttaattatgctagtcttttgtttgcttaatcccactttaaaacatattaataccatcaccacccctcttaaaaccttttagttttgattgagattgggttttggtttgcagagtatagtaaaagaaatacaatagtaagaaattatattcattttgtctttggaggaaaaaaagagaagcgtctaggagaaaagagaggaattttaagatagataggtgtatataataagagatttgcttaaagcaaaattaacagaccttgtgagaagaaagaaacagaccagagcctggttttatgtgtgaagatgcctggtctaagcattgtttgttttgtcttccaaatagtagtgtagtgtagacccacaatagctggggctctgggaaatgtggaagcagaattttagatgtagaagttaccttgaagtttaatcatccattttataggatagaaaagaacaaagaagtcaggtaacttgttcatgtttgtgcatctgatttggaactagaatctctctttcctaattccattgctcttttctggagtggtcttaggacagtggtggtcagagagatggctagcttttggccttttgtatgaatataggatatttgtgagtgaagtgtttgtctaggaatatctgccttggcattttcattgccaaaatagacccattagcagaagttaatattgactccaaatgcctcaggatactaggaatccattaataaagcttgttaaaagttaccagaatgaaagatgaataaggtctgaggatctattatttaacctaatgactatagttgataacactgtattataattgaaatttgctaagagaggagaacttaaatgttctcccccaaaagaggggatgggatataaatatgtgaagtgatagtttattaacttaatgggagaaatgtatatgtgaaaggatatacattcattcttcaaatcatcacattgtacactttaaataccttacaattttgtcagttatacctcagtaaagctgaaaatatatatatacattgaacttatagtaagttagtactttaatatttatgtaatattctgcaacttgcttttttttaacaatatgaacatctttctaaagcatatatatatatacacacacaaaatttcatgtgtgtgtgtgtataattcttgctcatgactgcagagtattttacagaatgcatgagccacaacgtatttaaccttgcccattaatggacatttggttgtgtctgttatctttttttattatagaaaa

SEQ ID NO: 61263 - DNA, 1881 bp, Bovine  19866880934887
  misc_feature (1)..(1): n is a, c, g, or t
nccaatgagctctgggaggggagggaccatgcctttgtctcggtagactggcaaggggcctttcttgaattgctgatgcggaaaggactatagggaatgtgagaccttagcgtgtctcaaggcctggaggaggtggtgagctgatgggtctgggggtgcagtccctgcagaggtgtcctggagagcaggttggaaagggaggtcttcaaactgtgcttcctgatgatatttcaggccgattcctgggcttttccctgagaagacttaggggtattttttttccttttggtaccagcattaacatgcaagagcatgcttctcactgaccacaggccctttgcatctgaccttgagctagagaatcttggaatgaattagctgaaagcagaatgcctcccatttcccaggagctcgtctcatctcctgggatcgcagagacacatcaagcttgctccatgatctctgtgactctgaaagggggcacgtctacgggagtgcaaggagaagaggcctggatgcaggaggcttagggtcctgccctgattctccactgaccaagtgagtggctttgagctggtctctgcctttctgggggcccagtttcctttttgggtatggatgacctgccagctctgacaatctaactcttgtccccttgggactccttatcctggctaccagaatacggggccccgaggctgtgggtggaggcggccctcttacttgggagctcctgaacatctgtctcccaggatggtgaagaggctggaagtgctaataatagctggcatttactgaatgtagacattgtgcaaggggaccttgcatgcatcctctcactgaagtgccacacaagccctgtgaataatagagctcctggccgtctggacatgtaaaggcaaggtgttatttgtagtatcatgagttgaatatcgccccacgtcttgctaggtcagatgactttacagcgatggaggaataaaggtctggctttagtaaaggaaataaaggaataagaagcaaggtggtcagaaggaggatgagttcaaatggagggaggagccctgagaaagtggggatagaaaggtggtgtgggtggagctggcgtcggggtggggctggaggggagttctgaaattgctatgtctctggggtcagggcatggtacccagggttcctcccactctgggcccccagtgaaatgaccaagggccatgagcaccagttcaggtttgagttgcccggggctttgctggggaaaccactagattctgaaatcagcctttaggactgattttgggtctagcttgtgggtgagctataattatgtccattatacctgtcttgaatgattcacagatggcaggagcttacgtaggagcaatgttcctcttaattttttttttaaacttaaattttccgatgactcactggagttgagaatacagtctcattgatgggagagaagaaaaagtggggagacagaaaaaaggaaaatgtcatcgggtctactggagacaaatgaaattgtccaaaccatgtccaggtgattctgtcctataggttcaaacctatcacccactctcccatctgttgactctcccctttctagaagcggcagagagccctggagtcccaggaaggcagtggaggtacagctgatgctgggaaggttgtgttttgaaccagaagcatctggcttcaaatctctgctcttgccttaatgcttgctgtgtgaccctgagtcacttttttaatctctctgagcctctgtttgtctctcctgcaaattgggaaaagaacagctttgcagattgctgggaggatgacatgaggttatatatgttaagaacttacatatagtaacgttagtcactcagt

SEQ ID NO: 61264 - DNA, 2058 bp, Bovine  19866880950402
  misc_feature (1)..(1): n is a, c, g, or t
nttacaagggaaattttttaaactagagattggagaaataggacaacattaaaatcactaaggaggagcagacagacattgtatgcctcttgttgtcacactgagaaggaaacaataacatttatgcagtcttccagccaggaattcttaacccatgtgtaaccatggagaaacagtagacaacgctcaaatgaggaacattctattaaaggggaagactgcattttcccaccatgtcaatgtcataaaagacaaggcttggaggtgggagggagggtcaagagggcggggacattaatgatacctatggctgcttcatgttgttgtatggcagaaacacacacaatattgtaaagcaattatccttcaattaaaaattaattaattaaaaaagaatttttaaagataaaaaaagaccaaggctactattccagattaaaggagactaaagagaaatgacagtttaatacaatacatcgtttctaacctggattctggactacaggggaaaatactacatcaaggacattattgagacaatcaacaaagtggatggtaaatgagataccatattgcatcgatgtgaaatttagtgaaatggataacttgactgcatggaggcaggaaacactaagtatttaagggtaaaggagggctttcctggtggttcagaggtaaagaatccacctgcaatgcaggaaacttgggttccatgccctgggttgggaagatgcccctggagaaggaaatggcaacccactccagtattcttgcctggagaatcccatggacagagaagcctggtgggctacagtccacggggtcacaaagagtcctgcacgactgagcgaccttacttactttaaatcttatagtcataagacgttatggtggttagcttttaaggggaacagttttgatgagaagaattttcaatgtaatgttaggtttttaaaattgccttttttggcagtttataaatataaacatttctacaaatacttattgttacatgaaacaataatgtaaatgtataagaatatatgtttatgtcaaggagcaaaatacttcaatacatatttttttctctagattctggaattgaagacatgctttggacggaaaagtatcaacctcagaactccagtgaactcataggcaatgaactagctataaaaaagttacataggttggtaaaatttataaaggaattgagaaatagtttatgaatctagttttactatttatttatactgaaatctagaaattatgggcttctctggtggctcaagtggtaaagaatctgcctacaatggaggagactcgggtttgatccctgggtcagggaagatcccctggagaaagggagtggctacccactccagtattcttccctggagaattccatggacagaggagcctgacaggctacagtccatggagttgcaaagagtcacttttcatatttcacaaatgcttgtgataagtttgcttgtgacaagtttttttgtaacaatatccatcacatcacacttttacacttcttttcttcatgaaacattcacagtatactcccttagcaaatttcaagtgtatgacagattattgtttactatagtcaacattctggcatattagattcctaacacatttatcttataactgaaatctcatatctgtttagcaacatctcatcatatcccccactctccatcctctagtcttactcccagtttctgtggtctggttgtttttttttttttaatatttcatatataagtgagatcatataccatttatctttctctgatttattttacttagtgtaatcacctcaaggtacatccatctatgtttccacagatagcagagtttccttctttctcatggatgaataatacccttttaaaatatatatcacatttcttgattcacttttgagtgggcactaagattgttctcatgtcttgcctatagtgaataatgctacaacaatcacaggtgtgcaaatctcattgagatttttatttcatatccttcagatgcatacctaaaggt

SEQ ID NO: 61265 - DNA, 1443 bp, Bovine  19866880958693
  misc_feature (1)..(1): n is a, c, g, or t
ngtgagtagtaagtacccaaagaaaatccatccttactattttatttcatcccttttaggactaaaagattcataaggagctccaggcaggtcaggatttggagatgcaaatgccttacctcttctaaatagacagatgataggtatgatcctttcatcaattggcaatattcggtttgctgccaatccagcactgccaatttacgatcgaggtgagcccaggcaattcttcgagtaccagaaacaatggatacaatactattaactgcctgaaacaaaaaagcctggtttaattataagtgtgaacattttaaaagacaagatttaagatacaaactcagaaatccaaattagtttatgtgatagaaataatatttagtttatgaactaagaattattaaagagtagttattattaaaaggtaaccagcagtagtcagtttatagacagaacttttacttgttctcagcacctagctcaacgcaggtgttcagatattcacatgttgctggggaatgtgctagatactgggaaacgagggacatgaccctacattataagaaacaccaccatacaagttacactgtagagaggagaaatggtcaggaagacttgctggaggactaggagactgagtaaaatggtaaacaggaagttatttcacccagatgtctgcagatataggctgacacctctcagacagtgtcctaaagaatgcaagtggtgaaagggcagagggatgggcagatttctgcagaaagtaacttcctttatcctgagagctactgggagtcaccaaagcatacacattcaggtgtaacagatgtacatttcagaaaggacagggacagctgtgagaaaagtgggtgggagatggctagactagggagaaagatctgtattaggtacctgttacactacaaagttttaagaatcttagtcacagtgagaagcacaaacagattaaaagcaataggagtataattgatatgtggaataaaggaggaaacgaaaacagccaggtaactcaacattcctacataagtcctgcacagacctacttctctacatcaactatcctatcttcctaaaatgcctttctcttcctactagcatagctctctctccaggatccaggctgagttctagtaaacattccccaacacacagttctctccactaaattgccaatttactacctgtacatttcatgtctttgagaataactataaatagattgtctatgtgtgtatccctgggtccacaggagtaaactataattgccagaagaaccctgtcttggtgcccagaatagtactctgcaaagtaggttgtcaaatatttaggcagtaaaagagatgttaagaaaaagagtgtaccttaactctctctcttcctatttctgggtttgatgagctttctcaagagccgactttcctgtaa

SEQ ID NO: 61266 - DNA, 2036 bp, Bovine  19866880987158
  misc_feature (1)..(1): n is a, c, g, or t
natatatattttaaagaaaggatgctgagagatggccaatttatttatgaacctggctaatatcctacaggatagtaaaaccaaacctttctccttctgctcagctttaaaaagacaggatgtaagtggtcactctctcaagtctgctcaaactctaactcagtgaatctaagttctaaaagcaggcgtaaacttgagcattaaaacctgagtaggcaggaggtggaggcttccctggtggctcagatggtaaagaatctgcctgcaaagtgggagacccaggtttgatccttgggtcaggaagatcccctggagaagggaatagctacccacttcagtattcttgcctggagaattccatggacacaggagcctggagggctacagcccatggagtcgcaaagagtcagacaccactgagtgacggagcatgcgtacatgcaggcagaagatggagttgatgtcctggaaggcggacttacaagcctggcttagcccagcctttctagggtagggatggttggggcagaagacgggggacagacggtccagggcagaccagggaacgaacagcagaggtcatcaacatcgcctcttctttcgccccagctgcctttgggttaatcagaatttagtttcttctcaaagatatgactcaaggatctttttattcttaaagaaattctcgggcttgggataagtaaattattctttcctttggaaggaggaaggtgttgaaacagaaagcacacacacgcactggggccgtatataagcagagaggatcaaacaaggcccctccctgagctaggaagcagccgcccccctctccttaccagtgtgagctcggtgccgccacccacaccttcaccagcaccgctgagtcacagcgctgtttgtcaggaaaagtatttttagaatttaaaagtaccgttgttgccagtggttttagaaatgcttgcttcagaagggatggaattaagcaatggcggacttggaccttcgagcctgacacacccccagtttagaagagaagctcagggcagatacataaaaactgtgcgggcaagactgaagtctggggacttccttggtggtccagtggctcagactccatgctcccaacgccaggggccttggtttgatccctggtgggggaactagatccccatgctgcaaataagacctggcacggccaaataaataaatattaaaaaaagaaaaaagatgagttgggcaaagctccctctaattatgagccagtttgggctcaggctgaagacctgattcccagcaaaccccagtctgttttgccctccagggaccccttaagtataactctgtaaagaacttcttgcctgtgaggtgaagagggcaggagaggggctgagattaaaaaggaaaattggatgctgatcttaccatagacatcaacgttcactctgtgaatcaaagctttaaatataaaaaccaaacacataaaaaaaataaaacagaagagtgtcacagccttgggcaggaaagctaagtattacaccaaaggcagaagccacaacggaaaagattaatgacttggctataaaaatcttttaaatttgctgtcataaacaaagttaaaaataaatgacaagctgaaaaaatacttgtgatgtatgtctaaaagttaatatttctagttcttttaaagcactggaaatgaatacatccacagaagcaagggtgaagaatgtgggctgccagttaatgaagaaaagaactcctggtgactgataaaggcaatataagaagttcaaccatattatgattcaaaagagcaatcctaattttagcctctcaaatgagaaagatctgagaaagcagaacagccagtatccaagggtaggaggaatctgacacaattctgaagaacgattaattgacacaacttttctggaaaggaatttgacagatgtatgagaaattctaagaactgcatcatttggatcaaacagtttccacctatcagaatttattttaaagattggtgaacgggctcc

SEQ ID NO: 61267 - DNA, 1209 bp, Bovine  19866881011661
  misc_feature (1)..(1): n is a, c, g, or t
ntcctcatactagccattagatctctggggatcctgtatttccttttttttggaattgactagaaaaatctgtaagatttctttctagtttaaatatttgatgaccttaatacttttaacagcatcctccctgtgccacaatggtctgtggggagctgaccccacttaatttacctaacattttctcgttttgtctcagtgtgcacctatgtcgcaggcaagctggctcagtctcttctgtgtatgtcaagcttattgctgcttgtctgcctctgtttataccagcccctgcctaaatgctttaattcctcttttatctttttctaattcctgtccacacttaaatgggtagctcgagcttcatttttcccatgaagtctttatagactaaactcactgcgtcctcacttcttcatgtgcttgtcacctcaggttctacagaaacaccctttaaggtgtctccccttggaagggttgattgaacatagcttagcattattttcttttctcttctcttttttatcaaatggagtgtaaactttctgaaaagcaagaactctctgtgagaattctactaatagtcaccccagggcccagcagagttataagcacacactgagtcattgatggaatgtttttcatatgattcttggttcaaaggtagactggctaacaggagtggtaatttggctttattttaaatgcaaataactgaattttattaataatttagtgtttatggtggcctccatcttataagtgatactttaactgggaataagtttttaacaaaagaaagctttaaggaggaacttgtacctatttatatttcctccaacagagctagcatttttgaatcaagtttcagatctgattgactacctttgtgatcttgaatttgtcacttacttttagtgtcaagtctgcataaggaaaattttttgcagtgatctgataggataaattaaaagacacttgctccttgaaagaaaagctatgaccaacctagacagcatattagaaagcagagacattactttgctgacaaaggtccgtctagtaaaagctatggttattccagtagtcatgtatgaatatgagagttggaccataaagaaagctgagtgctgaagaattgatgcttttgaactgtggtgttggagaagactcttgagagtccctgaactgcaaggagatcaaaacagtcca

SEQ ID NO: 61268 - DNA, 1646 bp, Bovine  19866881011989
  misc_feature (1)..(1): n is a, c, g, or t
nacttatattgtagttgaaatattaatagatggacaatagtccagtcagcaaagcgctaagtaaggtcactgcagacagtaatagattctcaaacaagtagaggtagtgttagtggtggctcctaatttggttagtagtgagagactcttgctatttcttggatatgctaccttcattcccacatcaaggctttttctacttgctgttccccctctggaaacgtctcctgcactttcccaggtggcttccttcagctcatttttggtctcaactcaaaagtcagtgcctccagaagggcccctctgagtaccctaacctacccttatttatgcctttcattgtttgtgacctgactctgcccactagaagtataagttctcctgaggacaggttctttgatttgtgggctgttgtttttcagctatggtttggtcaggaaaatagacactactctatggattccacttttgaagggttttaatccgtggaattggagactcacaattattggaagggtgatgggagttaagatggggtggggagccacaggtggggagaggaaaagtggatggttttcaagagcgctccaagaggccactgtgaattttgagaaatactggaattggttgccaatgatttcagtctgttgcaacaaggaaagtagttttcaagagtctgcccagaagctgctgtgaatcttaaagaacttccaggaagccactgctggctagcacacttgcctgcaagtaggctttcttggtggctcagatggtaaagaatctgcctgcaatgcaggagacctgggttcaatccctgggtcaggaagatccactggataagggaatggcaacctactccagtatttttacttggagaattccatgcacagaggagcctgatgggctaaagtccctgggtcccagagaattggaaaggactgagtgactaacatctggaagttgctacaagcttcccatccaccactttgaatctgtctcattgacagcctcgaacccagaaacatacaggggaggagattctgggaaatatggttcttgtctttccctttgtagagcagactacagaaggagatggcaattatgccaagttgaaaacatacgatccaacatgccgttgtatcgccaatatctagaacagctcttgacgtatagcaagtgctttggtggtagttaaatgactgcaagaatcattcctggtccttggtggtgtcaaaatttgaaccctcaactatctgactccaaagcccatgcaatttcattccaataccagctgaacaagctatgaccttgaccctggagctcaggctggaactgctgactaataagtcccagacagggtctgtgccccatgtatgcccacagtgctgtgcatattagggacaggagcagtgagggaggttggagagcccagggaggttttgagggggataggctgagaaacagatctctaaccctctgtgatcagtgctcagaaacttctggaggtggtggcattgtagagtgcactgggttgagggggaaatactggggctgctctggggtgggcatccctgacagccaaggagatagctcagcccttgagagcctgagcattggccaggagtaaccttcctaggacttcccca

SEQ ID NO: 61269 - DNA, 1771 bp, Bovine  19866881045214
  misc_feature (1)..(1): n is a, c, g, or t
ncactgtcatctcgagggctctgaggttagcttgcttaggagcccgactcccataggtgtgtggatggtgggggtgggggaaatgggaggagccacagggcagacgtggagggagggtcagagcagaggtgtgtgaaccaccagagactgggcgcttctgagatactttcctggaagctgctggtggggagtgcagtagaccggtgtggagagggactgctctccgtctgcacttactggccgactgaccctggaaagtaatttcacctgtaaaatgtgggcaataataatacctctgacctagagtcattgtgagagtgtatggagaaactcttagcacggggtcttggcactgaaaattttcttatcaactgagagctgcaatcattatcatcatggcctgttctctaaggcaggctttttcaaactgtaggaggtaacctgtaagtggatcatgaagtaaattgaatagcttgcaagcagccatttttttttttttaaacatagaacagaatggattaacatcaagtaattggagtgcataagaatggttttataacacattttataaacgtatatatatttcctcccatgaggcaaggctgaatgtttgaaagccacgcttccaaggcaatgcttctctaaagatggttggaaggagcgttttttaaattagtaatttgcaagcaactgtcatcactttttggcttccctggtggctcagatagtaaagaatccgcctgcaatgcaggagacccaggttcgatccttgggtagggaagatccctggagaaggaaatggcaacccactccagtattcttgcctggagaattccacggacagaggagcctggtgggttacagtccatggatccaaaacaactggacccgactgagccactaacacactcatcacttttgccagagcagaataccacttgtgcgtgtgtgctcactgtcctatttgctaaatactggtctttgagttagcttatttgaacctcatcatgataacaatattcatgaaatttattttttaaaatatctattacttttttttttattaacctaaaaccatctcacatatatatgtacaccaggctttggggacatggtggtaaaaggagcatcttctgaaagcattttctgaaagctgggagccaccagaactgtgagacacagatgagtccagcgctctcagggtcccattctgtccttggaggcaggcctggccctactgcccagtttctgaattcttgtggttgatcttcccacaatgggcacctaaggaagcaaagagcaggccctgtctgcttgtggactgattcaggacctttcctgggacgtaaccccctagtggaggaggccagggccctgctgtatcttatcttttcttttgtgagccatgtcctgacgctgcacaagtttgcagaatttcctttcttgtccagctttgattccattgatgggattaggcgccccccacagccatgtcctttgatgtggtcagggggtagcagggagatttcaagctctgggagcaaatcttaatcttctgcgggtttctctgggatcagcgctggggtaaacccattacatccctgccctttcatccccccaggacactggctcctccagacttctcgagtctcagagatccaaagggtctgtcagatttagagagagcaataaaagaggaagagaaagcagagcacgaacctcagacccccgccagcacccgcagcatcaccagcaatgtcagggcatcttc

SEQ ID NO: 61270 - DNA, 1228 bp, Bovine  19866881085951
  misc_feature (1)..(1): n is a, c, g, or t
ncattttaaggcacttgaaaaatctgactaaccccataccttaaaatctcacattttataaagtgatttctctatatttcagtgccgagtctaaaggaaaacaatgtgtatatttacaaagtgaatgaatattagaaagaaatccctcaactgacactgcagcaaatttctggtgcatgcacttgctattgaatatatattcaatcctaacgttgactttctcttaaaaaaagaaaaaaattctgaagtcgatttttttactgatttaaataacagcttaccatagtgtcgtcttcaacatcagcatctcattttctccgggaaacttaagcttaaaggtcgccttgttctggaaagtaggaaccgcttctggctgtgggctgtgcttgcctgctcagctgcattgtgttgctgtgagctgaagctctgcaaccacctgatcagtaccacataggaggactgcagagctgtcattggtgcggactcaaatttattgcaggaggtgcacacgcgacagaatgaaccccgaaaaaatcttttttttaatttacagcattgagtgtacccatatagctcagatttgccataggaaggaaaacctcgtggactttagacctggccctactcatttctgtgtatttgtctgagctttggctttacattttaacatttacctcgtggagaattcgtggttctttataatgctcctacttttcatgctttttatacattgaaaaatgctgaaaatgaacttgaccttccttgtggatggttttctaagatattagtttaactgtttttgaactctgccttctcaattttttttttcctaaaatggtacaattgtcatgtcacttttaaaaataacatctaattttttatgtgctcccccagtgtggtgattattatgtacaaatcaccttttcaatttatcagccacttaactgttcatcttttggggaagtacaaaagtacttaaatatgattattttattttatctttttgatacaaaggattattttacccaggctatacaaatgagggaggctgtgtttttaaatgaacgtctcatttttctaaattatcagttcatgtggtaacgtaaatgtgttttattttatgtcttttggattaaggattttttttcttcatgaagttactttgatgagtgaatatgaatattattttctccagagacatctttggtaatatatgaataactattta

SEQ ID NO: 61271 - DNA, 778 bp, Bovine  19866881184074
  misc_feature (1)..(1): n is a, c, g, or t
ngagtgctcgaggacagcaagaaaaatgagggactttcaggggcagctgtgttttctgactcagtcataatgcccctaaaaatccttattgttcttgcagtgtgcatcaggcggcggccccagcccagcccttgcccacctggcctctctgggatggggagaactacctggggttcagctggcgtgccctcccacgttttcctgaaatgagactgtagggggatttgctgatgagttaatgttttgttggttgatgcattgattggcatgtacttttataatttcttttttggtggaggatggggtaggctgggcactgagacactcgcgcacagattggagcccaggagaatgcaaggtctccctggtttgtgcgcagtgaggggtccctagaacttagctgcacattacagcctgaggaaggggagcttcaagggcaggtgtacccagggctaggtcatgtcctactcttgatgaccccatggactgtagcctgcccagttcctttgtccatggagtttttcaggcaggaatactggagtgggttgccatttccttctccaggggatcatcccgacccagggattgaacctgcgtctcccacattggcaggcagattctttaccactgagccacctgggaagccccatttaggggcactgtgttttaaaacgggaggagcctcagtgtgcaccgctgagctggccgttttgcaaatctgcctgcagtggaccgaggtcttcccgcagctgttgcccctagagcctgctttctcttg

SEQ ID NO: 61272 - DNA, 1605 bp, Bovine  19866881238096
  misc_feature (1)..(1): n is a, c, g, or t
ntattctatgagttttattttccatatctattttatactgcttactaaagactcagataatgtgtgacataaatatgtagtgatgagtatatgcccacacattttaccatagcagtttttttcttagctttaaatattagtgataatattttcatgtcatcatcattactaaaattctatttgtgtaaaaaagcatatttaataataatcattgagtgtctcatctaatcacctttgtttatttttaaatgaaggtgaccattctctctatgaaaactgaaggggattaaaaaataaaaataatttaaacctatggattgtgttatatataggaaattttcatataaagaaaataaaattttttaacagttggtattttggggttgtagatttagccatcactcatgaattctagttttatttccaacccttagctttatctgccatgggtgtagttttatttcttttaattacagaactgaggtcaacaaacataatgattgaataaactttaaagggtttatattacataaacctaggtgaaaatttttctgaaggcaagctcaacactgaatttttaaaattccatgcaacaaaaccacaatacctgttatatagatacctttagacaatcagactttaagtttaaaacaataataacattttagttttaaaaattggagcgggaaatggcagcccactccagtattcttgcctggaaaatcctatggacagaggagcctgactggctacagtccatggggtcacgaggagtcagacaaaagtaaattttatataaaacaaagatcaaaccagattgcctgtgtgaaattgtcttaccttggctgttaacttcttttgcagaaggctaaattcttgttctaactggacattttggtgctttggctaagaaagcaaaaagtggttccgaacgttcagattaaaaatgatcctctagcacattgaaataggttctgtagagaaagaggaagtttatcaatagttggttccggaagtgcaataagccacaaaatgactaagaaagtactactttaacagagcttaatttgaaacacaatttggagctacatgatttgagtgcttttaattaacatttgtaagtaaacatttgagactctctagtaatgtgattcagtcagttcggttgctcagtcgtgtctgactctctgagaccccatggactgcaaacacacagtaatgtgattatatagtttaaatacttaaaatagaaccttggagagaaagttatataaggaaaaactgccaggcaggttactacccatagtgagatttcttttcataacaaatgaatgatgtgtcctgtttacttgtgtgaccgtaggcaagtcgttgtacttctggatcaccgtttcctcctctggaggaatacttctgttactaggttttgagaggattcaataagataaaatatataaatgccttacacacagtcggtagccagaaatgttatttcctcttacataatttaggctaaacccaggtaaaagtatgattaattttttccaaatagtttcctaaagatttttaagttcaagtccacaactcttaatacccacaaagtag

SEQ ID NO: 61273 - DNA, 1233 bp, Bovine  19866881245310
  misc_feature (1)..(1): n is a, c, g, or t
nataagtgctagatcatataatttgtttcctctgctgaccaaggttttgttgttgaccaaggcttaacagatcatagatgaatacagctgtttaatataatgatttataatatgtatgaaccgggcactagatttgccaagttctttagaaccttcaaaactatgtatgtctaaatattcaggcaaaaccaggattataaactggaaattctagttatggatcttgaacaatacaaagtagttataatatattccttggctttttaaaagaaaatccacttaatacttaactacatctaataacttttccttatagcatgaagtgtttcataagtaaacttttcagatgatggaaatttaaacacaaaaccttttaaattttaaccactttagaaagatatctttctgagtataaacaagaccacaatggaagactcccttcattattactgtcactataatacacacaatggtgtcagttgagtaacccctccagggttgaccagagtcataaggaatcatctgctttgacaatgaatgagcccaaggttctgtacagttgctgtttctgccatcttgcttatcttagccccactcgagctattagctatttctcaatgtatccacctgttagttgcatgctgaattggtatactttccacacttggacctaagagtgacttcagagtaaggaatatgcttatgggctttaagatgttatgtttttggtgtggcttttttgtctgggtgcttgtttactcctagattttcaggttgttgctggcagtagggaatagggacgctactatactttgcagattttttggattgagtaggctgtgtcagagacacagaaacactagggcaagattagtatatctagtaagggaattataattctgttcacttacagggattacctgtccctgaggctacttttcctgcctcaactcctaaaaatgtttcaaccttggaatactttatgtaaacactctataaacatgtcagtatttttgttgaactctttgaaagtagaaagttttacagaaaccaaaattcaaatcagctacaaggtaaagaagaaatgtaagatgaatttcataataaaaaggagcaaaatctgctgtaaactgataacaagggaattcctaatgttgctatagtaatattattgctcaaatttatataaagagtacatttactgacctggggaatgcgggaagtgcaagtgag

SEQ ID NO: 61274 - DNA, 1205 bp, Bovine  19866881350705
  misc_feature (1)..(1): n is a, c, g, or t
naaataattttcatttcattcttacttctgtgttctactttctctctctccttgctgttcctttttctacagaagccaggcatgagggtgatattattcctataaattcttcagatggattacataataatctagactggagacttaaaaaaagaaagacaactgcctggtaaatggacacaagtctttgcaactgtttagagccaaagcccaggccactccttagctcctgccactcaggagctgactggcctcattctcggggttcccaaagatagtcatggttgcacatgcttagagctgcatggtccaacttccccaggtgatcagaatcacctgggatgcttataaaaatgcagattcctgggccctatgccagatctgaatcagattctcctggagggagacctgcatatttacaaatacacagtatacatttaacaagtagccacaggcacttcttaacatcaggaaaatatgaccagcactgttatagatggagaaaacttgagtaattttcaaacttggctgcaaattaagagtctcctggggacctttaaaagcccccaatgctcggttaaatcagaagcgtcatcaccttgaatcatgtgcaggagtcatggggaagacctctgactatgtgcatgtgggccaagactgcagggttctaacactggctttgccacgaacccattgagcagcatctctagtcctgagcttcacacatgcaaaatgagggacatggactagcccacagagaaaacacttcctgtcacatgtatcagtctgactgattggaggtggctgcttgcaatattgaggaggattccagggttcagactgggctaaacagaaaacagtggctcagttagtgatgtctgccacaggtgcagattagagggcgatggcttgtgtgtcaagaatttgctatctctggactagatcatctataaggttccctctgagcctcaacgacataataataatgccaatagcaccacactgattgtgaagaataactgagatagtctatgcaaatatcttgtagcctataaagtgctatacagatgttagtcattatgataatagttattattttagttctaggatgctattcctttgacactttttaaggcagagtaatgaacaacaagtggcctgtctgggtggcagtgagatactggattaggaatcacatggggtta

SEQ ID NO: 61275 - DNA, 1128 bp, Bovine  19866881394709
  misc_feature (1)..(1): n is a, c, g, or t
ngggatgctgttgcattgtatgattatgtcttagcctcaaactacgagctcctccaagggcaaagacgatataacttttttatctagcacatgggttgaatgaattcaatattgcgttttctctgaagttagttcttcatttacaatgtccttggcatgaaaattgagaatcacaaaacactaagtaatcagaaaactcctagaacattatttgtggcaaagtataaacagaaagaaactcaaacaaaagagaacagtcttatgtgactagtcatagtgattaacattcatggtttcattgaaaccatggtttattggcaagttccttattttatacttccttagccaaagctgtgtaagagcacctttgtattcaacctgtggtgaggcgggatcagtgggttctctcattattcacttcagcttttgaaaagggaaagggtctcacagcattttaggtatatttctcatgggcaaatgttgatataaaagagcagttttaattttcaagaattctatcttcttagagtaataaaaaaatacagtaatcaaaaactcttacctttttgtttttttaagaaaagatggcaaatagtattattatacttcatagcatagtgatatattctacccacagatgataattttggaaaatatactgttaaaggccctgcatctgaatgctgtgagactcttccttttctgtgagtacctaatgtctctcctactctcgtttacctgctgcctggacaaataagacagaataaaacaagtacagccacaatatttagtctaagaatcccccacaaaactgttctgagatctcattctcattcttctgtcttaactgatatggcttaactgatctatcaaactctcttatcattgacatcaaaaactttgctgcatcaaaaacagaacattttgataatctttaagagcttcaaataattttccaagagtgaaagtatctgaccatttttaaaaacaactctaaacatttctacataatttagataaactaaccaagcaatttcttcgtgttggcctgagaaggctgccccatgtccaagctcatagatttcctggctcggggactggtctggcccgcaggtggatagctggctg

SEQ ID NO: 61276 - DNA, 839 bp, Bovine  19866881871893
  misc_feature (1)..(1): n is a, c, g, or t
ntgctcatatctgtgtcacttggctttctagtcataccaacttaatctacttactagaaatgacatgacaaacttttttgctctaaggtactttggtaaagtctttatggcaaatataatactgaaggtatccaagcattctgccactaaagtaaaactgtggttgcctccccatgaatggtaacgtcacatcattattttacacacaagccataattgttttaaatctaaatgatgtcctgcttctgaggaactcttggctactttacagattatataatggacaaaagctcttcaaaaagctagaggacactaggctttgcattttaataaggcaagtttgatggctttgtttttttgcactgtataaaagtattaaaaatgcaataaaaatttaaacttaaaagacatataaagaaggaacagttttagtgaatatttaacaaactgttcattagtagaaaactaaaataattatacagttaaaagtcttctatgagcaggaaagagaaatttatcttttgtacatcagaagttagaatctgacttagctaagtcaaaatcaacattagtttcaggataaaatcatgggggtctaacgcacaccagcagtactaacagagggagaggaaaagaaaaggagaaaagccaaagaaggctggaattcatttggcgctacaaccaggtgatgagtccaataaaacagacagcaggactagagcgggcgtgagatacatccaggtactccaagtcaaactgcactggggcttcaactagaagaaaactgagaactgtctactaatacaaaggaagccattgtttgaattaagagacaaaca

SEQ ID NO: 61277 - DNA, 751 bp, Bovine  19866882080055
  misc_feature (1)..(1): n is a, c, g, or t
ngttaatgctccgcagtcctatcttgaaattccaataaaaatttaaacgaagggtcttacgtttccacccgcactggccccacaaattacagagctgacccggagcccgcagctcctgactcctcggggcgcttcctacaaggtgcgctgccccacccacctgtggtccagtcagcaagtctgactgactccgtgggactgcccttcccagggagcagagcaggcttccggagactgggggtggtccccagcggagccaggggtgcaggacctgacggaccccttgggaatccctccctcgtctccagctggcttggcctgacttccctcctctccgctccctgctgagaattaacagagagggctggtggctgcccccacccccaacgtctgtgccccgtgtcctttgggctgggggtgggggctccagaatacagggccccattgtgtgccctgatggcaggcagctgggctgctgggaaagtggataaacaacaagcagtcctgagcgcgtgcccctgaggcccgatggaaggccaggatcccctggggtggtgggaataagattggggtgacccagctctgtctctcgggaggactggaagcagcgagatgtgtgaaatgctcaaaataacccccgacacctaggcagtgctcttcagctgggggctttgggacttgtgactgtcactgctaggtctgtgacactggggataaagtaccgcctcctgggcgtggcttccaagccctt

SEQ ID NO: 61278 - DNA, 1861 bp, Bovine  19866880407543
  misc_feature (1)..(1): n is a, c, g, or t
ncaattttttaatcctataaacaatttattaatattgggatcaaaaaaataagtctagaaattttcacattttattgttttttctctaaaatataattaataattgtttaaaaattagacatttcaagagacttggtctctgcttttaaggtacaaaattcatatagattatataggtattagtgtcatgagtaattaagttgttcgatcctttctgctgttaaacaagttttgcctgtctgattcaacacagtaaacccttccacaataactgttttttcctaagaaaaatttcctgcagtcctggcaacttccactttttgtaccaataacattaggattaaaattgggctcattgtaaataactagtaagtttgctcttcagatattctcattttgtctccttgcatttgtattatatattttataatagtttctatttgccttgatatttcaaggtggttcagaagtctccaaccacgttatattttactgctacttatttgtaagactttaaaacatatactattcatcctggttttctaatcataaacaataacttgtgcctctttcaatggatgataaggaatttcatttatgcagtaaacatttattgagctcctactgggctctaagcactattctagggcatttatccatggggtgtatattgcagcagcagaagtcagtgagcaaggatacatgataaatagacaatttatatattaccttagaaagtattaagtgtcataggaaaggggaaaagtgccccagaagtgccaaaagttatatttgctgctgctaagtcacttcagtcgtgtccgactctgtgcgaccccatagacagcagcccaccaggctcccccgtccctgggattctccaggcgagagcactggagtgggttgccatttccttctccaatgcatggaagtgaaaagtgaaagtgaagtcgctcagtcatatttaggaagtgccaaaagtaaacttgaaaacagagcgctacaggtagttctaattagttagggtaactgtactgaaccctccatacttgctttttgaaacattttgtggaattataaaccaggctagtgttagtcaattatgttgtatttgcattctgagaatattcttagcttttacataattgcatagtcacgtacacagcaagtacctggaagagttctctgtgttatttatccctgatctcagtcatttgttccatagaaaaatcctgttgttgttcagttctcaactttgattcacctcttgttcagctagaatacaggttttacacattacatgtaaaaagttattttttataaccttacataaatgtgtgtttgactggtacttaagtcttgtgctaccttcagttttccttaaaattcttgcatacggaccagttgtgggggctgtgctgtaatgaagaccatataaggcaatcctaaattttgttcctttgtgggaatatttctctcttgccagatagtagtaagattatttctttaattcttgagattcaaaatacttgtaaaattcacctgggagtagatttctttcctataagtaatataaaaataatggctaatatattttcctcatcagatttatatcctttttattaagaatgttttcttatagtgtatctctgaacatttttctatcttttttatgtgctctagtttcttgttgggatacattgttaatttgtactttgaatttcttgcttgattctcgctctcctcatcgccttacccaccatttttatctttcattctctctttctgcattcagttagaacttctaaagttttcctctatcatttgttcaatatcttgccaagtcatttctttttcaatg

SEQ ID NO: 61279 - DNA, 1607 bp, Bovine  19866880518795
  misc_feature (1)..(1): n is a, c, g, or t
nccctgtccatcaccaattcccagagttcactcaaactcatgtccatcgagtcggtgatgccatccaaccatctcatcctctgtcatcaacttctcctcccaccttcaatctttcccagcatccagggtcttttccaatgagtcagttcttcacatcaggtggccaaagtattgcagtttcagcttcagcatcagtccttttgtctagattggtctatcattttcaaactgctaactgtggctaccatccaaacatggctcatcatctcatatttagtgagcaccaactccatgcagagcccagggaaccaaacacaggagatgataagctacaactgagaagcaacggtttatgttaaatgtagcctggaaggagcagcaaaatatttctgaatcatttctttgacagataaggacagtgcaatgagtgctatggaatgactgttggcaataaaatggagcagagatcgctggattactgggctcccagagagttgggtctgcacgctaacatcttcagaaatgaatcacattaggaaaatttaacattctttcgcatcgtctcctgttctgcaaacgaggaacataagcaggcgaagactgtgcaagagtctttccctgtgggtatggcatgaattctcttagccaatttccaggacttcagcatccgtatgtactcttacctaaactgatgtgccagagaaagcatctattgcaccttgtcacaattgcccttcgttcccttttcaaaagcaacatgtacttttcacctcttctaaatcttttttatattgccccaaggcaataaatccccaccacaattcaacatcttgtatctggagacccttcagattaaggcacaataagcaggtcctctaggaaacatttttttacttcgtctttttttttaaaaagcatttatttatttggctgcactgcgttttagttgccatgtggggatcttcgatcttcctggaagcatctggaatcttcagttgcagcatgtaacctcttagttgaggcatgtgggatctagttccctgaccagtgatcaaacccggaccctctgcattgggcgcgtggagtcatagccattggatcacagcacaagtcgtaaagaaacttttctagtctttcacatatttcagttaagtatctttcagtaacatttcctgacaccggaaatggggcattttggtccattcctgggattttcgaattcatgtatgttgcagggcggggaagtggagtaaaagcgctgttcattcgtcatttttccttttcaaacccctgctactgtcaaagcgtatgtcactttttaagaaaaatcccacaagggcaaaacaaaggggaaaataacctgaaataatgaaggtggcggcagcttatttcatccagctgacaaattcagggcagtatctctgcctcgtttgtcaatcatagaattctaaagtaatatgactgccggtggaatgttcattagcttatttagccttttttctcagaaaggaaatctgattcggaggataggtttgactgttagaaatattttaacaaatagatatggtagatattgttcagaaattaaaccagctaaatctaggctc

SEQ ID NO: 61280 - DNA, 1022 bp, Bovine  19866880580044
  misc_feature (1)..(1): n is a, c, g, or t
nggtatagttgacttacaacattgtgttagtttcaggtgtacaggaaagtgatctgttatacatattcataggtccattttttccagattctttccataaaggttattacaggatattgagtagagtttcctgtgctctatagtagatctttgttagtgaaataaaattttggactctccccaggttttaatactaagcaacaatgagaaaaaaagctgaagagctcaaacctctgccagttagtatgttttatgctctgaggatattttgtttataagtataatcccttcgcagtttatacatgtgaaatctgtagaacagttaccttcctcctttgcaactttgtttcttcttttaagaagtagatctgtactgccgatgcctaggagacaactcagaaatgagtactcccctaaatgctggctaaacctgcactattttcatgttcacacctaagaaagtcactcctcaaggtcaccgaaaacattcttgggaggaaagcgaaatgagttttaagccgcctgacccccgtcctcctggacaccatccaggtgctgacatagtccagcgggtagaccatcaagttccaaggctcactgcctgatgatgatgtggttcctaagtacttttcctcctgtttccagaggcctggcttgattccatttgtgactcatgcacagcaggccttgttagtcatcatttgaatttgtttttctttcttcatggagcaatctgaccaacagtttagtatttttgatgacctaaaattcggaacacccctttgccctgcattttggtcatttggcctttcagatttaaaagctcaaaaggatgagttcagattatgcctgggagctttaagcaaggtgtgctgaggcaaagtggaggacttcattgagatgactttatctggtattacaataaatatatgttttttctccaagtcacccaggcatactgacctgaaagctctggataaacagttctctgttgtgtgtgtaagggtgagactgtgacctca

SEQ ID NO: 61281 - DNA, 2152 bp, Bovine  19866880595289
  misc_feature (1)..(1): n is a, c, g, or t
ncccccaaatcttccaatgctattcctggatctcgtatcggtggcaatgtaaaacaaggattgctcagcttcaacatcacactctcaggcactgctcttgctttaagggattgaagtcatttaaggaaaagaatgaggtcacttacacttcttgaaaactctttcccacttcaccccactcatatttctctgaagtcagtgagccactacttcttcttggcaacaaagagctgccctctcttatttcccaacgtcccccttctctgccaagataatctttcccagacaggggcattcaggaggaatagaagtctccagaaatgggagggagggggggaatcccacagaaaaggccctggcagggcttagttaaatgaattccacatttggataggaaccagcagctgacgcacatatgagaagcttaggagagaatgtctaccaaatagttcaccaaaaccaaaaaacaaaattttaattttcaggtcatggagaagaagtcttattgaaagaatgcaccagttgactttctataccaaatgtctgttaactgcaaagggcaagttaactactaactaaaataatcaacattataaaacgtcacttttttggttgaaaaaagaagaaaacctgttcaagccaatttttaaagagagtgatggttaatttctctaaatgctcttttactcaacagacaaggataactactaacagtctcttggaaaatctatcaaaaatgaatgagagacatttttaatgacttcaaattgttacatcccattgcttcaagcatgcataaagatagattatcatcactgtatgaaatgtcctgtttcttagaaatatcattccctatacatgtgaacatttgaaacatcaggcccacacaataatacaatgattaaaaccataaataggttggacgttaactaatgaacttttcctttttttagaaaaccagcagcattatttgagaaatggataaaagagttgcaagtacagagtttttaatcctacctcctgctgcgaaggggctgttaaatatttgtaaacagaaagcaaccctagaagaaaagcttctgattaatgggagcaagtctttcaggaaacaccctacttgaaagatattcttttcccccgcctaaagtcagagaagtcactaaaccctccccatcaaagcttcaggaatttttttaatagcttgttttttcttcccagaatcattaacagtatggaacagacagaattccagcatccctacatttcatagataacaaaaggaactcacaaagagtcaaagtaatgggaaaagttgatgaaaatcatgtagtcacagcagaaattttcttaaagactaaactttggtctgttaccaactttgggctgtgaaatcgttttgtctcatctgaaatcaagaggtaactaacatggtacgtcccatgcgacatggtgtccagggaagaccagcctagagtaatgacactaggttcagggtttaatcaataacttaacgacaagaattgataacaacagagacatacagatattcctgtggagagaaagtgggtagggagtaggctgtgatgattatggttgttaaacaaaggtgttatactttatttcatagttcgggatgactcattgttttataaaatcccaggctgagtcacttcattattataagccaagaaagatgaaatgagagactcagctggcttgcatccttactagcctggggcagaggctggcaaccccaaacctgaatgatgcttgaactggttccatttccctttcaagtagactccacatcaaaactggtacaaaatctgttaacactttttcactaattacagaaggggccagtaatttattttgaggatcgatgtatagtagggaagagaagttataaaatatcacttatccccatgttgaaatagtagttttaggcactttagtgataaaatgtcagatatagctaattgctaaaccagttggaacaaagcttgcaaccaaggtcagacacctgggagattaatagaatggcaatatgtaaatattgagcaaaagctgaagacagaccgaagtaaaaaatgaagagctcagaacaccaagtgtcatagagggaagtctagacaccatggtcaaagtggga

SEQ ID NO: 61282 - DNA, 1836 bp, Bovine  19866880689257
  misc_feature (1)..(1): n is a, c, g, or t
ngttttactggaaaaaaccgtttcagttggttagtgttttcaaacacaaatttaatttctgtggaattaaactggtattttcatcccgacatggtttgcaggattgttataaaaacaaaagttgatagttaaggaatgtttccaggcattaatcgatcataataaaccaccagccaagcagccgtgtacccagttacctggtgacatatttgctttcatatattattctttaccttccaattatatgacaaagtgaacatttaagggagaaagagatacaaacatttttttcattatattcctgggaatctttgaaaaattctagttgcaaagatattatataagtttataatacatatgtttatattatattttcaatcaatagacactaaaaaatttctgaatggtatgtgaaattatatttcttaaaagtgtaatttcacagagataaacttttccttggatcagaaatttagaagttaagactcagcaagaagtctcaaaatattcacagtctcctaacaatatcaacattaaaatcctacggtctaaatctttgatagaggtaagtaatatcacttatatttaccaaatttaggaacaatacagctcaagtaagtgggttttactttgtaagacactggcatttaaacttcatctatagtaggggaccaaagattcactccagagattattattattattttaattctttgtcagtttatttattttttaaaaatttatttattttaatacacaagatgaagacattggattatttttagaataatacacaagattacagaatacctctaaatcacttctaaaaaagagtatgactgatccgactgcatcatgctcttactttaaatataagttcttctccagacatcagactatacttgagttcaagttcacagctcaagaatgacatgctgactcttctgacaattctggtgaataataatgaaggggacaagatggttttcccataaactgagtcttatcctacagcaatccaatcagcaataagattctgggctaatattttaaattgagggatggacatttctcctatctataaacacttcaaattcatggcactattttctacttaccaaatctgaaccctgtagtaaggcaattttcctctttaatgttaagaaatttacacatataggtagtcaaacacatattcacacatactaaagaagcccagaaaaatttagaacttactagcacagtctggccattcagtggaatatggtggtttccagataccatcttcataagcacaataatacttgtcagtagatccttctgtgaaatcatagccctctaagcaacttaatgagcagttaacaccagtactatcttgagtacatacaaaatccccatttacaggtgtaaatggaacttcacagggggaacctgtgtaaaaaaattgaattattcatatacagtggtattaaaatataaattaaaatctaagtgtctaagctgaattttgaaaaggattcctcctgtccacccctactcctagaaaaacttccacactaaatccatagtgtgaggctgctgcaatttctgcttttcgattcctagggtgggtacagctaaaaagctgtaccaatgtgcaattaattacatgtgcataactgtgcatatgttatgaaaagctaaaagtacttctgacgtgcaactgttattttcggcattttttaataaaaaggaaaaccaaataacattacatagcaacaaattttcggaatctgtctcctcaagcattcaaaataggatcatgacaacaatactttgaactttagagaaaatatt

SEQ ID NO: 61283 - DNA, 1315 bp, Bovine  19866880704685
  misc_feature (1)..(1): n is a, c, g, or t
nccaaaactatttattgacattttctatgtgtccaacacatgctaggtcataatagaaggaactggaaatgagcctataacttattagtatacagaagtatgaagaatctaaaagataatgtgtctgcctggagttctttgtgaccctcattttatcctaaatgaacaaaaatatggaaaaccctattgtacacagcactactttcgtacagttgatgtcattattattaaccatattacatttttcattttagctcagtgtaaacaaggcacctactcatcaaatgggcttgaaacatgcgaatcgtgtccgctgggcagctatcagccagcatttggttcccgggggtgcctctcatgtccagaaaacacttcaactgtgaagagaggagccgtggacatttctgcttgtggaggttaagtcttacacgttgcttttttttcccccaagcctgtgctaggttctctgcatggaagagtggaatcttgttagcagaggcatatgtctgccatatgcaaagaatgtaaataactgtctcttcatagagtgtttccttctattcagccagttggtacttaagtgtaaacacccataatataaacaccatcctggtactgttagggactcacaagaagcacatgactgggtcccagccctcaacactagtaaccatgtgaccacatggtatgagagaaatacttgtcaaccaggaacgtagatttttcatgtataaaatgaggtcttgtcttatgttccttgaaactcgaaaaatacatcctttggattgtgacctttgttccctgcagtttgaagattttcacgagtggttatccactctgactgcctactagaattgttgcacattcatttcagtattgtagccacttattgactagagacatgttagtacatcttttgttacctgaatattattgaccagaatgtttcgatatcacttacataacagatcactgggccacaggtgttaatttctgcaaaaattggcccagtgagtaacatgttaaaactactgaaacccatctccacccccccagagaattctggtgtaagtttactattttcttctgaagatcgcccctctccccatgttgttgtttagttgctaagttatgtctgactctactgtgaccccatggactgtagcccaccagcgtcctctgtccatgggattctccaggcaagaatactggagggggtagccatttccttctccgtgggatcttccctactgagggatagaacccgtgtctccctcaggcaggcggattctttaccacgagccacgagggaaac

SEQ ID NO: 61284 - DNA, 988 bp, Bovine  19866880736997
  misc_feature (1)..(1): n is a, c, g, or t
ngggagggattgggggcaggaggagaaggtggtaacagaggatgagatggctgggtggcatcaccgactcaatggacgtgagtttgaactccgggagttggtgatggacagggaggcctggcgtgctgtgattcatggggtcgcaaagagtcggacctgactgagtgactgaactgaactgaatgattcaggcatgatatatttatggctttagattttcatatctttagctttaactaaaggcaagtgttatcccaaggaaataatcagagttatataaaaaaatttgtatagaaaatttcatgtcagcattgtttataatattagaaacaaatagaagtagtagaaataactaattgttcagtagtagagtaaatatgagaacaattatggtctgccagtgagatgtaatatgtttcatttattaaacatcatgttatttaatgatttggggaatggtttacttgtgatatgaagtgaaaaaatcagagtacaatattatatgaccaattctgatttttattaagttaatgtgtattgttaaagatgggaaggaagcaacaaaatatttacttaagtggtctgagtattacttaatgatctgggtattaaatacgtgcaagagaaaatatcaccaatgtgatagctttcttataaccaaaggttaatgcacttcttttagaacgtagggtatactgctttataagcacaaatgattttttctttcttttgcagtgccttgtccagtgggagaattctctcgttctgggttaatgccctgttatccatgtccccaagactactaccaacccaatccagggaagtccttctgtttatcgtgtcccttttatggaactacaaccatcacgggtgccagatccatcacagattgttccagtaagatgatactacttcgttcttcacgttatcctgtatgggagagtttatttctgcagtaactttaattgtgactgttatatgttcagtg

SEQ ID NO: 61285 - DNA, 1844 bp, Bovine  19866880749924
  misc_feature (1)..(1): n is a, c, g, or t
ngggtcgcaaagagtcgacatgacgagaaacttaacagtgacaacgacacttaaatgtcttacatattctgcagcatgactcagatctctgcccgttggtcttccatgcagcatctgtcagcccttcagttaagaggaggatcattcaagagatccctgtgaaagcattgccttggtcatttcatgccttctcattatctgggaatgtttacttcacttctgggtggatcagctcaactgccactggcgaaactcacaaattaaatgctcccaaatttaccgtttctgctgctgtgttcatggtggttttagcaatctggtatttcttcaacaagtagagtgaagcatagcaagaatcagctttttcttgtgatgttgagatcagggatgaaacatgcatgagtgctcagttgtgtggaactgtttgcaaccccaaggactatagcccaccaggctcctctgtccatgggattatcctggcaagaatattggcgttggttgccatttcctcctccaggggtcttcctgacctagggattgaacccacatctcttacagttcctgcactggcaggtggattctttaccatgtcatcatcaaagggatcccagggccagccttgtgtcaaggttctccgcctgcacaagtagacttctattctctcttgcaaccctcctcatcagttttgaacatcagttgtgacttcatcctctgatttcatgttttttagatgtagagccacctagcatagactggtgcaggtccccgcctccagtccaggtctctgagaaggagcatgctgtgacctgggatgagcctcagttttcagacaactcaggtgagaatgcgggtatcttctcatcaacatgttaccaccaaatacaaagcttgtaaaaagataaaagagaaataaaaagcaaattacatctaaatatagtagcatggataattacataagatgttttaatgctaggataattctatatattttaacattgttaatcttacctgtccatggcttttcattcattattcagtggggatttattaaacttgtacagtgtattttatttgaaagtgtgctagtaaattcactgagcctctaagcttcctttatcctagagacataagctatgcatcctattggcaagtctaatgcagttctatgtattcatactcagttcttaaacatttgccaaaaatgttataaaagcgcatgggaaaacagaaaaaagtgagcaaatatagctgaagttcactttaaagttttcacaaacaccctgaaaacaagaatgcaagtgaaatagatttcttaattaaatttccagtattcacagagactgacctagtaaaggaaaataatctatttagcaagaatgccttcatttaatgaggcttttgagtcaactatttctatagtttagtgtaagattttatagtttattttctgttagcagcccagttagtaccaatagaatgttcagctggtttgtataaagagtaaatgaaaattcaaatcacataaagtgactgcacacaataacccccagattggagtcctcctttctccttctctcctttttaggggccatgttgaccatcaccagaagccatacaccaggagacctgttccctcaaggggagacgatagtgcggtatacagccactgacccctcaggcaataacagaacatgtgacatccacattgtcgtaaaaggtatactctgcataagcctccgaaatccagctgacacttgagatgtgtaatcattattgcactctcctttgtgatagaaaataggctatgaacccagctgtttaaagttagaatacgacggattata

SEQ ID NO: 61286 - DNA, 1712 bp, Bovine  19866880892072
  misc_feature (1)..(1): n is a, c, g, or t
nctcctctgtcctggggtttcccagcaagaacactggagtgggttgccatttccttctcttggggatctttctgactcagggatcgaacccacggctcctgcattggcaggtgggttctttaccactgagctaccagggaagcctgtcaagcccttactatatgtgccaaacaatacctcaatcttatatgcaggattttgttccattctgccaaagctccactatgcagttctatttgtttatctttaatagatttgaaaactgaagcacagagagatgggataacatgttcaaaatcatcagagtgagttcatggtgaaactggaacttgaacccaggccattggactgtaggctggctttaaccactagcccatctgttactctgtatgtgtgatcttgtgccagccctaaatttctgcttcttgagtcagagggattggaaatattcttctctatgattctttctagttctgaaatcacaagattttatgaaacagtcatgtccaataaaattataaaacatcaccaagacactataaataacatctgcctagcttagtctactatcatagcatcaaatgatactgctgggtaagttctgaaaactacagcggtggcatagatgtggtagcagtaggctgtgcacgttcgtactggtttgtacctttgcatgtcattactgtcatacactgaaaatggaattgacctgctgtggagacaggacatagtcccagaggttgagctggcttatggagcccacaaaagactcagccgggttgaatccctctccttttttgtcttgttcttgcccaataaccaatgcaccaccacctagaaaaggaaagaaaaaaggaagaagagtggcccggctgttctttctaaaatgctaacttaatgaaggcacagcctatacaaacgggaaattatagagaagctaaattatctacattcactgcatgatttaacagtaagatgagttcgacattttatatagcaactgaaaaaacagtcaaagaggatttggaacacaagattagatttatacatatttaactataaaactacatatatacatatataatatttatatgtcaacaaagtagttaagtcctactttgcctctttagctctaggaaattaccctccgtgacagattaccagtagctgctcttcatcgtattattctttagcctataatgcttaaagttctattaccaattccaaggaacattcattccagtggctgcttaacgacccaatccaatggaaactcttcaatattcacctctggtgacttctctgtatcacttgtttcttggaagcatttcattctattaaactgcccttcctggcactcaaaaaggtctgtacccctcgagagctacccttcccctttctccactctgctttgtggccgcaaggttcatgcccatggactacaccacctggtttcttcagtcctctggcctctgtttgtctggccaatggagaccagcccaagataagaaagtgggatgagaaacaagtttaacttcctggataccttctcccaggcaacagatggaaggggctggaaggggccgctttcctctgccttgcatcattgctcccactgggtgatttctccccatcactacaggttcacctacattctggtgacaactcccactctctgtcacttcatgtacatctcttgtgcctttccatcg

SEQ ID NO: 61287 - DNA, 1105 bp, Bovine  19866880896874
  misc_feature (1)..(1): n is a, c, g, or t
naatatctgttagggctgagtttcagaatgaaggcagcttgggtattggtcacgaagaaccactgaaagcatggtcgagtacagaggacttacataaagtcaaattcagtctattgtctgaaatttaagaaaatggaaaaaggaaagcttgctaagaaggaatggttcacagtagccctctctgtataatgaatcctaaaccttaagaagcaaaggcacacacgacggccataatgaacaagatttcccctaacaacagtttcaaccttggaaatcctaccccagagagatccataaccaggttttattagtccaactttctctcttttagagaaagaggcggttttgaaatcattttcctttgtctccatattaaataaagcaaacaacctgatttacctcattcaggcttacacatgtttgttttagcactggactaaatttgagagtctgccctgttattacatcactttttaaaaatagtaccacagaaataaaattataacgtaaatccatgtagtagtaaaacagtcctcttatttctggaagaaatttgaatgttacatgaacttcaaagttaaagtttctatagtgctgataagataacaggagccaacatccaagtactgagataattttctttgccccaccccacccccaagtcaataacggcattacttgtaaatcacactaacctgctgggggggaaaaaaggccaagaaatttaaataaaatcaccatcagcagcacttcccttctccctcccccgccaaaacaaaaaactttagattccttcaatttatcaccttaattaagttaattgattaaacttacaaacccaagttcccttgtggaagataaaacacacagttgggaggatcattcattcaaactgtattcagaagatggtacaaagcaattggccgaatctttcatcatctttctccttattggcccagcacctccagatttgaaggcaattagaagaataacggagaaggcaatggcaccccactctagtactctggcctggaaaattccatggaaagaggagcctgatgggcctgcagtccatgggggtcgctaagagtaggacacgactgag

SEQ ID NO: 61288 - DNA, 922 bp, Bovine  19866881070050
  misc_feature (1)..(1): n is a, c, g, or t
ngttggaagacaaatacagaatattgtccttcccttatttaacatgtgcacacatgtatgtgtgtgtatgtttcaatttttataagaatttttgtcccaacacttcataagaaataataatcttgtcctataattttataaatgagaggtggttgagaaaagcatagtataggacagtgattctcaaattttgatgttcattagaatcatctggaggatttcctaaaacacagactgtggcatttctgtcacattcccaggggattactgatgctattggtcaccattctgtgagacctccttgtgtagaagaacatggatttcagcagaattagtccatagaaggactgtgtgtaccctatgagaaaataaaccctattctaggacacctggcatatgagttgagatctggcaggatttagcaccacccccatttctcagccaagtggccttggtaacaagtacatgtgactttctacttttgactttggaatcacactaattcctggctccattttatgcttccagatttccctctttcccctctacttctgactttggatcttttgctgtcttttatgtatccttgtaaggatagcttaaatctatttagaaagaggtaatacctttatgaaatgcttaattagatggtaattcctaacatacttcctttttcttcatcactgccactccctataaattcaggttattgtgataattacctttaaaggacagttctgtttctgttcatcctctctttgattgaccttcagtgtttgcattttaggcttaaaatgtgagatagacattgatgaatgcagctcactgccctgccacaacaatggaatttgtaaagaccgagttggagaattcatttgtgaatgcccatctggttatacaggtaaggaaagagtgtctcatt

SEQ ID NO: 61289 - DNA, 947 bp, Bovine  19866881121602
  misc_feature (1)..(1): n is a, c, g, or t
ncaggaatcgaaccggggtctcctgcattgcatgcagattctttactaactgagccatcagggaagccctttgcaagtatgtgcatctataaatgcatactttttacaaaattataaatactagagtatatagttgctttgtaggttttttatggttaaaaaaaacttagaatgtataaaacttttcttttggtaataatggcactattaagtttgttttggtttgatcttgctgtttcttatatctgaggattcatatctaccaccagttctgggacatttttgttcattagttcttagagtaatacttctgacagttttgtggttttgactctccatttagatgattctgagaccttttcagtatcattcctgcctctgaacctcactttcaaattctcatctctgaggctctgtctgttctgtgtgatttttttgggtagtaacagtctcatttactaattttctcaccagttgcacttaatcagatatttatctcatgcactcatttgaaatactatggttttcattgctacaaactccatttgaatctttttcaaatttgcatggtcttaaaaaaattgctattcttttactacatcctcttgttaaacatattaaacatttttattttatagtctgtatctgataattccattttctgtagactttataggtctgattctgctatttgttgtgtctctggtatgttctggcttcttcatgcgtactgtgaattttttttttttttcctttttgtacatgagctcatgtttctaggaacttttcttctagtaattctttgggaacttaaggtgaaatataaaaaacttgtatttgcttctgctgctgctgcttagtcgcttcagtcgtgtcccactctgtgtgaccccatagacggcagcccatcatgctccactgtccctgggattctccaggcaaaaaca

SEQ ID NO: 61290 - DNA, 836 bp, Bovine  19866881205418
  misc_feature (1)..(1): n is a, c, g, or t
nttctactgactcctgtgtgctacaggggaaagagctttaataaagagtgagagaaccgacccccgccacaggggtatgagctggtataatcagaggagggaaaagaccatatttatttaggataaacaagaaggggagagcaatttaattggttcctgatgtcccacataacacaggctagagctcttaaaactgagtggcttatttttatttgtgaatagatttgattttttttttttttttaatgggttttccatctgtgttggtcgaattccagttaagaaacttccatcctggctgctttgatcttgtgctcacctttcaaaggcataaaaaggtcttcttttccctttatataaaagtacttccagccaatatttaatatgaaagagatgtttatcagacttgggatgggcatattgaagctattcaggggttggggctttctttgctcatttcttctttttctcatacacactctgtttttttcctatcagcctaggtcccttgcctatacttcctgttgtgagtttgcacacagagggaggtagaggtggcaatcaataaagttgttagtgtatggataccaagcgggaaaggagggggtgggaggaattgagagattgggatggacacgtgtacactattgatactacatataaaacacagaactaatgaggatataccgtatagcccaaggaactccacttaatgcatcgtgatgacctgaatgggaaaagaagtccaaaaggaacgggatgtatgtatatgtatggctgattcattttgctgtgcggtagacactaacacagcattgtgaagcaactatactcca

SEQ ID NO: 61291 - DNA, 806 bp, Bovine  19866881221961
  misc_feature (1)..(1): n is a, c, g, or t
ntagggatatctgtgaatatgaaaatgatgtaaccaataacaaatatcatagaatattatacctttatgacattttctagctcaatgttaaagcattagttgctcagtcatgtccgactctttgtcaccccatggactgtagcccgccaggctcctatatccatggaattctccaggcaagaatactggagtgggttgccattcccttctcccagaggatcttcctgacccagggatcaaacccaggtctccttcattgcaggtggattccttaccatctgagccaccagggaagtcccatgtataatgttgtatcagccatcagagatttacagggtaagaattttgtccagttaattaccttgtagtctggacaaaagctagcttttgcctttactcctgtacatgacaacttcctcttttgaaaacttcccctgtttgcagacaaacagaatttccccatttatttatttgttaattttacctgcaaatgggcataggagtaggtaccaccccaggattgcattcttggaagatgtggttacacagcaaagcttcagcagctggccggcagaatgggctcactgctttcagttcattccaggcagcatgaaccagtagttcttgggcctcctcagggtctgcgtaggagttgttgaagaaaacaagagcgtcttttgccaggacagcattgcacacctcccctctgtactggccgcagtagcctttgttatctttctgtggcttgctgaaagaagcagtgaacaacattccggatcacatgctgtttctgagcattcaatctg

SEQ ID NO: 61292 - DNA, 1055 bp, Bovine  19866881331571
  misc_feature (1)..(1): n is a, c, g, or t
nccaaccctcttagagcttttatgtaatttgtaatggaaatttgaaacgataatgaatgaaaagcattctgcttattttgtgaagagaaagcaaagcgcttagcaggcatcaatttcagtgtgtcctctcggaaagagtgcacttggctttggagtcgttacacgaggctaagggtccagattgactttctggattgtgttttctcaataatactgattaataaacacagcatatacgggaaggttatttagtgggtcatctaaggttttactccccctggaaaatatctttggaacacgcgatcatgtctgagtgtgtgggttttgatccagtcctttttgatctcctttctagcgatctgcattcttccctgtctgaacggcggtcgctgtgtggccccttatcaatgtgactgctcacctggctggacagggtcccgctgtcatacaggtaggcatcctggcatagttggttttattggtgcctgggctccatgaaaccctagagaacaactgatgagtgtgactcagattcagaggtggcagtaaaacagaagggtatcagggtttctcacgaattcctcaagatggtctcttgaatggtggtctcagtgctcaacctatttctacctcagagacacctctcagggtggtatgacaaataagagcatctgagttaactcattggtcagccttcttcatgtcatttgctctgtgttgcacaatggagagaaaacataatgcagaagttcagaagaatatttatttaaatctctatgaagctaaatcactaaatttgcagtaactatttggaaagaacggactctaaataaatacaattgaagttaaagtgaaataactcaacaagagatggttccttatcatggaagacagtaacaaactattgttgatttgtggtaaacatgtcctcatagcgacccatgttcaaatacctgcctatccactatactttgctgtctgttgaattgcttgattttgatctttccctgccctcactagattgtatgccactggtaggcagggatatttgtgat

SEQ ID NO: 61293 - DNA, 766 bp, Bovine  19866881365080
  misc_feature (1)..(1): n is a, c, g, or t
natgcccttttgggaatctgttcatgcgtgtgtcagagggttcacgcagggtgaaagtggtgcattggtcagaaacgtcccctccaaacagctggcttctggggcctgtaatgaggaattatgacaggaaggagaggagttactgaagttattttaaggtaacgttagttggattcactgcttaccgcatgggaaaggtcatcgttattacatttaccatttcgggtttggagtttaacctctttattgtggatttgttggtcctgggcactttagttttgtggtaggatgttttgtctgcagtttgcatctgtatttggaatgagaatgaagtatcgtttttaaaaccaggacccaaaacaatggaaacaattgtgagggcacatcttatgttcagtggtagaatttctcatggatactggagaagataaatttgattctcatcctggcatataaaaatgactcatagttgttgcagcaaaggcagatgtcaacagctttgattttgagtttgctcatttggggaaaaacattttctaaatcacatcaagcttagtatcaatacagaaacccaagagtgaaactccagaactttcacaaggctatgggctgaatccaactggtgtgtcctgtacagtcacagaaatccccctcatctgttgcctggggtttaattctttctctcttctcattccttaccttccttttcttccttcttctagcaaggtcctccacatgaatagtttctcagctttttaccacccac

SEQ ID NO: 61294 - DNA, 1527 bp, Bovine  19866881409308
  misc_feature (1)..(1): n is a, c, g, or t
nttagctcctcataagtctccacaaaggaacatcaaaaagctctaaaagtgacatcacttcaaaatggaattcacttctttgacatctgtaattttacctctaggtttccttaccataatatctttgtaattttaatattttgttagaaaaacaacttaggattcttgtgttttaaattatattttaggaaatatcgactatttagaagtagtgtgtggtttttctgtgacagcatcttatttgttctactttacttaaaaagcagcatggtttttagaggttttttttgtttctttttaaacaactcttccgtggtttgctgcttgggaaaaatgtattcccatggaaattaacacccaccaggagaatttccgggcagtaggcttactttatactgtccggtgcgtctgttcactgcttgtttcgtgtgaatgttgtttcattttgacatttggaaggtaggtaggtctgctctgtaacacagaaacgtggctcttccagggttgaacttcccagttttgacctgatctgtttttctctcttttcttctcctcgtggaacatttctttttgctttttctacttgctgttatttgttttttaaaattgaagtgtagttgatttacaatgttgttcgtttctgctgtacagcaaagtgattcagttatacatgtatacattctctttttaatcctcttttccattgtggtttctcacaggacattgagtatagattcctgtgctgtacagtagaaccttattgatccttgctgtatataagtggtggcatctgctggtcccaatctctgatactgactttcattctcattgcccctcatctcccttccctcagtttcttctcctcctcccctcccccatcccactggccctgatcccatctggcggacacccttcctgggtgcaagcatccacgcttgcccagcagaatcactcctttcttggccccgttcccattccacccagcaggatttctcatttaagcggggaaaaaggggggttgtagagagtcagcccaactgcctctgagttggcaaaacgcctccccttgagtcttcccacacttccatgaacagcacagcttggcagcctccctgacgccccctccttccctccaccctttcaagcccaccaaacacagtcagaagctctcgttttctttgctgcatgctgtagtcagcacgtctgtttccgtgtggtccgagactgagctgttccctgccaataagccgctgctgagtggctgcccagcagcctcagccatgctgtgcccagcccctaccattcctgggcactgtaatcttgcatcccaggggacaggctgcatgaagagagggaggcggttcacaaacccactgcccccagttacccaagtccctgtggctgccaccagttgtgcattccaggctgaaaggcacagctgtctttaagatgtatgcagtgggtgggcccatcagtgcagcctcagcagaggggacagaagcgctttggctgctggttctagccagg

SEQ ID NO: 61295 - DNA, 1713 bp, Bovine  19866881409901
  misc_feature (1)..(1): n is a, c, g, or t
nttagacataaccaccaatacaggaatggttaaactgagttgcatccattaaatggaatattatatagccagtaaagtcatgtttttgtaaaatttttaatgccataggaaaatgtggcaattctgcagtggaaaaaaacaaactggttataaaattgtttacagtatgactgcaattatatataaaggtatacaatacacatagcatacacaggggaaaagctgttaactgtggttacttctgggttgtgatatcagtattttttctgttttatacatttctgcatttttcaagttttctacaatgactgtgtattataatacagaaaaacacaggttattaaaaaaaattcctctgatgaactgataattagaatgtactcgggtaccataaatatgtgggaccataccactgtgctcatcttctataacttttatagagtacatattcttctgataataaacttacatttcctgttttatacatgttacaacactttaataaaaaaaaggtaatattgtgattagatcattgtttgtttcataacctaaacaaatactggctttgacatctaggtttttctacttcctagaacatttaaaattaacactcttttgtctttttaagtatggcatactgcacacacagattttcatgcatgctttctaaaaacgtaattctaatttacaattttcctaacataaggaaaaaaatggagttataaatcatttaaaaacagtctacagtcttatccatcacaagcatgctgataggcataaacatgtttattaaatgaaatgtatcctttaagaagagaaaaagggaagcctgcatgtaaatgaagttgtggattcaattagtcagaatttattctgacttgcaccaaatcatacaaaaacttttgaagactagtgtagtgtacacggacgctccagagtctgtgtatgaattccattgcaagatctccactttctactttcaaaaggaatgggagcaggatgaggggtatcacataagctaattttttcaatatatgtcaagtcttggtgggtcaaggaacaaatactgccatgggttagtgtttaagtacatgaatgtagttttcctctctttctcacaccccaccctgccctggcctttggggagggggaggctgttcatccctcaatagatgctggccgcctctcatcttagtttctttcctaaaccacggagtggtcattgctgtgaactccagccaggatggtgtggttgagggaggaagccgagcggtccgagccttccgtcgggccgctggtgttctcactgcgctggcagcagaggatctgcctgaaggtggcgctcatctccttgtcgcggtaggagtagatgatggggttcatggcagagttgaactcggcaagcagaaggaaaaacttctcataggccagaacgtcacactgggggcagcacacgtcgagaagtaacaagaccagtccaggagtccagcagatgataaaggcacctgtagggtcggggagcgggaacgggaaggtttaaagagagaacagaaaaatagaatgatgaagggagcacccatatggtgaaatgatttcagctcaaggtcaaaataatgagctccaaaggcatcagatcatcatttgaaataaaatgttcatgttctgaaataatcagaacagattctgacaataaaatgagcaattgaataaaat

SEQ ID NO: 61296 - DNA, 1187 bp, Bovine  19866881413161
  misc_feature (1)..(1): n is a, c, g, or t
ntgtgggcctatggggtggtcctttgggagatcttctcctacggcctgcagccctactacgggatggcccacgaggaggtcatctactacgtgcgggatggcaacatcctctcctgccctgagaactgccccctggaactgtacaatctcatgcgtctgtgttggagcaaggtgcctgcagatagacccagtttcagcagcatccaccgaatcctggaacgcatgtgtgagcgggcagagggccgtgggggtgtctgaggtccaagatgggcgaagagaaatcgccagcatcttctcagactctgggagccagaggagtgcaacgcccgagcccccaggagacccagatagcaaagaatagtagcagacatgggtaccatgctgcttgtttctcagaaataaaaaaaaaaaagactgggcagaactcctggagtgggtggaaattgggtgaagggaaaggcaggcgagaaaacgtgtcaaataaccggaggtaactactcttcctcacagggaaagtttgtattacatattgtaccggaaagaatgccatcctgttcagttcctgaattagctggcagcagaataaggctctgctgtattaaaaattaatatgaactgtggttgagagcttcatttttaatagagttcattcctgtccattaggaaagtagtgtattttcctgtaagaaatttagctcaagcatagaaaactccaaagaaggaaaaaccattcattgtctcctcacccaaagatgggtgttggttttttattcaatttctttcttgagtttaatgcacacttttatatttgtttgtattcgacagagttgtggtttactttattgatagagagtttccaaggaataaagtgataatcagcaagattatatttttattgtgaattttagttctctttttctttgtttctttagaagttttcctttgtgtacacgtgtcatgaatttaatctgcttgctttattcttacggtttttttttttttctgaaaatgtctttgtgtctatttaccttttctttttgaaaattttattggtacctttttctttgtctcatctttctttatttaggacttggttcctttttggtatttggctattttttccttttatttcacctatacaacaaacaccttggcagaaataataactttctaagtaacattatgga

SEQ ID NO: 61297 - DNA, 781 bp, Bovine  19866881573870
  misc_feature (1)..(1): n is a, c, g, or t
nctcttagtgaatgacaatgaagaaaaatcttttgatgaaacagaattctacagccaagattcactgggttcataatttcatcatttcaataacaaggtaaactgttctgaaaagtgagggaattacatggcatttgcttttaaaacaaatctgttccaaatgtgccccaagtataacaaaatttattattattagaagctgtaaactttagggagttggaaaattggattctggtgtagaagtctttttaccagtggtgaggagtaaaaccacatacttgttcatgtacgtacccatcatatatctatatacatatggatgtgtatttatacatatgtgtatatacatatggatgtatatttatactcgtatatatatagatagatgtgtatttatattcgtatctgtatacatatgcatgtgtatttatactcgtatatctgtatacatatgcatgtgtatttatactcgtcattctatgtacacacgcatgtgtttatgctcatcttgagtataaatgtatatctatatacgtatatgatacttgagggagctcgaggtgttcaggatggatgtgtatttacactcaccatgagccagtttttggttccagtttttagttcacagaaaacaggagaaaccagagaactacagaaatgacccatccaaggcaccatgccctaagaacttacccacacaccggggctctggaccatcccattgggcgttcacttgacaggtaagcctagcacttccttctagtctgtagccttcatcaca

SEQ ID NO: 61298 - DNA, 1021 bp, Bovine  19866881672103
  misc_feature (1)..(1): n is a, c, g, or t
ngaaggaagtggtgttccactgtcaggatgggtatgcgttacacggggcccccaaactcacctgtcagtcaaatggtaactgggatgcccaggttcctttctgtaaaccagtcaactgcagccctcctgaagatcttgaccgtggcttccctaatggcttttccctttatcgtggggggcagatagagtaccagtgctttcctggttataagctccatggaagtccttcaagaaagtgtctctctaatagctcctggagtggcagccccccttcctgcttgccttgcaagtgctccccaccaaccattcagagtggggctgttaatgggacagatttcagttgtggaaaggcagctcagattcggtgcttcaaaggcttccaactcctgggactgtctgagatcacctgtgaagccgatggccagtggagctctgacttcccacgctgtgaacacccttcttgtggttctcctccaacgataccaaatgcgttcattgttgagaggggttcattggaggaaaatgtaataacttacacctgcaagcctgggtatgtcatccaaggcagttcagatctgatttgtacagagaaagggacgtggagccagccttacccagtctgtgagcccctgtcctgtggacctccaccatctgtctccaatgcagtggcaactggagaagcacacacctatgaaagtcaagtgaggctcaggtaagaccatgcgtggttccagagtctccaaggggcacagacagaagggttgtaaaatgaaaagcgataaatcagaaattaagctagttgggaagaaaacatcttctttgggctgttctctgaaaactgaagcttttaacactgggccttattctgcccataattatccatagattggcttgtaaaagtaaatttccacattttcagattatagcttctaatacaggtatcataattaacggattctgttgagcttcttggaccatcaagatcctctaactagctttaatacctattaactcataggct

SEQ ID NO: 61299 - DNA, 1373 bp, Bovine  19866881738355
  misc_feature (1)..(1): n is a, c, g, or t
ntccttgattcggcaatactgcacagagttcccgaccttctggaagcctggatcacagaacagactgattttggagcctggctttacgtctcttgatgcagttcgcagatgaggtactgatccttctaaagacgggcaatctgagggcaaagaacactggttcagagcatgtcagaaacacacaagcaacatcaccaggttaagggtttcaaatcatatattgtaccagtatttgagagccactctattgatactaaaacaagataacatgtaaccagatctctggcatgcaaaatttctagaaaaaaactattggagtcaacaaacaatttttcttctttcagcagaagtctgctgaatatttttaaggaaaatggtatttttgaattacaaatagtatttcagaattaataaaatgttcttatgagttaacaaaagccatgaattctaggataccttcagaaacttctttaaatattatatattgaattttaggaggcagctgggaccattcagagtttgaccactcggtatgtatattattacatctatttctttcccctctgtgctacctgcacatggatgatagctagtaattacagagccaagagagtaccccatctcaaactggaggacaggacttcgatgggcatttaaaaaaaattaaccatatccctctgctcatcctatttcccttattttacctttgttcaagtttcctgcacaattattttgtactgtgttatacagaaggtatttaagtatgtatataaaaaataacagaccctttagataaggtaggctaaacatgaattattaggtaaacagtagactgacaagcacatgctatttgaccagtagagaatcacatgtctccttttgctagaaaatcccggagtaatcaagagacagcagagtctaaagaagaaggaagctataacctgaacagaatatgctcttcggattgatcttcactctccccacaattcctgacaggaaatcaggccaggctagcacgtttcctttactgagttcctctgggcatgaggtggccagcgatttcacctgaaagtttacaaatccatcttttagacaaacctcacttgtttctggaagacagagctattatatcttaatctggtcctgctgaaaacattcacaggcttgtgaggggtgggggcaggaagcagagttttggatatagggagtgatttcaggggcaaaggaaaggtctcttccttttctctctctcccctccacccccaccattccttttaccaaatatttcatagtcgctggaaattctacatatagaatttcttggctaaaactgtgcagtttgttaaggtgttgaggggcacttcctctctggg

SEQ ID NO: 61300 - DNA, 1278 bp, Bovine  19866881823821
  misc_feature (1)..(1): n is a, c, g, or t
ntcactatcaaataataaatatatgttttatatattgattgacttgtatatagtatatgctatatatttcatattatatattgtatatgtaaaatatacaatatcctatatgttatatactatatataatactataactatatataacattataattgtatataacattatgctataaatgtgttgttcagtcactaagctgtgtctgactctataattaatagatgtaacacatagtatattctatatttttacttgaatataattttgtaattaatgaaaatcaattgtcaggtaggtcactgaggggtcagggaattactatgcttactttaacttattctgaaaagacctctaatgaaggttgacatttcaagagctcttagcatacagaacttggcaaatgggtcagaacttggcaaatggtattggaggggaacacataacttgacaggaaatcaaaaatgagaatgtggaaacattggaatgaaagggtagcaagaagtttagcttgaaagaaatgaaaatgttttaaggaagggtagtcaggtgagaattaaaagtgggggattcagtagatactgccttgataaatgtgcagtgagctatatgatttgcataaatgaatgggtctgaagcttggcatttacaatagaatttgtattttaaagctagaaggaaatatggaaggaaaaagaacctttcgcaagcataatgagcataatgcttttacatggatttttaggggagtcagcagctctaaagccagacaaagattcaaatctctgctctgctacttttttcctttgtgaccctgggcaaattaacgttctgagctctggtttcctcatgtataacatggggagagaaaaccttcctatgcaagggctttttgtgaaatataaaagaaattctcagaagtccatggaatattgcatcgactatgtgaatgttaatttctgtatccctttaataattgacaacattgaggctagagattaggtgctatctttgaaagtgagatttggccaaatttaggtgtccttttacctgtctgattcccacctccttcctccccacttacactttgttgccactggagtttgactggacctctgctaggcctggacgcaaatggtcatgccaggtcactaggcagtttctgggaaggcaactactcctttctgtttcctagaaaagcccccaaactagcacttgtgtggaggcagcaaggcaaaaagacaataaactattcctgatgatacagactttagtcca

SEQ ID NO: 61301 - DNA, 1556 bp, Bovine  19866881875609
  misc_feature (1)..(1): n is a, c, g, or t
ngtttaagaagaaaggctggaaacaatatcacaaaattccttttagaagttgagagactcatggaataaatgagaaagatgatgaacaatggagcataatgcaatggttaactgggaaagaacatgagaaaaccagtaagactcactaattgtataatgttagctgaggtttcgaatccaggaaattatgttttcactggaaaaaaaacaaaacaaaacaaacagcaacaaaacatggttaattagtgaataagagctttgaggcatttgatttctaacagtcttacaactacctaaatttaaatgtttagaatcctattttaaatactcactgagacattcatttgaataaaccccttgttatctgcctccaacatcttagcaatatatggaaaagaatatatttagcatatatctgggaggtacctatcacttttatcttcttagttattaaaaacataaagataacccgtaagtttataaactcctggtgagagtttaccataaagtcatcataaagtttttataaaattagtttttccaaaagaaactcactcacatagttacactgctggggatgaagtattatcctaagatgttatctctcctttcagacaacataaaccaccatctctcggacactgaagagacttatgactatgaaaaacgaaaagcaattctgagctggggaagcatatgggtgggttcccctctgagtttagaagcccctgtggcaggaacagagaagaggtcacagaaggcagacgccatgcagtgcaaagatgactcttgcacaagagaagcagcactgaccagaaccatacattgtcaaacactggttgagaatgatttattaaagtccaagtagcatgtttttaaatttcaaatagtccacatcttcaaagtgtgcatgaataaaagtccaagttcatttctttccttcctctacaaaaggctctatattgtgcataaaatctgtgcagatgccttctgctacctggttccccatactccttctggtttgggcacttgttaagtgtgctctctgctcaaatggtgaccatacactgacttcctccttcctgaacagacattcttctcctggacatctctctcttaaacgtactcctaactttcccacacctgcttcatgactgtgactttactggttacttattactacaaaccggtgcaataattagttgggctggacggttaaataggtatcacctaacacagtggggtggccctcaagaacacacagtaattatctagtcacatacagacacattcaacccatttgctacagaagctgtttaatatgaaggtggtcctttattcattcgacatgttcgatttctttgcattttcttccattccacattaaagttgtggttaccaagagccgggtcattgttgctcaaatgaaatctggaattgctaagcatattaagtagggtatcctggctgtttgtgacaacagactgtttctagtccattttgttatataaaaaagtcactctcaactaaagtaaccactgcatttcctttgtaaa

SEQ ID NO: 61302 - DNA, 1193 bp, Bovine  19866881887444
  misc_feature (1)..(1): n is a, c, g, or t
ntctgagaattcctgattatacttagagccagaggagctgctgacacaaacagtcattagcagacgacccttttggaacaaactatgctttaaaatgtaaacggtggaggcattttccttgcgttgtccagaaagaactttctgctgcctgagcctggattaatcatgagagagttcgtcaacattccactggtacatattcttactttggttgccttcagcgggactgagaaacttcccaaaaggttggtttcagcgctcttgtctcctgttgcctgtgacagttctaaagtgcatgcgtgtgttccgatcatgactgattcatgagggcaggcttgggttttacttggtgaagtgggggtgtagtatatggagagagagaaagctatataaataagcaattgatggatggtctccattctactgctatccgtcccctgcttaagctctacaataaaaagtttagccattcagtgcatacagagtcctcactcgtaagggaaacattaacaggtagactgcaagttattgaggtcagtttgtttatgtttatgtcaaacttcagggtggtctaaagggatgatgaaaacctttttacatcaggtttgccaggaatgtatcaatcccactcccagacatccagagtgtttgcttctgaacaaaaatcacttccattttcagtttcagctttgcaaaactcttaatcaatatttgagttctgcccaaataaaaattagagaaagacgcacacaagttgcctataaaagtctgaagaacaacgggttctccataggaggctggagtcatgatttggtttggcaagagaatgggaaaggtttttttttcagaggctttggaatgtaccggaaataacaccacctcaggggaaaggaaagcaacttaagaaactgacaaacacctgttgcagtagcaagaatgtccacagtttctggccagcatattatgaaactgagactagtgtatttcaaatcaggaagaaagacaggaaaataggtgatttgcaaagtgactgagcacttcactgaagtctttttacaaagacatgagaaagcaaatggaataacattaaaaagattctgattaaatggacccgttgtttagtagctcaggcatgtccaactcttttgtgaaccagtcaggcttcctctgtccatgggcttctccaggcaaaa

SEQ ID NO: 61303 - DNA, 845 bp, Bovine  19866881896542
  misc_feature (1)..(1): n is a, c, g, or t
naggctcttcccctggaaacgttaacccatctctcaggtacctctgtgacaacgggctttaggacagacctcgtggcaggatagatgagggccagagaaatatgaaacatatcatgtttcatagaaagttccatttgctaagtgctcattttaaaatattttaccatatttggagtgaattcccagccattggtttcttacaagcattggctaatttcttgtttctttatcatgcatttcaatatatcaggaattgggatttgtcttacccagcttaaaggcaatcctacctcatttgtggcttctgccctttagctaagaaggttccttagctgtctccaaatatgagaatgaatatacaattatagaacaaagataaatcaatcatatttcccagaaagacttccttatatttaatttcaaatattgcttctgttgcgatcacttcttttaattagttcctcacagaggtaaaaatatctttttcaccagcataattccatgtagcctcacccccacttgccacctctgaacaaagattcttactgcattagttttgtttgattgaaaatggacaaagtaacttctcagggccctgtagaaagaattaccttctaagtcaagagacagtcttgtctctctttccaatctacttcatgttctatcttaggcatgtgagcatccgaagaatgattcatatcatttctcctatgtgtctttaactacaacagttttcccctgagtactcccaagtacccagtatgcccgagtactccagagcactcagtactcctgagtactcagtggcagagcgataccacccttgaggtatgatgatttgagtg

SEQ ID NO: 61304 - DNA, 1215 bp, Bovine  19866881999712
  misc_feature (1)..(1): n is a, c, g, or t
nttttgaaaaatttgctttagtcattctctgagggtagatgtgccggtggagaatcctctcccctttcctctcatttggggtctctacccccccttccctcctgaaggacagtgtcacgagctacagcatgtgcagggtacattcctcactgccagcacttggaactgctgtgttgggtcctctggtctccacggcttcaggagaaacgctctgtcctttgaattggtctctcccatagggaacatgctgcttctttctcattgctttcaagacatttttcccccttagattttagaagcttagtgatcatgtgtcttggcatgagtttctctgggtttatttcattggattttctctcaacttcttgactctataatctgatgtctttggtcaagtgtggaagttatttcctcatctactctttcagcccctctctctcctatccttccagggcatcagtatgaatgctgggtctgtttttattatcctgcaggtccttgaggctctgtttatttatttttagtccatttatctctgcttttcaggttgagtaaattttgttgatttgtcctcaagttcaatttactccttattttgagttcttaatctttgttattatatttttcagttctctaatttttatttattttttaaatgacttgtgtttcttgctgtaatttttgtgtcttgtttttagtttctttctatcatttattttaagaacatctatcattcctggttgatgacgtttgtgatgctgcttaggtaattggaatatctaattcatcttggtactggcatcgactgattgtcttttctcattcaccttgaaatcactacatgtcaggctattttctataatcttgaatattttggctattatttagagacatgcagggtcctatttaaatcttttattttagtaggcagtcactttgtttacgctttgacttatttttgtgggctgtgaatccaatgacagttgcattttcagagactttgtgatgctctcttggtctgactgggtacttctggggctcttaatgattgcttctgatatgtcccaagaggccagaggtgctcacatggcccagggagctcagtgcctgtaggtgctgaaagagaggacaaagtacttcctggacagggccctggggtgggactctcatcagtgtcagctgctgtcgaagggttctccagcccagagaaggcta

SEQ ID NO: 61305 - DNA, 1701 bp, Bovine  19866880362492
  misc_feature (1)..(1): n is a, c, g, or t
nctcttgcctggaaaatccctggatggaggaacctggtaggctgcagtccatggggtcgctaagagtcagacacgactgagctacttcactttcactttttactttcactgagcgacttcactttaactttttactttcacgcatcggagaaggaaatggcaacccactccagtgttcttgcctggagaatcccagggacaggggagcctgatgggctgccgtctatggagtctcacagagtcagacatgactgaagcgacttagcagcagcagcagcagcagagttgtttctatgtcttggttattgtaaatgatgctgctatggacattggggtacatgcgtcgttagtgttttctttcttttttttttttttgacatgaacctggaagtggaattactagatcatgtagaagttctttctttagctttttgaagactctccataatgttttccatagtgattgcaacaacttacatttccaccaacagtgtacaagggctctcttttctccttgttctcaccaacatttgttatttgtagataggcattgcaaaagtgtgagataatgtctcatcgtggttatgatttgcacttgtctaatgattagcaatgttgaatattttttcatatcttctgactatctgtatgtcttctatgaaatatgtctgtttaggtctcccattcattttctaatcagatttttttttgcattgagctgtatgagctataaatatatattttggatattaaccccttattggtgatctcattttcaatatttaccattccctagactgtattttcattttaagacattatattctgcagtactatacacaaatcccttcaagttctttaatgggttataatattaatagaaaacacatcattcctcagttattatttcagaaagcaaataatttttaaagtaatactttttcaaatacttgactaaaaaataggctgactacatttatattaaaaatttacttatctcttaactatgattttgtgtaataaatatatattttaaagtcaggtgaaagaggttaagtcttggtttatttaaaattacttttttctggtgctaaataggtttagtcagcaatactctctgtgtgggtagataaaataatgaatatttcattcaaatataatgctgaaattttcactggctttcaaaaagcatcaaattttggcttaaagcccagatgtttcttaagattctagccagtaaaatctgtttgaaatagtgaggcaggatggagggtaaggaagtaaccaaagtgcttgatattataaactttgtaatttggctgataaatccattacttgtagttatgtgtagcacctatgaaggttttcaaattatttaattatgacaattaataataaaaagtacataatctctaagagaaaaatgttttaaaaacaggttcgatgaagtaggtaagtagataatttgcaaaattttaagtccttcatctcagtctcattaatagtcacagaaagacctctggtaaataatagactcttgagataatgaggttctttacttcaggacaatagagcaccattggggttactcttttaagccttattttctatttggattagtttatctctgataatttcaagtctcccttgggatcaggagaggaagcttaactgaggataataactgtagaatagaatatg

SEQ ID NO: 61306 - DNA, 1358 bp, Bovine  19866880405039
  misc_feature (1)..(1): n is a, c, g, or t
nttttggcctttgagctattctttatgaactgtttaagatttttcttacatagttttgtcaatataatgttatagcagaaagagtgacaatgttaaaaataggaaattatttctatgcctgtatagtcatgcacaaatctttgttctacacctttgaactaaaactgtgttcttggcttacctaaattttgtagttacaaaaaaaataaagtcttctctgcaatttccccttttatatgtgtatgttttcccaatgtatcaatggatgacagatattctttagatttcaataatttaaccatattttctattaaatcaacattccagatatactatttcattatcattttctttctataatattatacagtgattttacatctatataattaacttctaaattctctgattcccaatactatgaatttcatgattatacattgaactaaactatctttgattgtactcaatacaaagctttgtaagtaatagtgatatcactatattaattatataacatttaatgttgcattttaagtagtaagattattgcattacacacatactggttagtcattcttaaaagctgatatttgatattttaatcatccatggtttctaaagtgcttttttgtagtacctttaaaatgtcagggtgaagagcatactgaagaaacacttcctttatatagctaagatttctgttcatgcaaatcgtgctggcaaccatatttgtacctatatggaagcaaatgttaagagaatacgatgccaagaagcagagatgggaaactgggccatggaaacttttaattttctgtgtccagttatctcttgttccagatgcattcggtctttgctatgagtagcctacattttccccatatgttttctgctacatgtatgtatttgacaataacataaagaacatttgctatgggccaggtaccaacaaaagcaattattgacccaagacaaagttatgaggtagatactgttatatctccaatattacagataaggaaccctcagagaatttaagaaatctgcccttttcagttatctgttgctgcataacagaccacccaaaacttaaaaggacagctgtttatttgcctatgattctgaagggtcagtactttagtctgggctcaactaggtagttctttgatcagtttcacctgggatcactcttgcagcttcgaacacctggtggctgtactgggcagcacggtctcaaatgggtgtgtatatataattgtcagtcaaatctggctatcagctccagacctttgttttcctctgcacgacagccacccctagggggctagacctagttttttgtttgtttgcttgtt

SEQ ID NO: 61307 - DNA, 1598 bp, Bovine  19866880489732
  misc_feature (1)..(1): n is a, c, g, or t
natttttttaatcccccttcttaatttatatcattatgccaatatttcttttcatttagaacaattttacggagaagacaatggcaccccactccagtacttttgcctggaaaatcccatggatggaggagcctggtaggctgcagtccatggggtcgctaagagtcagacacgactgagcgacttcactttcactttccactttcatacattggagaaggaaatggcaacccactccagcgttcttgcctggagaatcccatggacggagaagccaggtaggctgcagtccatggggtcgcacagagtcggacacgactgaagtgacctagcagcagcagcagaacaattttatcatatttttctgcattattgtgtatttactttttgcaagtaccctgggatgtgtgggtagaatggagtaaagaaatggggaaaaatattggcttaagtcttttttgttgaaaaacaatttttggtaggctgagttaggactataatccaacttcctttacacattctctgttttattcctttaagcttgaaatagtttgaaaaacagaagcaataaactaaatgtattacaatgcaatacagataaatatttaaatcatttaagaataatttgaatacttctaattaaaatagtaaacatctatttaaaatacaaaacccagcaaattatatgcaataataatattaacaaaataatcttcactaccattcagcctcttctgtgtactgatacacaaatagaattttaagaatgactgacaagttgtttttcctgggacctccaaccatgaatctgtcatgtttattcttgttcaaagatagtgacagcagacgagaagaaattgaatggccttttaaaaaaataaaacacacatgacagatgccatatggcttttcaccaaataactgggttggatacatttagaaagaatttcaaaaaagaagtggaaaattattgcacaaatgctcttgcatttcaaacaaatatacaataaatattgtagcattcagtgacctgacataatcctgaacaataaagtataaactagctaaaggaaatgatacaagcttaatgataaaactttatattaagaaatcaaatatgttaaaaagtacagagacaggcgtaatgaccacagtatgtccctcacccaaatttaaaatttttcaactatggtcaacatccacttgcccatgttgtcccaaacctaaattaccctgagacaagtccaagaaagcatacatttacattattctatcatgtggttttaaaatgtatgtatgatatttaaagtaaaataaaaatatcataaagtatttaattttaaaaaagcctctataaaaattctatagagttggtgatggaccaggaattctagtgtgctgcagttcatggaatagcatagagtcagacatgactgagtaactgaactgactgatgagattaaatatgaaaatatcaatttaaataatggagattttacatatttaataattcatattataagaaatatatttgataaaatataatgcattatccttgtaaatcactttgtaaagacaaatcattacttttttttaaa

SEQ ID NO: 61308 - DNA, 1262 bp, Bovine  19866880530370
  misc_feature (1)..(1): n is a, c, g, or t
ncactatgtcataaatctattcatctcttcaaaaagttttcttccttctctttattattcttattaaaaataattaacaaactatatagtgtttatatgcattaccagtttctttgatcttacctcacatggaaagaattggtcagaaatttccgtcctgcatctacacattgaggaccttggctccttcagaattcctcttaaatcatgtttaggatttagacatgtagagggtgttttacaggtgtttgaatatgtttcccctgagtgtgtcttggcaattgctattgtggcaacttttcctactgtgtgtgtttgtaattctatgtcagcaaggccagtgtcactttttcactgagtacctcagtgtagccagactctgctctgcttgacaagtccacttgctctcctccactctttcctctgttctgcatgatcactctcccactctgctgtgtagctgactgtcccttaaagagcagtgtgaggggttgagattaatagcactttaccttttcctttggttttattacaggattcccaaagtagggcaatttatgccccagtcttcatgaatacttataacactctctcataataggaccctcctggacacccagggtcctgatcctttgaaacaactggtgtgacaaacaataggatctatgacaaattcttacttccagtaataagtaaagtttcacattgggttaagcctattgtgcctgggattcttccctcagaatgatgtatatactcagtttttatacaaaaggatcaaagtctcagtctcccagatacagcaagaaacgtgtctgaatctcaaagtttgatgtgtgtgtgtgtgtatagtatagtcagttgtcttgtgatacactcagtgtgaatcaagagatgtctttatgtagtaaaattatagagattttacactactataagaatttatcagtcaaaaaccatttaaattccccctggattcagaataaagattacaattagcagcacattttgggtaatgacatctataatgccacagccacagacagcctgccagaatgtgagtagcttgattggagccattcattgcctggctccttctataccctgcagagcaatttgcctccttaaataaccatcccctactgctaaaagcaacaatgtgctatgcaaagtaaatcaatatataaatcatttgcttatatcaacaaatctttaatttccctcatcaaaagaaatttctaataaattttaattgagatctt

SEQ ID NO: 61309 - DNA, 1062 bp, Bovine  19866880572139
  misc_feature (1)..(1): n is a, c, g, or t
naattatctaccttgcatattcgaaattactctttacaaagctgccttttacagtgctttttccatttgaattatttgacaagataatccatattcatgctgaaaactgtgtgaaaagtacagaaaaaaaatgaacaagtaattaatttagaggaactaactttcaccaaataattgatatataaatttgtgattattgcttgataattttttatccattcctagtgtgtttagatatgtactatacagaataaattacaacttttgtaacttttataacttgtaaaatactctctttatattaaaatgtgattgtaggacttccagttttagctccaacctgtataaaacttggaagttatcatgccatcattatagaaaaataactgagcaatgtgaaaagcagtgacttttgttagactcatcagagattggaagtcagtggaaaaattataatcagtactttggggaggcaggcaaatatagttattagcagtatttatcaatttacctggaacagaagcctctgaagtcttaaactgggaggaacacatagtcatttcaacaaaccaagactgagtgtgaactagcttgagaaagagaaactcctggagccatatagtccaagtttttgtagatgttaacctccaggaatcctaccagtttctcatgttgataatccaataaaaatgtccctcatgttttgggcagagggaaaggaaaataaaatattcctggtgtattctccacaacaaagactaccactacaggggaaactatattactagagagttttaacaggggaagaagcaattatgtagcttcagccacatcccccatacctctcagccttcctttcctattttatgtaagaataatgggaaaaaagctgaaagatacttgtgaaagtcacagtctggggacccaggcccaccaaaagacagaagtgatcagaagattggagaacagtttccctctgcacaccctgccatcattcatttcaacagggctggaatataacagagaatcacaactaaagatctgcaagacacaatctttatt

SEQ ID NO: 61310 - DNA, 875 bp, Bovine  19866880922462
  misc_feature (1)..(1): n is a, c, g, or t
ntatgggattctccaggcaagaatactcgagtgaattgttgctttgcaggcaaattcttcccccatttgagcaacctgcactaacccagtccatgcaagcacagataacgctttctgtttggatttgcttgtatgtcatatcctctaatattgttttaaccaaaagtgaatcacatagccaaatgccacgttcacagggtgggaaaataaaaatattcccctaaaagggggtgaggatgattaatattttctgaataacagcataatataccacattatgtaagtatgactccaaaagttggccacattttccttgtgaaaaatacctacaatgttcagatcatgttgttcatagaaaaaattaggaaacgttttatttcaaaaacatttgtttatgttttccccaaacttaggctcttttgatttcaggattctaataagattttgaacagctttttataacttctttgcattgctctagcttgtgacaaagaatattaaacaagttgtttgttagagatttcaacacataccacagttaggtctactactaattagcattatagaagcagaagtgctgaagttccatagaagtgttatttatggagaatctaagtttcttgccagggaacttgtttactattaactgttctttacaggaaaaaaaaaatattgctatagctatatttaatgagaagcataaatcacacctaatggaccatgactcatatccccatcaatttatgatgctaaaatgtggacttagggaatctgtctttctataactagttcagatggggagaatagctttcattttttaaaaaactgcagcaatggaacattatatggtctttgttctatttgatttataaata

SEQ ID NO: 61311 - DNA, 1448 bp, Bovine  19866881228640
  misc_feature (1)..(1): n is a, c, g, or t
nttcagcttttaattttatattggagtatatttgattagctgtgttgtgttagtttcaggtgtgattcagcaaagtgattcagttacatacatgtatctgttctttttcaaattcttttcccattcaagttgtaacataatattgagcagagttccctgtgctatacagtaggtccttgttggttatccattttaaatatagcagtgtgtacatgtcagtcccaaactccctaactgttcctcctccccaccttacccccagtagtttagtattttaatgtaaccatctatcaactaaagataacaaagtaccaaaataaccttaagtgttgcataaaacaaatttgacatttcttcttactacttatgatactttttgtctctctcagttagacaaatcatggcacttccatcttaatcctcctatttaactgtaaatataaggagcccaacagctcagccaggttctatgaagagccctcactctgtgctatgtgagtcacatattataggaaattgaagacctatattaaagaccatctgggcctgtgggtataacttttcctgggtccaaaatgggagataacatggacttgtcctttgatgccactgccttctttcctgcaacatctttaaaagcctatatttaaagtatttggtttaaaaattgattcaattgaattaaacatcaagggggagacagaagaaagaagatagggtaaagtataaaatcctcaaactaacctgagatatattctgcaacaaagatgtcatgctgacgggctggttgattagaacagacattttgagttcagtgatccagcagcccttaggaatcctgggagagagctgccaattctgagaaatacatttttttttttctgtttggttttactgattagttgaaacagtattgccgaggcccaaatttcagtcatatctttattgttgctgtgccattataacgcttctaaggtgtgtctcttcccagtcttatcactgatgcttacctcctcatagtgtcatgtgaggagggaccacagaagcaccagatttccgctttaagaaaaccctggggcttcctgaacagctgcttctcaaagctgttgatttgcagtataaaaattgatccaaatggtttgttctccatctgtctcgtggcctgctcttgctcctccaattaggaggtgctagttagctctgctggtagctcttcttttgctgttttctcaataagcggaattgcatgttgaaggtattgcctctgatcagtctagcccctctgcatttgaccaggggaacacataatcaacaataataacaacataaatttctaatctatacaatgtacatcatccttattctcatttttggacataagagtatctagaagctttaaaaaaaaatttcagtgcacatgtggatggagcataaaacagatccctgag

SEQ ID NO: 61312 - DNA, 1460 bp, Bovine  19866881366965
  misc_feature (1)..(1): n is a, c, g, or t
ntctttgctactagcacaaactgggaagccctgaaacactcataaattctctcaagcatcgaccaagaggaagcattttgagcagaatttgaggagtgagtttaaggtccaatctgactttagccaaactaagttagcatgcaattatttagtctgatccaataggtgatgattttaaaagataatgttttatgttcttaagcaagaactcaaatccagcatttattaatactttggtaatgaagttgggaattgggagttggtgatggacagggaggcctggcgtgctgcagtccatggggtcgcaaagagtcagacacgactgagtgattgaactgaactgaattgaatgaaaataatatttacttcatatgatttctatgtacaatcataggaataatatgtttaaaacagaacaatgtcaagcatatagtaaatattaaataattagtaaatgtttaaactgtaattcatagatgacataaatgctataggtagtaagtattctgatgtgtgctagataacaatagagagatttaaaaaattaaaaacttctccaagagtgaacatttcagaagtctagtgactgatccattttgtagataatttgtattgacttacagaaagctagtcattagataataagtctgatttgtatgtaaaataattgtatgtttctatacaaatttgccacctatactgtagagaacaagagaactcaaagtttattttgaaataaaagaattagcgcctcaattctctcacctttcaatattcacatatacagggaaagtgatttgatctttagagtagactatatcttatatatatatatacatatatatatacacacggagagagacatacacacatatatatatgtacagtaacatctctttaagttttttaagcacaattaaatttcatacatagatacacatttacatggggtccgcatgaaaattgtttaaatgacattatacatttttaaaaaatgctatacttagggcttccttcacagctcagtcagtaaagaatccacctgcaatgcaagaatctgcctgcaatgtaggagacctgggtttgattcctgggtcaggaagatcccctgagaaggaaatggcaacccactccagtattcttgcctgagaaatcccatggacagaggagcctggtgggctacagcccagtgggtcacaagagtcagacatgacttagcaagtaaaccaccaccatgcttatcactatggtttaggcttgactgctacctaaaggagacaccagctgagatacctatcttcaaataaaaaactgaaattaagaaatatagatgtactctcttgcactgtggtgggaaaacattcgtttctttccagtggtgtggaacaagagctgtgtacatccaaatttcacatttagcaacattattatggttggcttcaacccagcaacaaaataat

SEQ ID NO: 61313 - DNA, 1579 bp, Bovine  19866881383589
  misc_feature (1)..(1): n is a, c, g, or t
ngtacagatatacttttaatatattttatcttttctcagttaaaagatatttgggcccttccattttttggttatcatgaataatgctgccataaatattcaagtacaagtttttatatgaaaatgttttcaattttgagggtatgtacataggagttgaattgtcaaatcatatgctaactctgtgtttaacttattgaccaatctacaaattcagtgatttttctcttctgtctgctcaaatctgctgtttctttagtaattttttaaaaaaaaattagcaattaaactttacaaattcagaatttctatttggttccctgttatctctttgttgattttctccatttgttgagacactattctcattctttaattatttgggcatattttctttagttctttatcatattctaaaaatttgattttaaaaatttgtctagtaattcttatgcctcaacatgctcaaggacagtttcagttgactgtcttttttctcctatgtataagcctatatatttgtttgtttgctggtttggatatttttcttaatttttcattgaaaactgtacatgtaaataatataaagtggcaacactggaaattatattatttgtcctgtccagagttgctgtttgttgtttgtttctggatatgattctgtgttttttgtcattcatggacactgatgtgtttgattggttagcttaggggtcagctagtgtttccacagaaattttcttaaatgcctgaaatcagtaattcaaccaatctttgtcaaggggttctgtacgtgtacttgggtgtgtctttacacttcaccaggaattttctttactttagcctttacttcttaattgagcagaacctcaagattttatctacagataaaagtttaaagcttcttaggtctttcataagcttgtgctctcctactatgcacatagtcctatgactgcaagtggaccttccagattctcaggaatattacagtgcacttctaagcccttataaatatctcattctccacctctccctttcaagtttgtctataatttgctatagaagctatccactgctctaggaagccacagaattaaataattgacttcaatcgttattgataattatctcatggaatatgtttttgaactgggtaaattctgagtcaggtcaaataaatcagctgaaaaatcagcaagtggtttttcccaggaaatttaaaataatgacaactatctgagaatgaggcctagaaaaaactttcaatcacattctgaaccctcaggtagctgccaggctacagtcttttatcttgggactaataaaactatcttgttagtttttaaagctactgcacaacctggtaaaaatgagaatagagtcattaaaacgctacaaactgtgctgttcttacagagattcaaccattttcttgaactaaaagcttcccattgctgcatgccttttgccaatttttcagaagtctggaaaaagttaattctgaaatttctgtgcaggtagtgtcatagattttatggagagaatttccagtggtcttcactctgccatttcccag

SEQ ID NO: 61314 - DNA, 828 bp, Bovine  19866881885775
  misc_feature (1)..(1): n is a, c, g, or t
ngtgttaagagaataaattattaagcgataacccctggccactcaaatatttttacacattttgtacttccctagctagtctccatactttgattcttgatttttaagagcttcaaatttcacagaaatagcatccaagggaagggaggaaaaaaggtgagatatttatgtcaaaatcagtgtaatcttaaaccaagaagatatttaggtcttcccagtggctgctttacttgtgataggatcctctccatttaagtcagctcaagctgttcatgaatgcatcctctgcaatagcaaatggtttctccttttaccagctgtggctacccactaacttctgctttataaaaaatgctttgaatctgaaataaaacacacaattagaagtttatgtacatagagtacttttattcattgcatgaactttctgaagtattatatacaaaatggtatcttttctgaattcaagaaaatgtaaacatatgagggttagttaattactaacagggtaattaagtagctgtatatacccctttgcagatattcatgtaactcacagttgaaaattcaagcctgtatttccattaaacttaagagaattgttaaaaacttgattttccccttaacttcttttgcaaggaatatgcaatatacagcatgagcatatttaagtttatttgaactgtttcactttatgtgatgatttccactatagtatcttttctaggatgttcattgtttggtcacaagactttaaaccatttggagaaaaaatggtttaaagtaaaatatgttttgtgatgcagataagtttcagtcattctacta

SEQ ID NO: 61315 - DNA, 2788 bp, Bovine  19866881142520
  misc_feature (1)..(1): n is a, c, g, or t
ntttgctttccgaagactatggcacaggggtccttgggaacaagtagatatttggccaggaaaaaaggtcagaccaaatagggctgctccaggcttacagggatttagcagccagagttgggctcaggctgccccaggctcttgctctaatttagtatagactttagagaacttgtctcatgttggggtgtgggggctgaagcattcacatgcaaagtagtctgagcttccccaaacacgtttacacaccctacaacaagctttccaaagtctcccatcttgcagcagctgagctgtagttaaagctgcaaggctcacaggatcaaagaagccaggaagagacaaagcaagtaagaaatcccagaagctaatctcaatctagctttctccaatgtatctggttggccaaagagttcattcaagttttcccataagatgttatggaacaacccaaacaaaatttttggtcaacccaataggagaaacactcatataactgatatgggatgtagaaagctatgctgaaacaagctgggtcttctgctggatttttcatcaaataccaaaggaaaacaaggggcggggtccactttatttatttatttatttttaatcctcagttattctattgtaaagggatatagctgaacagataggagacagattccccattgtgaattttcctgatggcttctgcaaggaccatggagatagggattgcctgtattttgaagcaatgcttcatcttatcctcctgaggtacagttttggtgactactactgcttcaaagcatgcattgttaatgtgagaaatggctggaacagaaaagattccatgagtcagcacagcataaacacaactccaggggagagaagtttgtcagctgcatggcagattgaaccacaggtgtcagccatgtgatccactaggagagccacccaggccttcacgtcgcccaccagcaccatgcagtccacttcatcagccttcctccattctccacattcaaccagtctgagacaggaggcgctctcttagctcctccggcatcaggtgagatagtcatggagttcctccacttagacatcttctctcttatccacttaaggacggctgactctgcaaataaattttccactggaaaatcaaaagtttgaggagcatgcaggtccctggtggtactatgacccttgtctactacagagatcattttgccacaagcttggctaatattggagcccagctcttatccttcttattcttccagacataagtaggaagcacaggcttaccgcagtaacccaactggctgaagcaatctttgcaggcattattcataaccaaaatttccattcaattaacttgatttcaccacagccactctgaacaatgtagacatcctttccacgcactttttcaccgatttccacataggtctgattgctgaatttcacagtcaccgccttgactagccacaggcccagggagggcagcagtcttctgggataggtcctggtgggagctgctgaagattttgatattcggcatcttggccaactaccctaagccctctttgcttagtgatcgctcctgctgccgagacccaaatcaagttggcccagagactcagtactaggcacttgaagttgctactctgtcatcttccattcctgccttgtgtgcaactctaaactgtcccaggattagacaaattaagactgtccagtctgcttcctaaacacctctcagaaacattccctcttctggactctcaaaatctcttccttagttcaagtctcaccattttccatcagcatcatgatgacatcccctcaaccgattggctgtctgggtcttactctgctctgctgaaattattctttcttaaaagtaaatatgatcacattacttttgctaaaatctccatcagtttcccaattgtctccgaggaacattccaacagcactgcaccatgctcaggcttctcctggcctggcccagtctcctcggcccacttgtcttactcctgccttcttgccctgaaaactcatcccgctcctctctgctccatccacctacccagctcccccagcctccaggcccttcctccctgggctcctcacccctcccatccttccccctccccctgtgctacctgaaaaccttctagatgagcccgtctcccaagttctgctctttggtaagactcgcatgtggttatatcctcttggaaaggcaacctgtaaaattaacatgcatatatacttagagtctacttctggaaattgttctgtattacctatgcactcctcacgtaagtgctcaaagatattcattaaattatttgttatagcagcaaaaaacaaaatataaataaataaaaagggggataaccattctgtcaataggcagctgattatgtataagcaattaatcataacaataaaggagatcaacacatcctgatataacatggtcctcaagctacttacctaagtaaaacagtataatatgctgtggggatgttattatgtgacacctgtactgatattcacaggtagaccctaccaacggcttccctggtggctcagctgctaaagaatcagcctgcaacgtgggagacatgggttcaatccctgagttaggaagatcccctggagaaggaaacagctacccactccagaccctacaaaaggtggggcctctgagagggaaactcaaggattggaaagaagacttacttttactctaaactattttggagctgtttctatttttttctgtttg

SEQ ID NO: 61316 - DNA, 815 bp, Bovine  19866881232508
  misc_feature (1)..(1): n is a, c, g, or t
ncttgaaaaatgtgtccatgcagaggaacaacatcacatgttctatgtacagtcaggaatctgatgacttccaagctccgtctgctctgctgcctgccttttaatattagggtgtctggaacagatctgtgggggctgcccacatgtccagttctgagacttccccatctacctgctgtgactttggcatacaccgacctctaacacgtgtgttttagagtcagcgtggctcaagcctccaagggccagagagaagcagacttgggaatgcaaagctcccttctagccagggttgccaaacaagcccctcagtgaacactgaaagccgatttgctattcaaatgccaggctggaaactggcgggtacttgagagtatctctttgtattatgcaagtagtcacagaggccccagtgttgctggagtgctggcacagacaaatgaggttgtctttgcctttcaactgcagtgggactgtgggtggccaagctggtgattgccaaattgtattacaagtgtaatggcccctgtgccaggctgtcaattcacccaggtacctctccaggacaagtggcttggcaacctgtccaagttccaatgaagcagccagtgcaccctgaagtcagggtatggtcaccaaccaggggctgccattgttttggaaagctggggctacctggaagcaccaatggtggtgacattgtgaggggagagaatgcttagagaagctactcaggcaaaagagagtggtaaatgctccagtgtgggaacagatcaacatggccataccagtccatgatgtaacacacaggaaga

SEQ ID NO: 61317 - DNA, 837 bp, Bovine  19866881516268
  misc_feature (1)..(1): n is a, c, g, or t
nattatgtgctcctaaaagagaaggatgaagagggataaaagagacataaatgggataggaggttgaggagaaaagaaaaggcagtatatacaaaggaaagatggttaagaggccaatgggaaggaagacacagaaaaagcacaagtcacagaaaaggtagagaagagagattaagatatagaaagtgcctgtgtggatggccattgaagcagggtgtgagggacagaagggtttattttgttcaaaagtattaaataaactactgtttccacactctgctttttcttggtaatcagctttggagcctcagcaactttttagcgttgttatctaaaacaccagtgagtgaatttgccattactcaaaactgtttatttttaacatttatgagtgccttctctgaatagaacagtccaccacagtaaaaaaattcactttttgagctgcctcagcagtattgaaggcaacaagtaaattgtccaatgtcacacaaatagaacatagatggggtttaaattatttttgtatgttctgtgctttcctataacacagaattccatcacatatatttaatctgaaagagcagataatccaaaacttattatatatcatatattaacattttcaataacagatattgcttctcaattaaatttggcaggatagtattaaattagtttctattccccaagcacacaccaatggcaagtgcagcccacaagtgtgctggaaaccaaaaagtaagtaactggggtttgaaatctgctgtggagaatttacagagtggataattgaagttgattctaacttgaagttgatgctccctgattccctgt

SEQ ID NO: 61318 - DNA, 869 bp, Bovine  19866881888121
  misc_feature (1)..(1): n is a, c, g, or t
ntaaatgaactaatgagcatgaatcagtttcaggaacaatactgaagcacaccaggcagtagtatctttcaagatacaaaatcctcagaaattcagaaaaaaaataagtactagaattatcaagataggtttcaaggagaaaaatgtcccaaagattagtgatgggagtggatataaattgagatgggagaaataattctcttcttcagcctcacaaagttggaaaactttttattatataataggctagagaggactcagaacagtgttctatttctcagatatggaagaaagtgattgtgaggttaaactcaccatagaagatgaactttcagcctgaaaaaaatagtcctccataaataaactccagtagaatctaggccaagggtagaaaaagcaaagcactatggggaaaaggagaaaagtggatgacatggatattgtcctagaacttagtatctagtactaaagttactggtttgtcactccttcccgcagtctatatctccctgtatcagttctgtgaaatcagtgcgcctagaaaaacgtaatgacaaacttcaattccaaaatttaaactgacaagctgctgattcagtgacatttctcagggcactaaaacattaggaaacaaccttacaaagtgcctttccagtaccatcatcattttatttagttattacctggtcagggtgcagatttatattccagccctttctatgcttaaatataaaaattcttcctgccaatgttgccaatttctatttaccagccattgatttttccagtgtgtttctaaatggagcttgaaattaacatgtcttttctttttattcactttcctctatcctggcagcgttaataaccag

SEQ ID NO: 61319 - DNA, 2972 bp, Bovine  19866880640178
  misc_feature (1)..(1): n is a, c, g, or t
naacagagatgcccgcgttactctccccacatcaccctttatggtcacatagcgacactgctgtaaaagcactggcatttatgaagaataactttcatcaggcttagaatgtgtgtaataactgctgcttttaggactctggaagagttcagtagagctaaacttagaatcattgggattttgcgttttaagcattttagaattcaaggagaactcacatggctattaagcagacgtcgtagaagggagccaatgggtatttggtaatggaagacaaccaaaatgagacagagtgagtgatgtgtcatgttttttaggcttgtagataccttgagtgctgtactgttcctttgttaactaacttgattgtgttttcatatcagagacatattttagaacaaaacactaaagctacagttgcgacagaacaaccctctcactcttttacctgtacattttcctcttcacttctgaggaatatcaagttttgtgtacgaaaattttcttttgactttgaaaggaacaccctatctagaatcttttgatgcattaaataagctgcttctgtgataggaaattattaaaggaagaattaccttatacttgataacagtagcttttacacttgatcttagccaaaaggccaagaagcaataataacagtagctttgaaaattaatattttatccagtctagtgagtcatacctaccttttttggaattgtcatattctttggtatccattccctcatttctctctcaaaagtactgtactggttaccatggttaccatgcgatggacatgaacttgggcaatggacatgaacttgggagatggtgagggacagggaggcctgttgtgctgcagtccatggggtcacaaagagtcagacacaattgggtgactgaacacaattgggtgatttttaaaaatacagtgtcacttaaaaataattgacaattctttatgaaagggatgagtaaattattcaccaaatattggatgtggtcttgagctaaatttgataggaaaactttatttttgttattaatataatattctaagaatttctccccctggatatctgtcatcctctgcttttttcctgcttttccaatttgaaataaatcttgtctaaataacagttaaagaacttaaaactgtggttaatcaaaattgaccattcaagtgcaaaactaataatctcttggtccatgagttaaggctatcatgagcctccttttatgaatgctttgggacttgctcccttctcctttgatacttcagaatcttttccatctacttgttttcctctctctcatatttttctctgagtgagtatgatatgaaatctaagaatatctaaaatttttcttctctttattttaccacattttaaacatctgaaaaaaattgtaggtaggaaaacatagtttgacctttttcattttactgctttagtttttgcttccccaggtctccaattttgttttttaacaaagttgttggtaagaggtaattttaaagtatcttcagtgcttcatcttacaggaaaactgggactgggaaaatgttttgtaaaaagatggaagcatgtataaatggatgatgtcagagtatataaattcttttttgtataataggatacataatatcttgactttaatcttaattctattttatattttaagactgggtagtgatttttattagagtcaatgtaacccaacatcttttttttaaatgtgttttttagtgttctgaacatctatatttaagcatttaaggccaaagaaattactgatgatgatacctatagagaggaaggatggatcagttttttctgtactattttttgagtccatatgataacaatatcatctagtttccatgcttggttttataaatacgttagagtctttaactttaaaagactgtcagttttgattgacgtgtttgagggcacataccccttgtaaaaagcagtctcagtgaaagtccaagttctgctttcagactactacttgtattaaagggggaaatttttatgtagttacttgctatttgagaagcaagaaaaagtcaagaaataggaactgaattaaaggacatacttgacaacttttaatactatggaatctatcaggtttttgtggtgtgatttttaaatttttgatgatacaaaaattttgttataattttatggtcatgtttgattttggagatttctggttgctctcttataaaaaatttgaactacctaagaaatattctggcttttcaaacatgaataaagcatttttcaaaaggacacatattgttttatttgagaataatattaacacctcttggtagttaacatcttgtgagccttaaggaagaatttgaaatacatatggagtggtataaggaagttgtggattgaggcctttttggtgcttttcagctatgaaaggtgtctgcagtcaaccttaccattgatagtggtagcaatgaattcttcatcagaaaacactttttgtattatttctgttatatactgattatttctatttttattaaaccaagtactgtcttgattaagtcaagtaagtacagacagtttagtaagttaaaaaatattaaactactactgtctgcctagcatttagcccctaggtatgttttggcacagaacagcatgatatggtcattgcagtaaaggaaatcataattttgtgggggaaaaaggttatgtgtatgaccatctcacctttccatatgtatcatgcttttatatcactacatagtgtgtacataattttttatctttaacattatcataggtattttccttattgtataatctttaatcattatttttaaaaatttgttttaaatgaaacgaatatttttaatggcaaaaggtacaattcacaaagaagatagacatcataaaccattagacacctaacaagaaagatacataaag

SEQ ID NO: 61320 - DNA, 2192 bp, Bovine  19866880652561
  misc_feature (1)..(1): n is a, c, g, or t
nccccccccccccccgccaccgattcctgggttccctgcgtgtcgtccgtctgtaaaaccctttccctgggcaggggtcgttcttgcagtgtctattcccctatcttactctctcttccaactgtgccgccttcatttctctatcaagctccctccgtcgttactgtgtgttgcttttagagcctgcgttgtagcgggaagctgcagtgaagtttggtaccgaaattcactagttttgtgcaactgtgggcaggtcagctgtcttctctgtgccttgttggagccatacatttcgtcattcagtaagtggttctgttttgtgccaggcacccttttaagtgaaaacaaacaaaaacagtccttgcttaaactgtagttggagaggtgacggtaaatacatagatacttgtatatctatgtatatacttgtatatcttgtatatacaagaatagatacttgtcagctaatgataaatgttaataaaaataataaaacattgaaaataggggttggagagtgtgtatgtgaggggaggagttttttagagtgacaagggaaggtttctcagagaaggtgctgttttagtagagacctgagtgagatgaaggaacaaggtatacaggcccgagggaagagcattttggaagagtagagtaagtgcaatggccctgaagcagaaatgatttggattatttcatgaacagtcttgtatagaaatttctgcagtcatttcataggtgtcttgggagaatgaaatgtgcacagagatgatagctctttggaaataaaaagaatttgcatatgaaagtttctgtgataatttacattttcttattagtagtggagctattatttctctattttatccacagtcagcactcaacaaggggcactgaaggaggtggagggattaccctcatggaataaatagcagtatctcaaaattgaacgttctggtcagttaacatttatccggtgcctacttatgtgaagtggtgtcttgggcattggcacatgggcacaaggagcacagggttcctgtattcaagaatggccaaaaaagttttttaactaagaaatacaaataaaacagacaaaagaatggctaaaaaataatgccagctaacattgactgatcctggaattgtgatgaattctttacacagcctattttgtttaattctcataatgctttatatgatgaaaattaatcactttattttccagttgaagaaacaggcttggagaggtgaatagcttacttaaagtgacatagttatcatagttattaagtgacaaattttggattcaaatctaggtctaccagttccagagccctgaccagtaatccatgctctggtctgttgtctattacttgtaagctgtagagttgttgttgagggtaattagtgcagttaactaccgttgatgacagaagtaaatgctgataaagacacaaaaggctgtagcatcataggtgagtgagaaattgaggctctaggaagacttgaaggaaatggtctttgaacagctttttgaatagaatttcaatacttgaagtggagacagcccacaagatatttattaactgcagagaaaaaacaagtatctttatacagtggaaaggcctggtagacaccaccataatcaagtggttaagttaacatcaccactgatggaagagattaaaatcacatgccacttgttaggagttgcactaaaaagagcacagcctcactactgtgatagtcttaccaaaaaaaaaaaaaaaagcataacgactctaatcatgaggaaatatcagacaaacttaaattcaggaacattctacaaactcactagcctataatcttcaaaagtgtcaagtcatagaaatcaaggaaagaccaaggattgttccagattgaaagagactaaagacatgatagccaggtgcaaacatggagtcctttgctgtgcaggacatgagtggaacaatttctgaaacttgtatgggggcctgtggattaggtgtagtaatgtgtcagtattttctgattttgatggttgtattgtggttatatagaagaatgtccttgtttgtagaaatcacacacactaagagcaggggttggcaaactttgtctattaagggccagatagtaaatattttaggctctgagggccatatagtctcagagacagctcttca

SEQ ID NO: 61321 - DNA, 1315 bp, Bovine  19866880694405
  misc_feature (1)..(1): n is a, c, g, or t
ntggtcattttgtaggcattccagtcttttgtaggtgttgatgtacatttacagaaagacgattttcttttagtattatgattgtttccaaaaaggttagttggattaaccaaatacccttggtcaaggtatcaaatgggttgcaatcaaaagtacaaaccaaagataatggaaaaataaaaccagagggtaaatcattccctgccaacactgaaagtttctaccttgatactaattacgaaactttcaaagaaaaccaggggggaaaatggcttaaatttttatatatatatagagagagagagacatgcctatatctatatctatatagatatacatataaagatatttattacatttatacttatttagaaaaaaagacaaacaattcatagtttactttgaatagtatgccttctctatttataacagctgctcaaattttatagaatggacaaactctagggctcacatatttcttaaaaatgtggggtataaaatactaacaggctggttaggtaaaggtggagtgtagtgaaacacaatcaaatgacagacaaacagtgaaagtcatagaaataacagataaaagaacaagaaggtttctgtaccgttacctgaagtctggccaaaatgcttgccttcttggagtttgacgagtaacttcttgaacatgaaacactgcagaaacgctttgttttagagtaaaaagcatctcgcacaccaaccattccacacatttcacaggtagctaattaacaaataaaaacactggtgttatgatcataaaactgattttcgtctaacagtttaataattcctccaattatctaaaggttttaatttttaaaacattccttcaggcagatagaaaatttcttctgttacatgtgatagaaaaatctaaataaaaggtaggggaaagactagaatgatgccatggctataggctccagaaggactgacaataaagtctgaaaaggctttaaaaaggatcaaaatacacaaacctaagttagattcaactaacatttccttagtgctcaccttgtgccagacattataagctctaatgtttgaaaggattataaacaaaagatgaaaagtagttgcagtacaactgaagattcatacaaagtgcagcacaggtctttaaaatattgtgaagactgaaacataagggtaacaaaaagtgaatctcaaaagacatacaaattgtgggactgctgaattataaagtagttctattttcaaatttttgaggaatcaccataggggttttcaataatggctgtaccagtttatattaccacca

SEQ ID NO: 61322 - DNA, 789 bp, Bovine  19866880822516
  misc_feature (1)..(1): n is a, c, g, or t
ntaaaagatgtcaatgaaaatccccaggagaccattttaggtaagatttttgtttaaactttaaaatgtatagaaagctaaagagtagcattttacatatctaaaatagcgccctagtttgggtacaactgcactggtaatattcattttgtgtaagagacattaacaagttaaacttactactagaaataaaatgtatgcttctatcagagtatatgggggcatatgtctctttggagattatttggagacataaacataggtaaaatcatcacaagttatttttcatgtttcaaatatatgttatttcaggtgagaagttattagacacatatctgaaacctgtggttctcaaagttttgtccttgtattaactgtgtgctgctgctgctaagtcacctcagttgtgtccaactctgtgcatccccatagacggcagcccaccaggctcccccatccctgggattctccaggcaagaacactggagtgggttgccatttccttctccaatgcatgaaagtgaaaagtgaaagtgaagtcgctcagtcatatccgactcttagtgatcccatggactgcagcctatcaggctcttccgtccatgggattttccaggcaagagtactggagtactggagtactggattggggtgccattgccttctccggtattaactgtataacttgttacaaaagcaaatttacaaagccccgccccagatctactaattagactaaaactccctggatctggggcagtaatctggactttaaccagctctccaagt

SEQ ID NO: 61323 - DNA, 1469 bp, Bovine  19866881351112
  misc_feature (1)..(1): n is a, c, g, or t
nttccttcccatgtctatatccatttgtgttatttatgtcagactttatatttaatagcattacatattggaaaagaatttttttgctatgttaagcaaaatgttggctacttttccagactctagcaccttaaatgtaagcatttgcatatccctttgagaataaaataaaatttcatccttaatattcttttatatagaacatgagtagtccgataaataagaaatttatattaaaaggtttcccttgttaaaatgttatactttttttccaggtattagtcttaaaattttgtgtattcttttgtttcttcaaaatagatgatccataattatatggaacacttagaaagaacaaaacttcatcagatctcagggagtgatcaactagaatccacagctcatagtagaattaggtaagcttttttatatacatttttgccttgggaaaaaggaaaataaaataatctgtttctgtttctctctgttctttaatcctcagacaatagtagctctctccctcctgtagttggaatgctataggagggggtagcatagaaaacaaaacaactttcactaatgaaaaggtaaattaatagccattgttttctgatacttaacaaagattgtataggtttaaaatttttgtcagaatgctgtaaatttttcatttcacctgtataattggtttaaaagtcatttttgctacagagagacatgtttgaaagggttagctagacttctgtttgatgtaggagtgtgaataaattatgtagatctccaagcattgtagccaatgagctaagccaggcctcttagtggggaggaaaatagttaataggctggcctctgctctggattgctgcataaatgctaggagcagcagctctatggttatgaggcggtgagagcaggatgacgtcagcgcttcggagctgcagcaggatggagtggaaagctgctgctgatggcattgtttttgtggcagcagctgaatgacagatcctcactacaaagatacccctctggcccctgtgtaggcctcctggttcgggtgtttcaccatgccagcacagcgccatgagtcctggatgcatgctgctgtttgtgtttggctttgttggcggggcggtggtcattaattctgctatcttagtatctctctccgtcttgctgcttgtgcacttctctatttctaccggagtgccagctttgacgcagaacctaccaaggatactcaggtacttcagtctctcttagaagtccttttttagttggtttttcttttatttttagctttatgggtgttctttgtaatcattcatgttgcagattgaaacaatggaaaatggcctgaagctaagacttctattcttatatatagtaatttatagactatcgcttagggatatgctttgtgtttggaaaccacccacttaaaaggattttcagattgtacttatacacaa

SEQ ID NO: 61324 - DNA, 772 bp, Bovine  19866881505860
  misc_feature (1)..(1): n is a, c, g, or t
nacttaaggaaaacaaaacatttgacctcgtacaatggtgttaagtaaaataagtttacatggtggtactatttagtgtcaggcaatgagctgcacattgttaaaacttttcaagtatttctgaaagacagtatgtcattccttcaatatttagttatttagcttccttctatcaccatatatttagccagatgctcaggaaacaaacatgaacaggacacttcacctgcatcagataaattccccagaaataatgccaacacatcctgaaagctagaatccttgaccgcctcaagaagttaaagacccatcacttgcaacccagagctccaaaaggctcaaagtcaaggttggggcaccgaggtaactcaagttaaaagctgaggtattataaagttaaaagctggccaagtgcagtctctgaaaagagttgccaactgtcacccacatctccttaacccgccccctaccacttccccgtcctttttataaatagtttttaaagggaactgtccaaggttaccacctgacaaggaagaatgcattgatgtggtataccaataaaataaaattgtatactctccatatttacagagtattcccatacgacatctaagtgtcgacaaagtaccaaccaaggcacataacacataaaataaaacttcctcagtagggttaaaatatcaagaaactgaccgaaagaggaagatatctaacttcccaaagcagcaacccccaggaaagggactggaaccagcggaagtaacatatc

SEQ ID NO: 61325 - DNA, 1890 bp, Bovine  19866881552242
  misc_feature (1)..(1): n is a, c, g, or t
ntgagttctggcctggtgtacagtgcattgtgtccaaagtaaccccaaaatgaaaactttagttgtttttttttttagtttccgtattgactgttaattgaatatatgacctattgtctgtctaaccttgtgcttctcagctctctaaaaatttttatgatcaaatgatgtatttacaaccatagaaacaatgttcatatcgggctgtatgtgttaaatgcgttatttttgatatcttgtccttttctaaggttctgctgaaaatgaagagaagtcagaagttcaggcaatcattgaatccactcctgagttggatatggacaaagatctcagtggatataaaggctcaaggtattgttcaagtctaattgggatatcttacttctttccttttcccatctcccctaagcacattgctgttcccccgtctctgaccagataaagtgcgttcagatgttttgctgaagaaatgttgatgttctatttaagttttctctttttgaagccagaccttttacataatttacatgttctgtgaactgttacctttgtagcatcagggactagaagcatgaagaaggatggggaaaaaagacagtgaaggagtattccataaaggaatagtccatggtttgtggaacttgggaaaacataaaagcaaaagtggggaaagtataatttgaaaaaacctattctttcctccaaatcaggaagaagagaatgtattcccttcaaaactgtaatggtttcattactgcaagaaattagtctcattttagtatcattttacatggggaggctgtttagtgattagaggagaatggttgtgtatcatcttaatgaaggtcgtctgaattggaattctccaggccagaatactggagtgggcagctgttcccttctccagggaatcttcccaacccagggatcacacccaggtctccctcattgcaggcgggttttttttaccatctgagctatcagggaaaccctaggataagactatatgcattctaatcctgacctggatttgaatctgaggtaagtttctacatccatgaaagaaaattatgataataccttagatgattgtaaggagtaaatgaatcaatatatgataaagcattggcagagtgcccagttcaataaaggttagctaacatttatatatgttaccatctgagcaaccagggaagtattttgttattaccatttaaccttaataccatttaaccttaaaaaccatttaaattaatacttaacttaatgtaccatatatgttacattatatgttaccatcatataattttatcttaattataaccttacgagacagatgtccttcccttcacatataaagaaactcagagttgtatactattttgtccagactaacaagaggtggaactagcattcagtctaagactttgatttcaaaggctgtgccctattgaaatatttttttattgtttatttaagaaattaaacaatgcagtgtataaaaagtgaaatttgcttttccatcctctcctaaacctacttattaacacttgtgcccacttatcattttgaacctctttttaaaaatcaaaaacatatttttattagagtaaagcatgtatacagtattacggttaaatggtaataaaaaaatacttccctggttgcttagatggtaaataatctttctgcagtgcaggagacctgggttcagaccctgggtcaggaagatcccctggagaagggaatggctacccattccagttttcttgcctggagaattccatggacagcgtagcctgacaggctatagtccattggatttcaaagaattgaacactactaagcaacttaacacatttttttttcaatgtatgtatgcagtattaa

SEQ ID NO: 61326 - DNA, 1555 bp, Bovine  19866881894218
  misc_feature (1)..(1): n is a, c, g, or t
ncagcaaaatatatttgaagtgaaaggatttaaaccttttagggcaaggaattcatttttttctcccaattatttatgcatcaaagttggaaagctttacaaagcctattcactattgttttgtcagatgttgccttttctttgtagacttgggtaacagatatccatgcctgcttgtggggatatcattaatctctgtagcgtttctgctggtcactgtacttgcatgctctaagaaccattttctatattttagaggtttaatgttgtggtttcttttgttttctaactcaccaagataaaaatttgatttgttgagatttctgcttcgtgtgtggtttttaaatggaggttcataatgtatagcttttattatgtaaatgtttacttaaaactcaactcctaattgtggacttaaaaagaaattaaagtagtaaatttcctcatcctcatgttcaacattaaagtccagaaattaaatttcatctgtggtcttaaaacttggtcatttatttatttttttcctgattttataaaaactgggagcaatctttttgctttgtgtacattttagtacataaaggatttgtgtgtatgtatatataggcttaggaaattgaaactcaagaacataagattaattttaaagggctgtcctaggtttcagttccatttatgaagccagtactatgctgtggataagaggttcagagttggactaccaggctacaaatgctctgccacacatgagctatgggacttttggcaaattacttaatctctgtacccgagtttcctcctttgaacttcttaccccattgagtcattttaaaaattcgtgagatgattatttgtatttaaacagttaaagatatattgtaaattaaacaagtaaataattttcataatcatttatatttactccatttttagtaaaactatatcagctctagctattttattcataaaataacatgattaaattcaaagagtttcttgacataaaagttgctgttgatctgactgaaggaagataccgaagtctttaatattaagattggcttcccaggtggtgctagtggtaaagcacccatctgccggtgcaggagacttagagagatgggtttgatccctgggtcagaaatacccctggaggagggtgtggcagtccagatctccagtgttttggctggggaatcccatggatggaggacactgataggctacagtccatagagttgcaaagattcaaacatgactgaagcgcagttggcaagaagcagtagttccaggaaatgtgcatgggtcttggagtcaaaaaaggcctgacttcgaatcccgtttcttccaagaactagtgcccgaagtctctgagcatcacttttcctaatctgaaaacaggaaaaataattcttatttccttgtgaggattaaatgagaatatgtcaataaatcatccatttcagtgcttgccacattggtgggtgttgaacaaatgtaatctttttactgctctttatatatatgtatagtagattttattaatgattattta

SEQ ID NO: 61327 - DNA, 700 bp, Bovine  19866881923256
  misc_feature (1)..(1): n is a, c, g, or t
ntgttagatggcatgcgcttttgggtggtttgcaatacctgtggaaattgcatggtcactgcactgggcctttggtattttttaaatatgatgagaaatggcctggttcaatttgcttttcatccaatgctgagaccacctccctctaagattttagttgaggattgtttgggaatggaaattcattgtattgttagttttcctgtctaaaatgccatggctggattcagttctaatgttctgtgattttatactgatcagtcaagggcaataggggaaagctggtgcaaagctgaagcacttagagtccctgtctttccttccttttggtaagttgagggaattagattgtaatagaacaagtgagctgagagcacacgttttaaatggccggatgggtgagtggaaaataactaaattgctggttcttaaatagtttggggatgaaatttctttctctatctcatgggctaggcttctgaagaccttctcaaggagcactatattgacctgaaggaccgtccattctttgctggcctggtgaaatacatgcactcagggccagtggttgccatggtgagtgtacatggtttgggatgttgataccaaatggctcagttgggagcaaagagtgaatggttgtgattcctgctcctaatggcaggtcttcattgatgcaaggatgctgagcctggggcat

SEQ ID NO: 61328 - DNA, 926 bp, Bovine  19866881758197
  misc_feature (1)..(1): n is a, c, g, or t
natggagaagagagccagagtagatattattttttattaaatatatgttaatggaaaatcctattaaataaaaaaaaggaaagaaagaaaaaactcatggaaaaagagattagctttgagggtaccagaaatgaggattaaggaaagggggaattaggtgaagataatcaaaatatatatgaacttccatttataaggtaataccaggattgtaatgtacaacatgataaatataattaacactgatttaagttatttatgaaaattgttaaaagagtaaatcctaagagttctcatctcaagaaaaaacttttttatatttttttacaattttgtgtctataggtgataatggatatgcaccaaacttattgtgctaatcatttcatgatgtatgtaagtcaaatcattatgctgtttacattaaatttatccagttctctttgtcaattacatcttgatagaattggaagaataaaatagtatcacttttgtgagaagttattcttagcaaaactaaggtagtaactcattatgggtatacagataaaaattataaaataaaattgtttttattatggtttaaaaataaagtaaaataaaaataaaatagattcctaagaaagctttagttttgctttagttttaacaccaggcctttagtaatgatttctcttttaaaagatgtatatttggaaatcatctgttagttactactcctgtggtgatttagattattaaaaacttgttcaacattactttttcctgttttgcaaactctcaaaaagagacttaactgcaggtgatttgagacaattaaatgctaaatatctttttatctccatagaaagagatgtttttagcactaaagatagtaaaacacagccattgccagataacagataaaacattttgcatctgatttct

SEQ ID NO: 61329 - DNA, 1514 bp, Bovine  19866880367270
  misc_feature (1)..(1): n is a, c, g, or t
ncggtgacacagcctgcacttctttactagaaaggggtagagtcgttttcaccaagtcacctttgtctcactgtctctggacacacacagctttgactctgggctgtttgcttggcagcacgcctgcttgggatgccccttccatgtcaagtggccaagcctggaggcaggtgacagcacacaggtaggacgtcacactcttgggagacacagtgacaatagagggaccaccagaccatgggggcaaagacaggggtggggtcggacccagacagatcttctgtccactgtcctcccacacacggccctgaaacacagacatgcttctctctagctttcttctccttagggtcagtccctcatgcttggctgaagcctgaacacctgctggtacatgttggctcaacccctgctggctgcctcccggtcagtgtagacccctggtcacaagtgggccccacaccatgcctgcatccaccactctggtcccacggcctctttgctgccctctggttaattgttaggctgaagggactcccccaaaaaacttcccatcaccccaacgagagtctgagactttctgtttaactgcctcactgtgggctggcccaccctctgaccctgggatccatcccactgatacccagaacccaaggactagagtttcaaatgtcctttctagataggtgtagttcattctctaaagaggtgaggctttgtatctggaaacaaagctttcaacataactgaaggtcatgccccctgagggctcctactagcccgatacttcttttcaacaaatgcctccaccctctcctacctgtccccatgcaggacatggagtatggcagaattgctctctgctgcctgggagcttacagtacatgggggagacagacaaggagcagagtaatcacgtgatcaaagcacttgatgaaagaaggcctgggagctaggggagcagagacagaacacagcatgcacaatcgagtttgagctggaacgtaaacaggggagtcacaaagcaggaaaggatgactgaggacagaaactggctctgagaggccaggctgagggtttctgctttcttccatagggtaagaggagaagacacaggagcctagatagagatgccagtgaggagtctccaacaggcagggtggggactggccaaaaggtgggaaaccagcaaagatactgtgcagtggttgagagtgaccccaacgataagaacctgaaaatggatgacagactgactctgggggtaaatgaaggggaagatgtgaccactgaggaaagggaccagggacgtggtgacgattcaaatgcatcatagtgtcagtacttgcctgcttcggagggtccttgagagcattttccacagtgtcttctggagagactggatctggtgaaatagggtccacctgaaacacctttgttacaatggcactctctctgcagtctctgaaaattattccaaacaggaaaagtcttgtgtgtcacacaaaggttca

SEQ ID NO: 61330 - DNA, 1530 bp, Bovine  19866880486157
  misc_feature (1)..(1): n is a, c, g, or t
nagctctgtagccaggggtgaccttttcattctccacgagcaggtctttcttttccctgggactttgcacatgtgaatttcctttgtggaacatgtgtgtctttgcagcctctatcctcccctacacccccagcacctttttacacctgtcaattctaagcatccttcaggccccagtgcccccactttttccagctctcctgtcttcctagtgtagattggcatctcttttatgtgccctcatgttgccctactgagcacatcacattccactccaggggtcttcatgtctcccagagcttcagcatctcctggggaacttcagaaaatgccctacatctagaggttgattaactgtgtgtgggacaagcccagggatattaaaacaaacagcttcttgggtggttctgatacacaggatggagagcagctgtggtgctgttacctgcttgcccgccctatgcccctcgcagcagctataagcctctgagggcgctcagcgcatctgccctgggcatcctgttcccagttcctagccaaatggcacagtgggagctcagatatttcttaaagggtatgtaaggagacctcttgtaggagtcaggaatgttaacagttggaacagccagtgaggataaccgtacctgtcttctcaatgtcttctgaaagtcagggaaccacggatctatcttactgggcatgcacttgatagtagaagaataaccttccgacttgggttggctgaaagaaaaatggaagacggcctgggaaacttggaaaatggttggtaaactgattaaacctttggttactttgttctaatgatgtatctttttgttttcctcctaggtcagctgagggaacagctcagttaccttaagggcgataatttttttaggtttacctgttctgattgctcagaagatggcaaggagcagtatgagaggctgaagctgacatggcagcaagtgagtaaaacctctagagtttgtgaggttggtctgccccagatttattggagtaagtgtctagagaatgaggaacttaacgtatgagcttttgagttgttttgagggtcactttttcacaatgaaaatcatacagaatatgtggagaaaagagttcttagtaaaattactcactgccaacttagcacactgggtttgagattcttgaaaatctcacccacacagtttcatttatatataataccaaatttctgattttaatcaaagaggttcacatttttctggcagctgtttttagaaaaaaccattctaaaaaatgtgaagatggtgaatcactacactacagctgaaaacaatacaattctgaaagcaactgtgcttcaatttaaaaaaagtgaagttggccaacctaaccctgcccaactattgcctgaatagtatcttataactgatctccaggttgtgttaattttggggggtttgtttttatattaatatgtttatagcaaggcatcaatggtatatgcagccttttaagttctaaaaattagaattaacatca

SEQ ID NO: 61331 - DNA, 1193 bp, Bovine  19866880556171
  misc_feature (1)..(1): n is a, c, g, or t
naaacttgacttgaagtgtgtgtgaagtattgatgaaagagacagcattcaatgtgtgtgttgatggagaacagcttagtgaaatcttttttactcactgtccttttaaacttgatcagaaaaaggacaatggctcatatattctaaataatgtctttagagccccttgtgtctgcgtagaggtgtccaaggattggagttgttcctgagaaccctgaccctgtgagccgggagggatggagggtagcatccacctgagcggtttgattagtcggcacgacgatgaagccacgagaacatcaacctcggagggactggaggagggggaggtggagggggagaccctgttgatcgtggagtcggaggaccaggcatctgtggacttgtctcacgaccatagcggggactccctcaacagtgacgaaggggatgtgtcgtggatggaggagcagctgtcctacttctgcgacaagtgccagaagtggatcccagccagtaaggagcttctcctttcctttgctctgtcagttcctgtgggaagatgtgttttcctaacctgtgaaagaaacaggaatgtgaagtagatctaaataaaaagataactctttgatttattactagtttagttgcttaactgcaggcttatataaaacatagacacatttgtcctaataaatatgactgccaacctctgtcactttgttaaattaacgttcttgattgccacccagtaaaaattagaaattctgtgtgacttaaagaatcagctgcatttttctatcagggtcacattattgtggatttgcaaccaaattctaggcccagcatagagctgaagttcagacttacaactcaggtaatatttaacctacatggaaaacagctgcgatagtttgctgatataaggaattagcagattagaaatgtgttgtgcctgtttctagtgttttcttcttgctggcttccttgatctgctggtagatctgctagtagatgcacacacacaccccaggaggtcctttgccaggcatcagggcagttaccgaagcagggctttcccgttagatggagactggtaaagacacatgtattggaggagtactctgtgtactggaacctgtaaccaagtcagagaaatttagatatatgtgtgtatgtgtatttttttgttgtgaactgggtcattttctggt

SEQ ID NO: 61332 - DNA, 1192 bp, Bovine  19866880596619
  misc_feature (1)..(1): n is a, c, g, or t
ntctttgaaggccctgtctcagaatacagtagcattctctactgatggaataattctagaatgtagatgtatacacagttggttttcaaaagttcagttcatcagtgaatgcaagtgttcaggcagatgcagtgaggtctggacctggttcctcagactatgatgtgatcctgcattccgccagctgagtagaaccagcggtgctgaagcaagttgttcagtgttgacatctccttacgagaggtactatgagaagaaaacttttatattgattcctggtgccatttttattttggttaattatggaaattaacaagactcaaactgatccgtggcaccagtcattgggggacctagaccgtgtgtgtgctgtctactgctgaaagcctcccgaaagtgaaagtgaaagaaagtgttagtcactcagttgtgtccagctcttctgcaggttcctctgtccatggatattctccagacaagaatgctagagtgggttgccatttcttcctccaggggctcttcccgacccaggggtcaaacctgtgtatgctgcattggcaggcagattcttccctgtctgagccaccagggaagccctgccttgtgggaattctggtccagagtaggcctctaataagtatttgtgcgtgagtcgggaccctccaggttcaggtgtctcacatgtggtatctaaccactccactgtgttgcctcctacaccagggtcttccaggctcagggacagctctcttcttccaccccatcctcccagggagacagggaaagagaaagacgtttccatgtgggtcctctggttagagctctcttggtcacagacaatccctttggaccctgtttgtgtcactgggtggctgtgcattaggaggtcgttgtagtgggtcctctgcaggaagtcttgctgggtggccctgaagatgtaaacattttgaagaacagggactggagtcttaaccatcagaccaggcagaactgctttggcggctccacgtctcagttctgactcagactcttctctctgccacagaaccaaagccagaactccacctctgtcctttctgccctccggatctctgcagtcagaaattccacatgcagcaggtgctgtgtagtcccccaccctggatcttcacgtgcctgtatgccgaagatcccgtccagccaggagacctgt

SEQ ID NO: 61333 - DNA, 2976 bp, Bovine  19866880617309
  misc_feature (1)..(1): n is a, c, g, or t
ntggattgaaaatagccctcatttgccatatattttcacaagatggtaacagagcttcttctttctattccagtttctttcaacctggagtcagatgtcacgtggctacccgctccccgcccgccgccaaccctccacctcacttgtacaccccctatctactctttccttggtgaagccatatccaaaagagaagtctaatcttttctttcatctacttggatattaaggtcagacatttccaggctccagtttccctgggtcttttccaagatgtttcctcctgttctgagtctttccttagacaccctgttctctccagggctgcagagggaagaaggagatgaggggggaggggattcatcctgctctttgggccccacccagctctgtccacctctcaacactgtcccttcaattctcaaaacaagggtccagagatcttaggcaagtttttacattaatcatggactggcccaactggactaggagcaaccgtaaccttcactgaactagctactgtacttgggaaaacagggtccacatttttgcttctggtccaaattcaacatttacctgtcactgtccagagcaaaaatccagcatctgcgtctcaaccaaagacaaagccaagttcacagaattctgctgagctctttggagctagtgaggtggttcacatgagctacaaggtcagaggacccccaagtctttgctctttttaccgattatccctttggcgtagagctcagagtttacagggcaggcctctcgagccaggaggccagggtctgtccctccagctcctgctcagcagcatcactgcagctggtgaccttttgttgatctgccagcagctaatttgtcaacaagcccgtgactcctctctctggttcatcattacctggaggcaagtctccatcagaaaataaatcagagcagggaaaacaggttccagacatttccttaatactctttgttaaagtattaaggaatatgttaaagcaccataaagaatctacctgcagtgcaggagatgtgtgttcgatcccctgggtcgggaagatctggaggcagaaatagcaacccactccagtattcttacctgggaaatcccacggacagagaagcctggtgggctacagtctatggggtcgaaaagagttggacacggctgagcatcagaagaccagaggtctagaactggctctgggccccttaagaagcttaaggaggagtcactttaagagttaaaattatgattaaaaaaattaaaatcattatctatagattcaatgatctaagaactgtccaatagagactcaaatgcaaatcacttggactttcccagaagtcctgtggttatgattctgttcttccactgcagggggtgagggttcaacccctggtcagggaactaagatcccacatgctgcatggtacagaaaaaaaaaaaaattcaagtcactttgtagttttatagttcacgattttttttggtgggagggctgtaccgcctagcttgcgggatcccagggattttcggcctctcctttagcagtcactagaggtctataaaaatcttgctcctctttcaggactcaaccaagaggacacctcctccgagaagcctccctgatgccactttctcttctgtctggcacacccgctggctttcttggggagtccagggtttgggttctttctctctatgtgggctgaggtctctggaagcacagaggtaagtcttcaggcctcaggaaaactctgccaactatttcaacatttaccacctctaatagctcatatttactaaatgcttacagagtgcaaagcactttatacaccattactgccctgaaatctcacagccatcacttaggtgatatgtattaaaaccccatgcgtactttagagatggacaaactaaagcaaaaaaaaaagtaatttggacaagcctgcacagacagctagctcagatctggatttcttaaccactatgtgactgattcaacttgcaaactcttccctgagagtggtcagtccctcatatttccactaacggagaattaactcagtcacagatgaggcagctccatgtttactccaactgaccataccagcagcccacaatgctccccgagcccccttcactttgtctaaaaggccaggatccaggatcagggagtggccagagaacccaccaggcaaggagctgcagaagaaataggccatgccctcaacgacatgctcagaaaaagatgcaaagctgaggaactctcccggacagccaacgacaaatgattgggcaaccagtccccagtttcttaacctcttggggtagttgcgtgttagaccagctttgtagccacttgttgggcccactgatagctggggctgccccatcaaccacagaatccctccaactttcataggaccacctaccacctacaggacccttcaccctatttaggaccctccacaattacacaggactcccaccacctataggacccttcaccctatttaggaccctccacaattaccctcggagaaggcaatagcaccctactccagtactcttgcctggaaaatcccatgggcagaggaccctgatgggccgcagtccatggggtggctgagagtcagacacgactgagcgacttcactttcacttctcacttttatgcactggagaaagaaatggtaacccactccagtgttcttgcctggagaatcccagggacgggggagcgtggtgggctgccgtctatggggtcgcacagagtcggacacgactgaagcgacttagcagcagcagcagcaacaattaccctaccaccggccactccctaagtattcttcctgcctcaacccaaggtgtcagcctggccacacagaggtcaaacttttacaggttctctcgtgttcaggactgaaatgaaagtattaaagccaaaccccagagaacatcct

SEQ ID NO: 61334 - DNA, 822 bp, Bovine  19866880785846
  misc_feature (1)..(1): n is a, c, g, or t
nccaaaaggtaaggccagaaagcaagagggctgctccaagttgccagcagccaggacccgggtcctaagagatgcaggcttacccagtgagaccaggttgctgtagttctccagcatcacctccccggacagggacctctgagcagggctcagcagcacccactcatcctgggtgaaatccacagccaacatctctgaatgccatgtgtgcctgtaacacaaaacagccctgttcacccgggagccagccctgcccaggcctcagggtaaggggcaagggggaggcggcccaggggaggcagatgagatcctgcctttcaccctggtgctctgtattccaagatctttaaagccctgtcaccacctgggcagtggcacttgtcaacacgttcaaggtcctagctgggctgatgtggagaatacatacaaaaatagcctgtaactttcaggagctttatgttgagggaaagcgccagactttttaagaatttaaaagaatagtctgaaccacggtattagtgttgaagcatccgaatgactgaggttcacacaattcagttatggcaaagaccaaacacaactcagtccctccctgaatcccacagcccctccggccctccttccctgagaggcaccaaccagcagggaatggtcaagagcacgaatttgaaccctactgccctggtttggagcccatcccagccatcagctagcaactccgctttttcaactgtgggtagcagtccactaaacgtcctgtcccacactgtggtgctcagggtggacgtcccctgccattcagtccagaattcatctcacatg

SEQ ID NO: 61335 - DNA, 1077 bp, Bovine  19866880792400
  misc_feature (1)..(1): n is a, c, g, or t
nttatccattcatttgttgaggggcacttaggttgtttccacgtcttggctgttgtgaataaagctacagtgaacacgggtgtggagatagcttcctgagatcctgttttcattttctttggataaatacggatagtgggattcctggatcatacggaaggtctgtctttaagttttcaaggaacctccaccttgttctccacagtggctgcaccaatctacattcccaccaacagtgcatgagggtgcccttttctccacaccttctccatcatttgttacctcttgtcttgttgataatagacattctgacaggtgtgaggtgatttctcctaccttgttcaattgctaggtcatgtctgactctttgtgaccccaaggactgcagcatgccagcctcatctgtcctccactatctcctagagttagttcaaactcatatcctttgagttggtgatgctatctaaccatctaatcctctgctacccacttctccttttgccttcaatctttcccagcatcagggtcttttccaatgagttggctctcctaacctgtgtggtggcaatttgcacttttctgatgattggtggtgctgggcatcttcccttgtgtctctcagcccttcgtatgtcttctttggaaaaatgcctattcagttcctttgcatgttttttgaatcatttgggggtttttttgccattgggttgtatgggatgacttttaatggcctcataggtgggaggctctggcttggccttgacccacagttctgtgtctgcccctcgcccctgcaggcattcgcccctataagtgtgacgtctgccacaaagccttcacccagcgctgctccttggagtcccacctgaagaagatccacggggtgcagcagcagtacgcctataagcagcgccgggataagctgtatgtctgcgaggactgcggctacacgggccccacccaggaggacctgtacctgcacgtgaacggtgcccacccgggcagcgcgttcctcaaaaagacatccaagaaactggcagctctcttgcaaaacaagatgacgtcctcgctccaggg

SEQ ID NO: 61336 - DNA, 1439 bp, Bovine  19866880829018
  misc_feature (1)..(1): n is a, c, g, or t
ntcttgaaattcttggtcctggtgactttctcctcggtgtcaggagcgccctggctgtagtcgctcactggaatgacaggagtccaggaccaagtgacgccccctgcaacctcccttgtggaacagccactctccctccccgcgtgcccccttggaagtcaggaggaggaaaaggcttttatagaaatttctatttgatgaaacctggcagaaaggactcttggggctggccctctgagtccagaactagaggatggatgagaaggaggggaaaaaaagaagctacagttttcagaccccaaactgtaccccctgccccaatctatctgcaaaggtctcacacttgacttctgggaggccagaggaggtaacacggcctgaaggtgaaagcgctggccgggtgtggctggccagcaaatggtaagcatttctctgccatccttgtggagtcactgtgtgtgtttggtccactgtccttttttattttcattaaaaaaattttttttgatgggcaccgtttttaaagtctttgttgaatttgttacaacactgtggcctctgttctatgctttggttttctggcttcgaggcacataggatcttagcttctcgaccagggatcgaacccttaccgcctgcactggaagaagtcgtaaccaccgggaccaccagggaagtctcctggtttttctttttttaattattatttttcttccagttttgttgagatgtaattgacatccagcactgcctaactttcaggtgtgcagcatgatgacttacgccatgaaatagtgatcacaagaagcttggtggacagtgtcatctcgtacagaaacaaaactaaagaggtaggcaaaatactgttcctcgtgatgagaactcataggatttgtcctcttaacaatgtccatatttaatgggtcaatgttttaacggtcccagaaaggggacaactcacccaagctggacccgctgccgaatagcccgttcccgccctcaagtgatgctgctcaggaagtggtcactgaaattcatcgccttgttcaggtaaaagttctggccaatgaaaaaattcacgcacagtgaacaacgccacgtcccagcacaaagaacggtctccctgctcacctgcccctgtctctgttaatgacggatggtcaagcctgaagcctggccgtcctggacatctccctgacctcacggtgttgctttgtccattctgcctcttaaacgccgccttggtctggcccctgctctctcacgaggaacatggcaacagcctccaaatgggttcctgccagcccactttccctcagctgccccagcccctctatacaacgtgtatgtaactgtgccctcccaagtcttggaattaggtcggcctgacgggcaggctcaggctgcagagcttgaatcctggtgctgtcacttactac

SEQ ID NO: 61337 - DNA, 1934 bp, Bovine  19866880830702
  misc_feature (1)..(1): n is a, c, g, or t
nctcgagatttctgtaccacccctgattccctacctttataggtgggtgaatgagagaggcagttgaggccacagatttgtaaagcagcagagttttattagaacaaaaggccccaaacacgacaacttgaggtagaggaagtaaactgagttcaaatgaccagttaaggaatgtgttttcaagaagagcgtaaaatgttttgatttagtctgtgctcttggatggagaacgcaatggcaccccactccagtactcttgcctggaaaatcccatggacagaggagcctggtaggctgcagaccatggggtcgtgaaaagtcggacatgactgagcgacttcactttcacttttccctttcatgcactgaagaaggaaatggcaacctactccagtgttcttgtctggggaatcccagggacgggggagcctggtgggccgccgtctatggggtcgcacagagttggacacgactgaagtgacttagcagcagcagcgctcttggagcgggtgagggggtcagtaaggatgctccggcggggcctcgggtcagactgaaatggtgttctgtggccggcacacattcctcctatgtctgttgaggtgggacttctggatgaagccttgcccgcaccccttgcacatgtgcggcgtcctcccctggtgtgtcatctggtggaggatgaggtgtttcttgtgggaaaagccttggccacactctgtgcacagaaaggagttctcttccaagtgtgaccacttgtgcatgagcagggcggacttgttgccgaagcctcgcccgcaccgccggcagttgaagggctgctcccttgtgtgcgtgctgcagtgccggatgagagccgactggtggcggaagccccgcccacactccctgcacacatacggcttctccccagagtgcgtcctctggtgttccacgaggttggacttctggctgaagcctcgcccacattccacacacaccaggggcttctcccccgagtgcgtcctctggtgtcggatgaggttggactgctggctgaagacacgcccgcagtccttgcacacgatgggcttgtgcccggagtgcgtgttctggtgcctattgagatgggactttagactgaagccccgcccacacaccccacacacgtaaggcttctccccagtgtgtgtgcgcctgtgcgagatgagggttgaattctggctgaatctgtgtccgcacacgccacacacgtaaggcttctccttcgagtgtgtcctctggtggttgacgagtgtggacctctgccggaagcagcgcccacactccttgcaggcatacggcttctcccctgagtgtgtcctctggtgcgagatgaggttcgacctgtcgctgaagcccagcccgcagtcgccgcacacgatggtcttctcctccaggtgtgtccttcggtgcctgacgacggctgacttctggctgaagcctttcccgcactcctggcacacgtagggcttctccccagagtgtgtcctctggtggatgatgaggttcgacttctggctgaagcctcgcccgcactcaccgcacatgtacggcttctcgccggagtgtgtcctctcgtgtatgatgagcgtcgacttccggttaaagccccgcccacactccccgcacacgaggggcttctccccggagtgcgctttctggtgtctggccaggctcttctttagactgaagcccttcccacacaccccacacacgtagggcttctccccggagtggatcctctggtgactgagcaggttcgtcatcttgctgaaacccagtccacactctccacagttgacagtcccaaaccccaggacttcgatcctcttcaacagcctgtctgtttcctcaggggtccccatttgtgcagggccggcctctatctccatacctgggaccccacccccaga

SEQ ID NO: 61338 - DNA, 2349 bp, Bovine  19866880859354
  misc_feature (1)..(1): n is a, c, g, or t
ngtgacgggagcgggtggtctgtgtcctactgcagaaccttgcctctcacatgatgctccactctgtgctgttactcgtttgcattgtgtcacatctgtttcccccccagcaggtctgggccttcttgctgtttctggccctgttccctcaaacagtgcccagcaagcagacgctcagctgacggtgtaggtagttcccttactgagcagagactgggaaggggctcctgcctttaaagaaggcacatggttattagcagcggcctgagaaaaattcagctggccttgagttggtacagatttcggcgtaaagtgatttcttcattttccagacaacccattgcagcttgtgaacactacgcctaccacgattctgcaggtccacatcagaaagcattcttgtagcttcaacaggtgtggcttacaggttatgggacctggcaagatttctctgacaaacaattcatgtgacatcctgagagactgagtaggacaagaggccacacaaaacaataatcctttgtcatccagcctcacaaatgaggaaacccaaccctaacaggctattcagccagctctgtccttactctaggccttagaagcctgcagggtgacgttctaatagggcagcagggatgtgcctgtgaaccctgaggactgggggtggggctggttgacagcttccaccttcccatagggatttactgagcacctaccatatgccagacactcccccaggctggggattcggtgtcagaataacaaagtcccacctaatggagtttacatttgagtggcaggagacagacaagaaatgaataggatgtcagatgataaaaagtgctatagataataaggggcatcacagatataaagggagtaagattcagtgaggtgaggtgaggtttgctgtttcacagggagtgattccagaaggcctcactggaaggtgacgtggagcagagacttaagagagaagaaggccacacaggttgtctcgggactaagtccaggtaggacgatggccagcacgggcctgaggaaggcgtgtgctcagagtgttcaaggactgcggtgaggtctataagccaggcagggggcagctatggggagatggcagagatgacatgggtggtgggtggtgttcaaggccgagatattcttctgggggggtcaggagctgctggggtttggaggcactcttgttttaaaaggatcactgtatccgtgtctgagtgaattacatttctttaatccactaaccaaaccaggaaggaattaggacagatcatattaccacttctgagggcagcactgtttcctctgcagtggaaacttaagacatgcaccagctatttcccaggcaagcacggctgcagcctctggcaggggcgggggaaggggtgacattcaacagggaccgaacctcatggctgcgatggccccagagctgtggccaatgatgatggtctcctcgtcacagtgcagctccatctccatgaagggcagccagatgctctctcgggctgtgactgcggttcaggggaaaggaagagtctgtcactcaacaggggcagtcttagctcagtcctgcccacccttctaacacaggattgctcagtaaactacaggaccccaacaggggatggggcttttttcatggagccaaagtttcctgtgttgctgttggaaagactcaaatctgtagtttgggtaaataattttgtttttatttttttaccatgttcttgtaaggaaatactaaagaaaaaatacaactctgaagttttaatgtaaacttttcaactgaaaaacagaaatcctgttgacaacattgtctctcaagttgacgtccacatatactctttctttccaagaaggaaattcctgagacaagtcacagacatgctcagaacaaaagtggcaaagttacattttctattattaggatctcatagagatgctataacttttgtcatatctctgcctgaaatgaaaaacccatgaattctgcctgaaaatatttgattatagaagggaaaatcaagttgcttacaaagttgaaaattaagttttaccaaccctgggtgctcttcttgctcctcctagaactttctatcacatcttttggtttgtagcctcctcccctcaaatacttgccatcattcatcctgaggtatgtatccccttcggcttctctaccagaaaatggcaagattgaaacccaacaagagtgggctttttaaagatacatttaaaaaacttacttgggtcaggcatgtttttagacaaacactggaaaccaggtatctacaatatgagggggaaagaaaaaactattataaggca

SEQ ID NO: 61339 - DNA, 1433 bp, Bovine  19866881116427
  misc_feature (1)..(1): n is a, c, g, or t
nctgatcgtccggcaggcaaaaagggaccgggggctaccactctttgacctggatcaggtcgtgaacgctgcgctcctgttagtggacggaatttacggggccaaagatggaggagtttccaggcttccagctggacaggccacatacaggacgacctgtcaggactttagaatccttgaccggtaccaggtgggtgttgtctcactcttcaactcctgggactgcggctccctggtgcgttctggagagtggaagaacagtgaagggagaagtgcaaagacgactgggctgtgtttattttaattgtccagcgtgaacattcctgaatacatctgagtttgggtttctgttttccttttgggtattctagacagaacctagacattctctgcatatctcttagtctccgagggtggctactcatgttctgggttgtagctttgactggcaggtttgtggaggatgtacagtgtgccagtgtaccagacgctgagctgagcaggagtgaaggtgtggtttcatttgtgtagttaggagacaccctgcaggaagagcagcgagtcggcatggtgtccgcctggccggaggacactagtgtgtgagcgctccagggacaggtgattgcaccacaagtgccagaactccaccctcccatggcaggagccagccagtctctccctgtgtcttgctggcattgctgctaaccattccttaactaattttgctattctgatggctataaaatgaagtcgtgtttttttgtttgttttttggatgcatttctttgattacaggtgaagttagaacattctcctgtttcctggttgtttgtgctttgcttgtctggactgtttgcatgtttcctgtcttcttctgtggtgggctggtcttctacctgtcttctctggacactggtggggtgtggactttgctgctggtattttggttacccagcactgcgctgcatgtggggctgttcttcccggtgctgggcctttccctatgggcctttctatttgaaatgctctttcttgagttctggaatttcctggcatctatttctgtctgttcggagcactcctgttatttggctgttggaccctcttaaccagaggtgtgcaagccttttctctgaggggtcagagagtaagtagctgtaacttcgctacccagctctgctgtgtggtgtgagggcagcatacacgactgatgaaaggcgtcactgtgcgccagaaacagcatgtacgaaagcaggctggattcggtctctgggttctgtagtttccaaagaccttcactccagctggatccctgtaattcttttcctgtttctccttcctgggaagccgtaacctgcctgcctgcatcttaggaaccttgtgaggagagccaggggctgaccatgcagttgttaaacttcccctgagtctcc

SEQ ID NO: 61340 - DNA, 1513 bp, Bovine  19866881193039
  misc_feature (1)..(1): n is a, c, g, or t
ngagccctgttgccagaaacgagaaatgaggcccaagctgatcagtgcaaactccgcccacgcaggctcccactgggtccctgactcacctctattcagttgttcctccagtgtcaacgtcccgcagcttcctctcctatttgtctctcttcctacaatcttggcaatcggcacatactctcctgaattcactgactcattttactaacactttctagttttactaactgataacttgctctcttctaaaatgggagattcatcctttctgtcaggcggcagccatcagggtgagccgacatgggcgcctacaagtacatccaggagctgtggaggaagcagtcggacgtgctgcgggtgcgctgctggcagtaccgtcagctctcagcgctgcaccgcgccccgcgccccgcgccccacacccaacccggcccgacaaggcgtgcaggctaggctacaaggccaagtaaggctatgtcatatactggatccgtgtacaccgcggtggccgcaaacgcccagttcctaagggtgccacctacggcaagcctgtccaccatggtgtcaaccctctcaagtttgcccgaagcttgccgtcagttgcggaggggcgcgctggctgccactgtggggccctgagggtcctgaattcctactgggttggtgaagagtctacatacaaattcttagagtttatcctcattgatccattccataaagctatcagaagaaaccctgacactcagtggatcaccaaaccagtccacaagcacagggagatgcgggggctgaggtctgcaggcagaaagagccacggcctgggcaagggccacaagtccaccacactattggtggctctcgccctgcagcttggagaaggcgcgatactctccagctccaccgctaccactaatgtaagtaatgttggtaaagttcttacctaataaacaatttaggacgttcttgtctgcttaaaagtgttttttgtttttttttaaatttgtctgttaaaactagttgccttcagattgcttcattgaatgcattgtcaaattatgaaagttaaagtgcaataatgtttgaacttattgaagttacttatacttacacatataagtgtatatgaagtgatggtatatcttgtttttaataagggaaatgcctttgtttttgctttattagggaattgatatgtctgtgtttaaaatgctgtttagtacaagaggtgtaaaattctgtaaaaaaggagtacataaacttacccctgtagatttgttgatgcatgtggtgagacctgcagctttactggggtgatgcaacgctttgcagttttatggagtttggcagggacaatgttttcagttggattttccttggaaatgtgaatggtgtcctgatcctttctcatgatcatatgcagaaaaataatgaagtttttgactagggcccacatttaggcttaatctaatattacatttgtgtaactgctgcttcgaaaggcaaaaagtattaa

SEQ ID NO: 61341 - DNA, 1927 bp, Bovine  19866881564954
  misc_feature (1)..(1): n is a, c, g, or t
ntttttgctgtatggaggagtggggtggcactcgtctgtgacctgaatcgggcagcctggaagaactggcctgcttattcactcactgtgggtgggccacagggaccaacctctagggcagagggacagtgtgccctgcatctgccactcacctgtgcccacactgctcagctctcctggttctggaccagcatccacttcagtgtgtcatgaggaattagaatcacgaacacaggtgctctcacttcttgcaggaaaccaaaagccatggagtgtaggggggcagatttgcttttggaatgatactctgagtaggcagggcgagcagatggcagttcacttagagaagcacacagagccctgaggttggagtggttggaagattagtttcgcatgatgactggcagcacaacccctggagccaaagcctgaatacctgtctatgcctcgaatccctgaattcagtatgacctcaaagaccagggggacagaatatgtgggaaggtttagcagcctacttggcctgaaggatacttaatgctggtactcaatgaacctgctttctattattacaatcataatagatctgcccctttgttctgatatgggcttcccttgtggtcacctggtaaagagtctgcctgcaatgcgggagatctgggtttgatccctgggttgggaagatccctggagaagggaaaggctacccactccagtattctggcctggagaattccatggacgtacagtccacggggtcacagagagtcagacatgactgagcgactttcaatttcacctttgttctgatgtgccatgggccccttaaggatttctggggccagcccacatttgcagaatgaccagaccccactatgggtagcttgaggatctttttgctaaagctttcattgattcaggctgcacctaatcaacttaggtaggcactcggagtttttaaatagccaaacagacctttaataacacttttgtagatcacatccagggtcatgtgccactgtgacacaaacctccatttgctctcctgtgaaatgggtgcacatcctccaggttctaggaaggagaagcctgtggttaacaggaatagatccttgcataagggtaagacttagaggtcccaggaagatggccccgggtgattcctctcctctctgggtttgccccagactctcctgctcctgacttcctcggtgaatcagccgggcgattcaccaggttcagtctgggagcaggcgtgaagggtcctgcccgtcttctcagacacacaagatcgcagattttcttctctcggtcttggtgtctgccacagatcccgggtacaggctgtagactgtgggagagtggattcccgccatccccgccttctccccatggggcacagggcaggcattcatcaccgagaacaccctctgcgcgtttgttcagtgggtgtagcggtagacacgtttcgccccagcaacttctttagtattgtcactctcatctcaagaaagtctcatcaagctgttccatttactccaaagcagcgaaacgaaacgctgctgtgaccagggctcggcctgctcttgatttcaaaaggcctcgggcggcccctcccgatatcgtctgggctcaggatgtccctccatggtcatgcccagattcttgatggatttattaagtttcatgggagaaagcttttctctgttgtttgtttagcaaatcctcctgttgggagatgattgtaagaagcacagggagaagaaatccagtcacctgtggttccagaggccccaggggccaggtggggaaaacacggactggactggggtgagacgtttgcctaaaggtctgcactccttgagggcaacgctgaccacccctcagggagtctcaggcacccgtgccgccaggtcaggcagcaggg

SEQ ID NO: 61342 - DNA, 990 bp, Bovine  19866881899721
  misc_feature (1)..(1): n is a, c, g, or t
nattgtttcaggacgagactagacacagagcagaggcctggtccttgccaacgccagttcacagatgtggggaggctggggctggctcagaacccaagctccactgctcgtgccacaccccagtgtcacagctgtcctctgtgtacctgatgtagggtttcaggatccgagacgtgtatgggctgacgatgctctggtccacagccgtatcttccgatcccaccaaacggtacagaaactttgtgctctggtgccggaatcctttcctggatggcaaggcagtctgtgagaaagacaggccagttatacaaaaataaaattactcaaagggctggtttcatttctacagatgagtagtacttaggacatttttatgtggcagaaagtaggtctttctgcaggacttaactggaaaatttaaggttcataaaaacttcataagtacctttgcataaaactggatatgaaaacctaattgcagtttaatagtttaaaggcaaaataattaaaaagttttaagttatgtatagcttctccaagtttcatgttgtctataaggcaccttgaatccgttcatcaaatatcagtcagcccaagcatcaggtgggtcacacacacatgcacacacacatacacggctcctgtctcatgaagggtctctgttaccatggcagaaatcactgttgcatgtgtatatggatttattacaatatgtctctactgagtaaatctcacaaaagtaggactgacatagattattatccctacacctcagtgtgagcagagaggactgaccagagggtagaggggacatggtccctgctccccacaggcctgcagacgcctgctctccacacagggctgctcaagggccctcagtcatgtcgtaatagaacacggacaattaggtttcatagcaaacagctcagacggaagattaaaaagtacatttacaaagcggtttgccaggggttggatgaagtttagaaa

SEQ ID NO: 61343 - DNA, 1545 bp, Bovine  19866880745462
  misc_feature (1)..(1): n is a, c, g, or t
nacgtgtctctttcattctggtttcctcagtgtgtatgcccagcagtgggattgctgggtcttatgaaaactgcccattttagattgttgcttcacctttatctttccacagtccccaccactccataatgtattacaatctagccccttgcactcgacagtcttattgtctgatctcattaggcctctgaatttgcaactcctactataaactgatataagagaaatgttgctaaggagctggaggtggtacatttccatactgttgaaaagacatacatgtttccactataatgcagaaagtgaaaaagttcatttcatccagtcttgacgacatgtttcctcagcattcaaatgggtcacttcacatatactatcattggttgagtctaccaagtagagtcaatgcctgcacctcaagtggaccacactgatgtccatcactggcagttactaccagaaaacgttcaccatagttggaaaccatcaagaagtggtaccaacgagagcagttaagcttagcatggtatttccagagtcgcacaaaacatgtctaaacagatattcttggtaattatagttttataatacaattcttctggaaataatagttttcttgagtaccagagaaaaaaagcagacatttggatccaactgtagggacatctttagaagttagacgtttgagtacttgggtatcaagtcgtcatttctggaattggaagcagaaaggctgaagaagtgatgagctgaactttggtatttccatgagtacagggaatatatttcaaatcttatgtgtagttgtgtttactcccaccaacctataactctggccctggcatttccttttgaaatcagtcatgaaataaaagggtgtttctattgttcaaattacagttgttcagaaggaaatgttctataatttagatcaatcagaggcccagaggtatgtgacaagtgtgccttgatggaagatatatttttcagaagtaggtcacgttcagtcagtattggattgaaactgtgtctcctttgcttgccaacatgggagaggattcagtaactccatgtgtcctcaaggctttctggaccaagcagaagaccatccttgtcagagtgtacaattcagccttgcatcacacactgcaaattgtaagacatgcttctttatcagcggaactgtatgttaatatagctgtcacattaaatatttgctgctgtgactcagttaatgactgtcataaaagtgtggcagtatctggcattttcagtgtttgtggtgcctaatgtacggcctgctattgtaaataggccgcacatttagaactaattacatgccagctatgatagcaggtttattttttacaactatctgagctgtgatcagcacttgtaatcacaaagcaaggaaaaaataggcagtgacagcaacaccttcatgttgaaagcaaattcttgttctgaagtgttatgaaatattacgtgttttccaatagaaagtgaatacaattagtcagaagcagatataattaaaaaacaccc

SEQ ID NO: 61344 - DNA, 1953 bp, Bovine  19866880823791
  misc_feature (1)..(1): n is a, c, g, or t
naagctgccttgttaaccttctgtccagtgtgccaaaaaagcaattatagcaattaatttttccaagtgtgtactgttctctttaatagctgacacaaaatatggcaggagacataagatgcctgaccaattgtgtcaggggcccacagagctgatttgatccatttatcagcaatgagtaggagtgaaatgccatgtacagtagttccatgctacccttgaccctctaattatgatgggccttgcaaattaatgcctgagaaggaacaagaaaatgaaagatttcctagaattttaatgagccctcaaatgaaggcttttgaagttatttcatatcttaaaattagcaagaagaaaaatgaacacaacagtgaaaaaaaaaaaaaccctgaagattcagattaagtagctggattcaagtgctgagttacaaagaccatcagggtttggggtttctgttggctctgaggagacaactttctctcctctgagctgaacaaatatcatccagacttcagggagttggagccagttgtgtgatcactagaagaaccctagcatggcaaccttaccacacaggtgggcaagtaggtgcatgcaatccaagtggcaatactccacactgatgtggcccagagcccctgaggtttatgggaactcgcttcccacttactgtccatgaaatgtggttttcataaaattttggcagcttgctaaaagacgatgatctgaaattctgcaaaaagcatcttcttggttaagtcagattgatcagtggtttatcaaaataaaataaaaattattttgaagaactattggttgatccttctaggaatctagaagcaaatcttccctatgtagccttgatattaaaatgttgccatgcctacatagtggcaatcatactctgttctggataaaaggagtaagaaacaaacaagtagaaatacaagaaacccattttttccaactgtacttgcaaaatactagtccctgtaagatgctcaaaggaaaagacttttgtaaaccaataatttgagtcagtgctatataatttaagtttctgttgggatttagatttcacagttgaatataaaaggcttcaagaaaacctacagtaaagaaagttgtggactttgttaaactcagtatttttaaaactaactgttcatggatctatttatccatccattcatccatttatccacccatccaccaaccatccatctattgttactaaaaataattacatctcatggaactagtgtgccatgaagcacaatttggaaagcatagtaccctagacaggctttcactgcttattctcacctctgtggagctttcatcagtgctccagccacaatgacctacatgtttttgttctgttgttccatagaaatttccgcaaaccacttagaggatgtataatgagattaaacaaaagttagagacataaaaatttgatgattataactgctaatagtattatctgtgtctgctccgactatagactcctccaggcataaggtattttcttattcatcttaatattctcagcacatagtggagagattattgttaaatatttgtacaatcatctagttatatcatctcttacctttgtttttctctgtattcctgccccattttcttgatgactgattttctctgcagggtacttgctttctgcttccccataatttcacactttgacttaaactagagtccactttgggcctgactctgtgtgactcttgaaatatagaggacaccactctttgattactaactctgtgtctcctgagtcaaattataaagaaaaatctggtttaaccaaccaatgttttggcctatttttaatcatctgtctgctgctgcagctgctaagtcgcttcagttgtgtccgactctgcgtgaccccatagacagcaggctcctccgtccatggggatt

SEQ ID NO: 61345 - DNA, 1725 bp, Bovine  19866880846571
  misc_feature (1)..(1): n is a, c, g, or t
ntcctgggcgattctgatatattcttttctgcatccactccaatccttccccgatgggaattaacaggttcaaagccaaatactgacatggtcagaaaagattgcttgttctaagtagagtgatgtgtttccaggcaaaataacctcaggagtcttctcagtggttttccttaatggacatcattgaccagacacaccaaaacccttcttttccccaggtgcagaataggaggagaatatactgctggatttttggtgaagattaaatgagatattatgcaaatgaataactgtacatggagagtcctcaataaacgtcacttcccatcctcatagcatcagttggcaatgaattatttcttttgtttcctaacacttatttatgttttcatgcatttatttacatattagagaacttataacctaatggaggcccatggtctcagctacaggtattttgtttgcttactcttggttattgagtgccccttggtaaatggcaggatggcagagtggagagaatatggcactggaatgagaatgactgggtttgaatttgggcttcatacttttaaactgcatcatcctgagcacatctttgtgcctctatttccttattataaagttgaggagggaagacataataattagtagtatctatctcatggggttgttctgaggattaaaaaatatatatatatatggagagagaggcagagagaggcagagagagatgcataccatagtctggcatcaagtaaaacctgtaaaagtgattgttgtaactgatttttggtcaatacatataaggcatttataatggtgttcaataaatattagctgttgtttttagtattactggcctataaaacatggtcaaacagcctcttgaaaataatttcagatttagggtgattcttactaccagaactaagaattattagcagtagttaaggtggcaacaaaagccagtctttgggtggtggcacggctcactaggactttaaggctttatcccaggctacatgaatagtatcaggttacttgtttcttattttgcttttggttgttctatgtctttattgtaccacatgagctttgttgccctgtagcgcgtaggatcttaattccttgaccagggatcaaactcacattcgctgcattggtaggtggattctttaccactgtaccgccaggaaaactccaagttatctgtttcttaaataccatacattacatttgcacactgatgagcaatggactcaactgtgtccacagacacaagtaaaaattaatttattgtcaaaattttaaatatggactatttcacataaaattctggacattctgcctcttaaacaattagagtatctacaactctgggcttgctgtcatacatggcaacatctgcttcagctgtgtaaaactgcccattttattttacattttatttttatttatttattttttaatataaatttgtttattttaattggaggctaattactttacaatattgtattggttttgccatacattgacatgaatccgtcacgggtgtacacgtgttcctcattctgaacccccctcccacttccttccccataccatccctctgggtcatcccagtgcaccagccctgagaatcctgtatccttcatcaaacctggactggtgattcatttcacatatgataatatacatgtttcaatgccattctcccaa

SEQ ID NO: 61346 - DNA, 807 bp, Bovine  19866880906405
  misc_feature (1)..(1): n is a, c, g, or t
ntggaatgtcagggagataatagagtcaaggagaccatagatcctagtaaccaatcaggtgagaaaggatagaaggagggacacatgtgcacaacacacacacacacacaagtgttatctgttatatgtagaagatgggttcatttctactaaaggaaacattcatggactacaaaagtcccataaaaaagtcggtttccagagtcatcagaaacaaaaggagagactaagcttttaagatcataatacacagtctaatatatatataatatacagtctaagggatattttggtgattatggaagtccttccagtcaccatacatgtgggaaagactcaaaaacacttagacatgacttttggtgccaagagactggctttccctgaggatttctaaggtaaagtatggttactgagcatatcctgcagaaataccctgatgctttgtgcccatgatagctcagaattggggtgggttccagctgtctggatgggtagcactattgactcatgtctgagatctgctgggtatttatgctgagagccctaaagtgaaagaggtcagcattattgtctggaccctttcagctggagcatatgtaagactaatacccttgcttttctgtgatccaaggtaatcagccagggttggggaatatcagtctgtgaggcagcattgccttctgggtgagaacttggaggtgaacagaaatttctaagtgagcagctctgatcacagggaattaacctaaagtgtaggcagaacagaacacagacaaggaaagattcaaaggctctaggaggcct

SEQ ID NO: 61347 - DNA, 1072 bp, Bovine  19866880967322
  misc_feature (1)..(1): n is a, c, g, or t
nactgccccccttaatcccaaaggaaagggattgatggattcaatgtatctccctgtaagagtggtcatggcgagcagatgaaagctgataccaagaaggtttggggtgaagaggaacagttattttctgtcttctctgagattggggtcatggataggatgggaaagaaccatgaactgggcaccagaaagtaaaaattttcattttttctttgctcttagatagctgtctgatcttagaagcaaaaatctctctgacatcagttttatctcttgcaaaatggcgatacttctttactttccagttgtgtgtgataattaaactaagtagaaaattggaatgtcctgtgagaagcacaatattttctaaagatgcaaccagtctgaacctttgaaaagttgatagtgaatccagtattcaagaaaacaaaaggtgcacatccacacattgactaaacaaaacctgatgaggaatgaccagcgttggagactgctctaggaactggaagcagaaaggtgattgagagagacacgctccctgaccgaggctttccaggtggcactaatggtgaagaatctgcctgccagtgcaggagatgtaagggactcagcttcgatccctgggttgagaagatcccctggaggagggcatggcagcccactctagtattcttgcctggaaaatcccacagactgaggagcctggtgggctggagtccgtagcgttacaaagagtcagacacaattgaagcatctgagcatgcacccatgctccctgacctcaggttgtttactggactaagaaataaagaaattacacagagcagtcagcctttgctggtttatcttgtagtaacaaacccttgatttcaggtgacttacaacaacacaactgcatttttttattatgtaacttggtgttatattatgttggtgggtgactttgcccacatgtcttttcattctgagacccaggctgaaagagaagacctcgcatgggatactctgttcccatgaccatggaaaagcagttgagctggtgcacacatcccaaggctcataaagcttccat

SEQ ID NO: 61348 - DNA, 1220 bp, Bovine  19866881044122
  misc_feature (1)..(1): n is a, c, g, or t
ntttttgttttttcaccctgttttaactatttgaggtaaatagtcatctttcttctccccacccccaatcacacagcttacaaatatatttcctgagactgtgtactctccccagtttttacaacctaagaagaagtttagctagttggtagttggaagacagatctgaagggagtaagtagtgttagtaatcagtaggccacatccccttccagaatgttccagctacttttgaacctaggcctgggaaaaaatatatttaagtttcccttggagacactgttaaattatattttattaattagtgtccacttaaatttgaatccatacccagggaaactacttttgctcttaagtttcacccatgcatgattatactaataaaacaatattttaatatgtaagatgtttactgtcaaaaacacatttattgagatatatatatatacacacactttccaaagtacttcattaatcaattttttataacaacatggagctccatcattttcataatattctgaaatgatgatgcaaacattcatattcaaaagtatgtaccaactactgataatatcactaagactgaattcacttgccttaagtgaaaagccacaaaagaagtttctattttcagtgtagtttatctgtccgacgttttccactttgtgttcaaaagagagtggccaaggccatttgggtgtccgtgtgtagctggaggatacagattccacttgtggaattggtcaagatcagagaacgtcttcctttcctgtggcttagaaactgagttgttaatatagttattctgtctggcatttagatcatgaattttgcccagatccacatcaaggagaagaggccctttctatgttagatttgcagaatgacttcagatgttttgactggagagctgcagaacagaatgaaaacagtacaagccatgatctcctttgctgctttccagaatgcaccgggttctgttcttgttagctttgtattagtattataatagcatgctccttatacagcatgatttggctttattattccctttaagatattctaattatttgtgtgtgtgtgctcagtcgctcagtcatttccactctttgcaaccccatggactatagcccccaggctcctttgtccatggaatttttcaagaaaactaagtgggttgccatttcctcctccagggggtcttcctgacccaggga

SEQ ID NO: 61349 - DNA, 930 bp, Bovine  19866881390827
  misc_feature (1)..(1): n is a, c, g, or t
naattcatcaatacctgacacagggctgcccctgtccccattaggcaccccatcattgactagttggttaatttcagaatttggtttagagtcctaggaatgattgcaaaattttttttgacatcagggctccttgagcctatcagtttattcaggatccaggaacaactcttaatattaaatacaggcagtccctgcaaattcctaggtgaatagcattcacgtgggaatgagctgtaaaagtggccgctgcttttcctaaccagcctgcctaatccctcttcacagggtcaggtacagtatgtgtacgggctcctcaagactgtgcctcctctttctttgctgcaaatgtttgtccctttactccaaaccagaacaaaccactgctagagggacccacatctgtcccagcctccttccctttctcttcccatgggaagccacagagttcagaaggttacaagtgggacccaaggccccagtgatggccacctcctcattactggcagagcgtacacctcaggtctgcacattgcccagccctttgtattccacaggggctctgtgtctggaatctccaacactcctatcatgctactacctctggacccctcccccactcccgcacggggccctccaccccacacccccagcgctacctgaagaagcctttacaccaggtgcagcccgccttcctgggcccttccaagcaagaatccctggatgagtttgcttgtgggatgagaaagccttatttttacagcaccaatataagcagcgaattggccctgcactcccagttcaaattcagtgtgtctctcacagaggcaatgtttccaaagtgtgggatgttctttaacgggaggaatgcaattcacccatattatggtgtctgtggaatagtctcggtggcaacccctcagggggcta

SEQ ID NO: 61350 - DNA, 1571 bp, Bovine  19866881468769
  misc_feature (1)..(1): n is a, c, g, or t
ngtaaattgaactttattatgtattcatgaaatgcagtttagtacaattgttatttctggcatttgtggtttaaagatattcccttatgggtagatgttatttttaatgtgcaaattcagaaataatgacctccagttccactggtgaattagggctgatatatacacatggacaataagggggaaatggtctctaattccttgctttatgaacatttctagtgcaatctgtgatcctttaaaaactgacattaaacaaattattttaggttacaactgtattgccagtgaagagaaaagtaataaagtaaatattttccaaggtttttaaaagaatgatatttgacaaggacatacctgaagggggaaaactcacttactaagaacaggttattgaaaaatctcagcacaatttaaaaaaaaaacagattaaaattctcatgaaatgatgccttaccggcaagttcagaatgtaaaattggaaacccaaaaggaatggataaacagataaacaacacacaccaaataatttctacaagcctctcagaaggaaactgttcaagaaaaaggatggcacgttgtctttttatttagcttaattcttttcagctctaggaagtttgttggatagataaaccaataggtagaacagtgttaaaaaaaaaaaaagaagaaaaaaaaaaaaggacttcaggaggcccctgtgcatgcatgccaagtcttaccagtcatgtctgactctttttgatcccccaggatcttctgtccatgggattctccaggcaagaatattggagtgggttgccatgccctcttctaggggatctttccaacccagggatccaactcacgtctcctgcatctcctactttggcagttgtgttctttaccccttttgttgttgttttgctcagttatgtctgactctttgtgaccccatgggctgcagcatgccaggctttcctgtacttcaccatctcctggagcttgttcaaacccatgtccattgaatcagtgaagccatccacccatctcatcctctgtcgcccccttctcctcctgccttcaatctttcccagcttcagggtcttttctaatgagatggctcttcacatcaggtggccaaagaagtggagcttcagcttcagcatcagtccttccaaagaatgttcagggttgatttccttcaggactgactggcttgatctccttgcagtccaagggactcttaagagtcttctccaacatcacagttcaaaagcattagttctttggccctcagccttctttttggtccaactctcacatccatacatgactactgaaaaaaccatagctttgattatatggacctttgttggcaagtaatgtctctgcttttccatacgtctaggtgtgccacagcttcttttccaaggagcaagcgtcttttaatttcatggctgcagtcactatccacagtgattttggagcccaagtttttaccactagtgccacctgtgaagcccagaaagttcatactaaatggtgtatggtgtgaattcccatcaattttttcttatcagaccaag

SEQ ID NO: 61351 - DNA, 1386 bp, Bovine  19866881602906
  misc_feature (1)..(1): n is a, c, g, or t
nacatgactctagcagatgtagaaatgtgcctgcagagtttgacttggacatccgtgcgtctgctgaagccaagagaagcacgtgccctggctagccaccaccctgcccacctgtgtgcaggagctgcacacatggggtaaagccaaacccccaatgacccacagacccatgagcaagaaagataagcatttttgtctaagccactaagctttttgaggttgtgtttaatgcaccattattgcgacaccagcttagtgatatacactgctgacatgctttcacaccaaagggttcctgtgagtatcccatgaacattagtttgctgcatatatcaatggcagaaggcatctacattcttattggttcagccacctctttccacctaagaggctcccacacaggacattctagagccaagggtcctccagctctctggccccatcacaggcttcattcaggtttaatgaactgctcatctatttgtctaatgtcactattttccccaactcggctgtacggtacctggactgtctaggaaaacccattacctctattagcttgccaatagcaaatcagtagaattgcttgttccttaattgatagaatacactcccctcctcctgatagattaccctggtctaacagctccaagaccgattccccagtgtccgactaccatgcaatccggagcaatcagtttatactttcagtaataaatcctaacctatcaatatataatagctcttcataatcaacatccacagattccgtctgggttcagaagcaaccaccagccattttttaacatgcctataattagcagtggccagatgatatttgtgcatctgagcacgatcctctttccttgtccaataatgataatacattttacataaattcaaactgatttaattcccttgtcggggtatggagatataaatatatttatgcatgtgtaatgttctgtaaattaaaatagttcagctgacctcagtgctgcggtgagagaatccagcccaacctctccaagaggctgactgtgggctggcgcaaaggaactgctcatgcagatcagcaaagatggccaactaggggaagtgatacatatcatttgttcaatacccattgacctaagtgtgccctgcaagcttgtgaagagctcatctccatctaagagcaaccagtcttagaccaaaatgcatagcctattgctgtttaacactaaaagggtactgacatagcggacaacctttaggggaaagaaaagcaatttactaacggccagaggagggcagtgggatgggcatcacgtgctaaagacacatcccttcaatgcctcttgctggagagtttgccagccacaaggacaagagtgtcccctgctt

SEQ ID NO: 61352 - DNA, 938 bp, Bovine  19866881917953
  misc_feature (1)..(1): n is a, c, g, or t
nctttttataaattaatgaattgatgtaagaatgtactgttttggtatttcaagatggtgtacagtggggaagaacaaaaggtttgtagtcagagagacttgggttaggatcaaccccatgcacgagcacttgctggccaagttatttgacctttctgaaggaatgtaataatatttattacatataattttacgaaggttaaatgaaatagctgatatactactcttggcacaaagtagatattcaacaaataaaacttattgtcataataatatggtagatttgagtgaaacatgtgatatacatgtttgcttgaaagctagggagaccagaatctactttttgctctaattttgaattacatagcacttggcatattggtacttgataaatggcagcaattaacatgtagtttttatttagctctgttaccctgggaaaattatagtctcactttacctcaatttgtgcataagttaggattaacctatatttcttcaagcattttctgtgttctgagcattattggagcacatctgattcctgaaggaacttaagagtttagttgcacaggtaaaaccaatgtataggaacaaatagagataaaaatgagtgtaaattctcataagtgcataggggttcagaaaacagataaggtaaaccattgtagcaacaaaaggaatgacaagggaaaacaatggtacttactctaggcattgaaggttacttaagatttggatgaatgaggaaatggtggagaggcaaaagggctttttgagtggcagggggacagcctgagccagggtgtgaaggtaaaaatgaatgcatctggtgattgcatttctgagacatggagcttatgatctggtgtaacgtctgaggattgcacataagtatttgaaattggggccattgtctttgaagacgattgagtgga

SEQ ID NO: 61353 - DNA, 1255 bp, Bovine  19866880388187
  misc_feature (1)..(1): n is a, c, g, or t
ngagtaggaaacaagaaccaactccagtattcttgcctgggaaatcctatggacagaggagcctggagggctacagtccgtggggttgcaaaagagtccgaacaacaaacaacagctgcctctaccaggagtcacttaactcctctgaactcagtctcaggatcactgaaacgggaagattcaatacctgctggcagcttggagcatcacacatgaaatgaggatatatgttcactttgtaaacttcaaaaattaaccagtgtgagaaattattatccttccccatcacttcaatgtagtttgtttcttgctctcaattgttttgagagcaaaaaattaaaaaagcaaagaaattaagatggaatctgtgttcctcttccctccctcaacatataactgtgtttagtttttctgtgtgacgagggacatggagaggctataaggtacagagccccagcattcagagccgtaaatcaaatttcaaattcacaacctttccctcaaggatcacttccctcctcttgtgatgcatctaattcactctgtgtgtattgatcgggtcacgtgggatctagaccctggttcaacgggccccgtgggagggaagtgaggctaccctcgaagtcatgaatgtgtgggaggtggaagaaaagaaatgaatgagttctggcacttcgggaccacaaagatatgtgtctttaaaaatgctgacccacaggaaccttaaaataacataactttctgctgcagaaagtcctcggggggcttggccggattgaggactcgtcatgtcatgtatagaggggagacaagcacatgcatgcctgtgtgcaagctacatgagcatcaggccgtgacccagaggagtgacaccctggaaatctacgaacactcacaactcaactcttagacgctgtcacttggcctgaacataaaactgtcattaggctttgcgctgtagctaagtcttggttggccaaaaatttcgttcggctttttctctcgtagcttacggaaaaacccgaatgaactttatggccaacccaacactttgggaatcagtatttgttttcaaaaatttcttctctggctcggccttcttgggcagtatgtcgaacatgacatttttataggctggagcccaggaagaatgcataatcccgtgaatagatatcattgcctaaggtgtcaccttttcttgccaccacagggttttgatactttggcctttatgggattacaggatgtcagtaaa

SEQ ID NO: 61354 - DNA, 2269 bp, Bovine  19866880528830
  misc_feature (1)..(1): n is a, c, g, or t
natggtctggagtgaatccctgtaaccttggctctgggttctgttcagtgggattgttaatacctgttgtaaagaatgaagacaagaaatgatccaagaaaggtttaagaagacataacgtggctttaataatttcagtgattttaatgatgcttatttttgagagcaaggccaaataatgtttattcacctacaagatctcaatgcaataaaaggccagttaaaagctttcactgtgattcaatacccatgcacttttgaatattaaattatgaaatgaaaaacttccaaggcattaatggaatgaaatgaaagacagagacatttcaaatgattcattggcaaaaatgtcctttctgttataaaatgacttttccaggaacacgacaaaatttttattactaggacaaataaataaaagatctttagacttgtcctgcatcacttgtaatttcatatttttcaattaagttcaatttcctgaatattaattaggctcttactatgtataaagggatcttgctaggtgctagagatagtgagataaatgtgaaatggacaaagatggaacatgagagctgccatgaaggcagctaacaggattgataaaaatcaatctgtatcatggtaactgaatagaatatgatgtactaaccaataaaatgcaatttgtttctaaaatgaacatttgtttgtcaaaaccaaaataattccttttctctgtgcttgaaaatgttgcttcaaactcataacttcaaaattcatgtttcataaaatagaacaaatcaagtcattgagtattcatggtaaatgtaagaattcaaaatttaacaattcaacataagttgtattgctgtttattggggtaaataaagcttgcaaacaaagaaatctaattaatatttatattaatcttattaagaaatactgctaccttattccctttttggccagatacctaaccaatggcctcaggccattaggtaaaaaaccaagccaatcattggagtagactaatgatttcttcatgcatccacccatactcattgtattaattagattatcatttagctgctgaagaaataaatcctaaaattttagtagcctgacacagtacaatttcatttctcgctcactttccagtccaacgttagtgttcctggttagtggttgccttcagtatggtcattcagagaaccaggttcttttcattctgtggcttgccctcctctgtcatcttggactctcccacatttagcaggcaatgtgaaaagagagaggctggaaaaggcacatgtgctttgttagcccttttggctgagaagcgacttctcacattccactggaaagctctcagttggccatacctaactgcaaagcacgttgggaaatacagtctaacccagagcccaggagggggaggaaagaatgggcctggttcacagttacgcacactccatcctttgggtcctcctgcaaagagaacaccttcagtccttccacaagggagacaaagtcacattcacagtcactgatcccagggctaagttcagagtcttcaagtgacaaagtaccctcaccatcagacctgtatgtgccatccagtgatctttctgactaaaaagacattgtctgccactccacgctcccactcccaatacacaatgactgagcagggacaggaggaaaaactcctatacagaaaaattaagcatgggaaacacacaacagcctctggtccacagcaacgatgacattcttcagacattttgaggttttttgtgacttgtgtaacggggattcccttgatttgatgcagattccacattctggaaggaactcccttcccactattcttcctggcccctgaatcttccctctaggaagttcttccttttctatcatcctccatagccacatctgagacaggcactgagcactatgccccctagaaatccatccagcccaactgaagccagggcaagcttagagacccaaagcttgctttaaaactgtaacagccaaaaggtttctattctgagctcagaggtttttttggcaatacaatttccacaaaacctcagtaggcatttgattatttactttataccactaagttctgggttgttacattgcctggttaactggaacactatcagagacttactaaagatgggcacaataaaggacagaaatggtatggacctaatagaagcagaagatattaagaagaggtggcaagactacacaaaagaactgtacaaaaaag

SEQ ID NO: 61355 - DNA, 1474 bp, Bovine  19866880757797
  misc_feature (1)..(1): n is a, c, g, or t
ncatcctctgccaccctcttctccttttgccttcaatctttcccagcatcagggtgttttccaatgagtgagctctcatgttagtaaatcagagaaatccccccactaacaaaacgtgttggtatttttacatatatacgtaccgctatttcttcctccagagcagttttaaaaagcttgaggagtagatattcttctcgctgattggaagcataattgtacagggtgaaaataactgtatccataaatttagttgacttgttctgtggcatctggaaaatcagcttagccaggtatgaaggattggtctaaagagagaagacgaaacgccccccacaagactgtatgttaatatactattaaagcagagaggacccccagttctttattctttaatgaattcttatgtatgaggcacacagaagagtatctggctcatattaagacaggtagcagctaacaacactactatgctataggaagttataatagaaagttatggtaggatttaaattttatatactctatcatgtcatattttatggactataattacattatgaatattttatactgttcaccatttgaaggcacatattaatatttatcgtagagacaaagaagagaggggggtggctgagctatctgaagagactggcaagaatggatcaagggttgagctatagagattgtcttagaaggactgatgaatgaatcaacacagtctatattctgagactagaaagcaaaagcaaagggtatgagacagacaatgggatggccgtaatggtttaaaaaatattttatgttttctaaatgacttttctttatcttaaggatcattctatttgtggctgtgtgtgggccttctccagttgcagtaagcagcgggggcgactgttagatccagggcacgggcttctgagtgtggtggcttctctccttgcagagcacgggctccagagtgatggctcagtagttgtggcatatgggcttagttgctccgtggcttgtaggatcttcatggactagggatgtgtctcctgcattagcaggcaaattctttaccactgagccaccggggaagcccggccatgatgttttacaaagcatgagaaaggaagagcaagacaaggaggctgaacggtaaagttcagggtaggtcatggggaaaatgccagaagaaactgataagaaaaaaaaagattgacaagttttaaagattgacaagaattaaaaaaaaaaaattgacaaggagctcaggtgaggatggagttcaagagatatagccccagactttgtgctggtgtggtttttctgaaggaattacactaatcagaggttagaagaaaaaaaaaaaaaaattaaagtgacagagaaatgcaaaagtcttactcttcatcttccttgcagtgagaaaagaaaactgtccttttcttttgtatttcacataaaagaaacacatgggaaacca

SEQ ID NO: 61356 - DNA, 1085 bp, Bovine  19866880856625
  misc_feature (1)..(1): n is a, c, g, or t
ncagccccatggcaggattcagtgctgggtgtccctgccacttagaaggcactgccaaggctctgagaagcggggcctggaacactctctgtcctctggagcttagagagttgacttagaaggctctatcttaacctgttactaaatcctggtttcagtaacagaggaaatggggtttttacaaagttgatcgcacttagaccacccgatacacaccagaatctctcaaaatagagacaattttcatcattcagagttttgtggtttgcctcttggaatgttgaggagtaccacaaactcctacttgaccacagcctgaggtgtaaaaactacatcatgaataacacctccagttggtgcctgaccacacacagacacaccaacatgtatctcgtgacataagggagatgtgtgttaaaaatcaaaattgagtaaatttgaagatctgatgggctttattcagagattcaagaatcagacagtagctcctgtagcaactagaggggaactccagagggttcttataggctggaggagggtgggacaaggaggtattagcaaaagaaaagaggatttcaagccaggctgtgttcttctgggggaagggaactgcaggggtcttaaccatgcagattagctccagagtcttgatccaaaaattaaggttgattgttttatgggtcacatttatgggcagggttaaaactgcagtcaaggtcttgctttgctgtgaccctgggagtagggagaaaaaaatcaattcatttggggtttgtcattttttttttaaacatatgtcatgtcagacaatgttttcactgacttggtctctttcttcatcacaaacctccagaatattaaagtatgcaaaggctttccctcttgtggagttcactagagcacattctttgagagtagctagaatcctgtgatgttctttctaagttctaggtgctgaagagtggagttcagggcttctctggtggctcagcggtaaagaatctgcccgccaatgcaggagatgggttcaatccctgatccacgaagaccccacatgcctcagagcataagcccaaaggccacaa

SEQ ID NO: 61357 - DNA, 1050 bp, Bovine  19866880935542
  misc_feature (1)..(1): n is a, c, g, or t
ntgttgcaaatcatgcgtgtagaaattaatagggccagggtcttgatacagagaataaaggcttggatttttttcccccaaaacacagaattttaccagacatgatatttcagggagtgttttcctaatacaaccattctcttacagggaaggcatttccaatgtgctatgatgcttaaagtgttaggcagagcttctaaaagccctgtttccttctgccatgaataaacagcccagcagtttgtaaaaaggccttatgccatctgaacatattagtctcctggctgtctttatcagactatgcatgcacttccttgctgagtattcactggcataattcccagccaggaaagcctcacagccatctgctctatctctggtaccctgcctatgtgccagggggatagaaatcttcccctaagtactacttaggtgtttggactactgttaaaaaaaaaggaatgtagaaaaattatgtgctcaacacatgtgggctgtttctgtgttatgatattttattactctttgctttcctgcattttcaaattaattctactagctataaacatgcacagatgcagggtggagggatgaaggaagaagaggtgcctgaaggcaatgatgggtaagggaaagccctgggtaaggagatggctgtgtcttatctctgttctacctttaactgaaggtgcaaccttgagcaagtcacttctacttttcatattaaaaaggaaaggcttcctacaagcttgaacttataacactggtaaaacaaaaaaaaattagagcatgaaaaacaaatccacagcttccctggtggtccagtggctgagaatctgccttgcaatgcaggggacaccagttcaatccccggtccaggaagatcccacatgccgcagagcaactaagcccatgcaccgcaactgctgaagccctagaaccaatgctctgcaacaagaggagccacctcaacgagacgcccttgcaccccaagaggagcacccactcgccacaacctagggaaagcctgtgtgcagcaccgaagaccca

SEQ ID NO: 61358 - DNA, 1332 bp, Bovine  19866881045191
  misc_feature (1)..(1): n is a, c, g, or t
nccccgaacacatacaatttcagtcagctatacctcaacaaagctgaaaaaaaatttaaccccctccattattcttgcctggaaaaccccatggacagaggagccaggcaaggatcgaaaagtcattccatgtaagaaatacaggaaaacattagaaaaagtacaggtgaacaacagaatgaaaattagtacattcagtgtatgtctaaaccatgcaaatgctatttttatttatatgtaaaacagaatcattatccaggctagaaaacaataaacaggtgatttttttggtctacataaccgtctggcagtacagtccatcctttagccctacccactacatgccacgtgcgcccccaaacagaaggggaaaaaaaaaacaggccctgcaaatttctaacctgtcccaagggggcagcactaccctcactgagaatccagcgagaggaaaggcggggcagggactgacgcttgccttcgtccgccttcaccaccaagccttggaggcaggagaacataaaaagcacgaggagacatcttcttacttctttatagttagttttatttgacagtgttcttgcacacgaggcaaagggctgagttcagtttcactactcaacaactaatgacacagttggctcttgaacagcacgggttcgaacttctcaggtcccttacacaagggttgttttcagtagtagatactgcagagctacaccaccctgggttgattgaacccgaggatgtggaacctccgatctggaggaactgtggatgtggaggagagatgataaattatatgcagattttcatctgtggggagggtccttggccctagcgtgcaggttgttcatgggtcagctgtatattataatgaaaatgaaaacaaagccgtttcacctgatggtagatggcttggtttgagttcgtgagaggaagctacaacttgctttcgccctgtttgaatgatcttgtggatagaaatggcttggctctgtggtttctaacctgctgggaaacttactttttccgtgaattatagcccagatgaaagttggctgtgaccacacggtgctgcgcatggtctccagtggaaaacatataaatcgcgtgacttttgagtatcgtcagctggaaccatatgagctggaaaacccgaacggaaacagtatccaggaattctgtctgtctactctttgaataaacaagtcaatgatttccatgctgctagctaagggagtttttaatggctattatatatgattttgatgagcagctagttaagaacctttcataccagtcagtattcccaacgtgaacacatatcacaca

SEQ ID NO: 61359 - DNA, 753 bp, Bovine  19866881166419
  misc_feature (1)..(1): n is a, c, g, or t
ntgccagctcccgtggccgtgggagtgcctcgctcctgtctacccacctcacagtgatcccagcaaaacaccgcagagaaagtaaggaaacgagaacaattcaaaaggcaagaaatgaccatctttcctaaatattaaggaataaaactacacatttaaattttctgcatttaactctattttcattattttatccagaaaaacaatagtactttggtctttagaaacagtatatgtttgtattgttcaacacacatgaaaacttttaagtataatatattccagaaggtccctcagagaatgccttttatagccttaaactgctattttatcctattcccataaagtcgtaaacaggaaatgtcttgccttttaaaataaaggcttacttgcaaaagaataaatagttgaaatacgtagcttgtggaaatgcaagcgtggcagattttcagatctttatgagtgtttaacatgtttttaaagcattactaactttttttccttggaagtcaagatttttatttgcaaataaaaaaagctgaccatgattagcttagagaggaaaagaattcacaaataccagaatcaataaagcattactacttgatagcattgtgaaacaaacttagttcttcaacttatattcttcaacaccaaatatttatcaagcactgattaaactagtgataagtacatactctttcatcttatcattgatagtaggatttttcatggataataagaatagtacag

SEQ ID NO: 61360 - DNA, 845 bp, Bovine  19866881281825
  misc_feature (1)..(1): n is a, c, g, or t
naaccaaggaagcgacgaatggggactcactagatgccatcaatcattgtcaccagaggaaaatgaaaagaatccaacatatgttttcacaaatgctccctctctctactcccactgctcctcctcctcaccgagacacaatcttaatgagcagccagtcacttgttcacaggcctccagtggaaatggataagaagcagttggtagaagcttccgaggcatccctgtttctcctgtgtgtgtctgtattcatgcactcccagggagatggaagcagggcttcataccaactggctacagacaaccccgaccacagagaggtgaacaaccgatgacggtcgcagcaagactgcacccccgtgccaggagggatggtgggatagaaagaatgtgcaatacaggtagcagatggcactctcctcaacgcattctcaagtcagggaacccagagttccttatttctctgctgaccacgatggtacttaagaaatcaattcctatggcaacagctctaagtaagatactctgaaaataaaaggatgttttaaatgaaggacagacacttgcattcattcctgggcatagagaggcagagcgtggtaacttgtgtcctaagtcgcaggacaatcacgttgccaatttttctctttgatgccataaccccctatagcacatctatcgtggctaaataatataagagaacagaagcaacaataaaagaccagctgtatacatgaagatttgcaatgataataaaaaatacacaactaaaaaacatttcatagaaaagatcatgaagttctggtatataatacagatgaaatacatagcaagtaaaatttatt

SEQ ID NO: 61361 - DNA, 2165 bp, Bovine  19866881283561
  misc_feature (1)..(1): n is a, c, g, or t
ntgagatgattggatggcataactgactcaatggacatgaatttgagtaagctctgggaattggtgatggacatgcaagcctggtgtgcttgtagtccatggggtcgcaaagagttggagtgactgagcaactgaactgacagtctaatctgttataaggagattagatgcttgctccatggaaggaaaggtttcatttctttttacatcactggagatgttcaggattggggaagagagttgggtagcgataatcagaagttatacctatcgcttactgaattgtgtgattacacaattgttcctcaactggaaaacagactgttgtaagggttaaattgaaagcttctagtttattgtagacattaatcactaaaatgttagtgctgcacacgtgggagaaaggacataactaaggagagttttgcattttgacttagacatccattcacctgctgattcttagtattctttgggcagaggtgatttgcccaaactcatcttgaatttgttagctacctaccaaaaaatattagtggagttgatggaaccccagaagaaattcacttagaatatctccatctgattctcagtttttaggagaaaaataaaagttctttgggagagttttaaaattttgcacttgaatatagttaaccagaatgacacttggatccaatgtgaatttagtaaattaaaataattgagtttcaagtttttgatttacacatgtctaaacctttgtaaagcaggaaattcctattaggaatttattattttacttaggatctactcacataccagaggacataagatattgtctattagcccaataaacctgtttattatctctaatttatatacattaaaattcacttttttagtgtaaagttctataagttttagcagttgtgtatatttgtgtaatcaccaccacgataaggatacagaacggttatatcaccccccaaaagtctcccttgtactgctcctttgtaatcaagccttctccctactcgtaactgttgacaagcactgacccatacttttgctttttccaggacaccatgtgaatggaatcataaagtagtaactttcagagactggcttttactttgagattcactgatgttgttgtgtgtaatgatggctcatgccttttgttgctgagaagtactcccaccgtagggaggtaccacagtctggggaacacgtgagatcctttggttgttggcattatgaatagcgctgttataaacactccatgtacagagttttgtgtgaatgtaagctttttatttctctattattataatagcatgtaagagtgagattgctgggtcatatgggaagcagctgctacagaattttccagggtgtaccattttgcatccctaccagcaatgtatgacaatattagttcttctgcctcttccttagcacttgatattgtcattttcttgttgttttgttgtgcttttgttttagccattcaaatggctgagtggcagtaagttgatgtggtttattattttgtgttttcctgacggctaatcttattccatgctctttggttcagtatcttttgcccatgttaaccattaggcttcttcttgttgagttttgtgacttctttatacattttgatacagtccttttttgcacatagatcaacaaatttttttgagtcagtagcttatctttccaccctgtttaacagagtcataaggtttttaattttgatgaggtccagtttattaatttttctcgtgttatgtttgtgtttcagcgtcctacctaaaaaccctttgcctaacccaaggtcacagagatgctctttgtggtttttttttcctaatagttttatactttgatgttttaagtctgtgaaacattttgagttaatctttgtataaaattaaagttcatgttgaggttcgtttgtttggttgtggatttccagttgttctaccaccatttgttggaaaggctacccttttcccattgaattgcctttgtgcttctgtcaaaactcagttgatcctattgtcatgcctttgcttctgaattatactcagttccattgatctgtgtgtctgtccttgtgctaatattacagaaagtcttgacactgggtaatctgagtcccctagctttcttttttt

SEQ ID NO: 61362 - DNA, 1237 bp, Bovine  19866881404246
  misc_feature (1)..(1): n is a, c, g, or t
natttgactctaaattttttttttcctttttttaggaaatatttcaaagaagcatgtaatgtccctgaaccagaagaaaagtttaatatggataaatacacagatgtggtgacagtcagcaagccagtcatttatatttcaattgaagaaatcatcaacacacattcagtaagtgaggctggaggagggtcttagcagtggacccagggttcagacatcagtcttgagaatgtttagtttcttcagagagttactgtgagcttgtgctcctgctcatgttcttaatcctaaaaaaaacacactgtttattcccggccccttatacactgatgaacctccttttcctgaaaaagaaaagttcacttttgacatgatatgtttattctctgattcttaagtgttaggaagacgccttctcccaaaaaggagcgtttacttcttccatgatccatctacagtcagatggtgaagggtttaagccccgagcaggggcagtcctggtattttctccacccaccaaggccatactgcctgaaccccatggtcagtctctccccatttcgggaattctctttgctattccagcagttttctgggaaaataagaatgttccctctcttctaaggtttggacataaagagagagggaataaacaggctgctctaggttggggaaaagaagattcccatcccccgcctccaacaacagccatctacaaagaatctcttgtgttgttctagaaaaccccatttcttagaagcaagcaatttcagtcagtgctgtgtcatagtacctccctgttgttcacacgcagacatcaccgtcaaccattagcctgtattaggtgcgttttaggggcagggcagttttctcagcattgtgagattctttgtttaagaccaagcagaacttattctgaaacagctaggttctcaaaacataatctttccaagaacagttctggacgtggctacgctaagctaatactagaaatccttgcaagacctacaaaatcagaacctgtgttctaaccagaccccaggtgattcagacccagactaaaggtcaggaagccccagaaggtggttaagcatacacccagcttccgattatacacacaactggggaaaacaaagacacgcctctcaaaggtctcgcccctgcccccgccaaaccaaatatactaacgagcggcaaaaactggctgcccccaaatttcactctttattataaaact

SEQ ID NO: 61363 - DNA, 879 bp, Bovine  19866881460764
  misc_feature (1)..(1): n is a, c, g, or t
nacttgaattctgcttgtggcaagtcatagaaacaaaggaacattccatagattcttctgttcaccctgaaaacggctcccaggattgaaagtcatgaaagaagaaagaaaaagtaaagaagtttagagagaatgatttacagttccacctgcctccactatttgcttctccatggcaactctgtgcccatcctgcccatttagcctgaatcaatagcatttcaaagcacctgctgggcatccagattgacccatttaggggctcccattgttatctggtcaacagaccgagggagtggtgggtcagcggccagtccagttaaaaccctaaaagtgctattcagtgttctgatcttttctccttgggtcagaaaaaatctgcttccttaggatcagggaaggtctgaaccagagggacctaagggtgcattagttcaactcctcactttacagatgagagactgagttccaaagtctcttttccaaagcacctgcagtgcgtgaggccatacacggagttaggaagtgaactggatggtgatttggaacattttcagtttcagggcttttatttgtctgggttttgttttattcggccacgtggtggatttacatcatgcataatagtttgtaatgtgttgctggttgctttacttttctgaattcctgcatttggggcagtttctctctggttaaaatgttactatcctcctctatgctttgtcattttggttttgttgtattttctgttttaccctccagcatacaattagtgttaatatagcatcgatagtggaggtgtaatccgtgtgctgggatcccttaggaacaaggagttttcagtattcaaacaattaaagaagaatattccttaaagat

SEQ ID NO: 61364 - DNA, 1059 bp, Bovine  19866881646318
  misc_feature (1)..(1): n is a, c, g, or t
naaaaaaaaaaaaagtataaaagtaattgaatgggaaaaacattgaaaatgtgacagtaaaatttaactaggagtctcccatcaaatctcttctaataaattttatacataaagtaatttcatatttaatgtgtatatttatgtatattataataatattgttagttttaacatacttgaaatttatattcttgcatcaaaggctaagctaacgaatatcagttatccttaatatatttccacttctatctcccctcctatgtaatgttgagataatctggaattttagatgcatttttaaattttcagattatgcaataaaagtttaggtaaatacattttattagtttactttctaatttaatctgtatccagttttcttctttcttagttttatctttggttttgctatttatcagcatatttactaagtagacgaaatgaattactcactacgtgcacgtatttgactattttcatttgttccctgggtgttggttctgtttgttgaatgtaattcctctttcagagctgttgtttccttcaaatgtctggcatttcctgatttggggctcatcttgaggtctgagacttgcaactgtttgtcactgttggctgcaggtccccgtgacagaggcttccctggtagccctgttggtaaagaaactgcctgcaatgcaggagacctgagttcgattcttgggttgggaagatcccctgcaggaagaaatgacaacccactccagtattcttgcctggagaatcccatggtcagaggagcctggtgggctacagtccatggggccacaagagtcggacaggacttagcaactaaaccacaagcatcccgtgacagaagccagccttagggagatgggagaggaacaaggaggctgatgcccagagggtgctcactgtcttatcctcttagactggggttccctgtgtcttcttgggcactggtgtgctaccctgccatcagcatctacacttgtcttggggaaggatgagtaggttcagcaggtctaactaatccaaattatgcggcttagggctcgc

SEQ ID NO: 61365 - DNA, 828 bp, Bovine  19866881918823
  misc_feature (1)..(1): n is a, c, g, or t
natctgagttgtaagcactgacacaaaaggaatcacacccgtgttttgtttcctttccgggcacacacaaaactgtcccagactcgctaatacaaagaacagcttagctcacagaaagagctctttgaagataatatttctaaacaagcccatcacagaggcaaggcttttttgctttgtttattttcagaggtaagacagaaaaagtaagcacggcaaaagatttgtatgcatttttctcttttccctaaaaaaggaatattatatttcaggaacttttcttgggaaacagaatagcagccccattcataattacttgctcaactgcaatttgcaaactccctttccatttcttgccaagattccctctctgtttcctgaccttcataacagctccagctgaatttccttcctcaatccccaaagagaatccaccatcttaaatttttgcacagttgtcctaaaaaactgaagaactgaagtttgtaaaatagacttattttcaaaaatattcaaatgtattttgcagagattaatatgaaatctactcagcagtattcttttggaaaagcaactcctttaaacagtgagatgttccagcaccagagagaatttttcaaagcctgtgcatgtctgcacaaccccatgccagcaaaattcacatagcaaagaagctattaagttagcttttagggcttacctaaaaatccatatagtattatttaatatggtagaggaatgtacaatttagtttaagatggctcacaattcccaaaaatcaaagcataaatcaccttggtaccgtaatcatttagaccaaatcatcat

SEQ ID NO: 61366 - DNA, 1448 bp, Bovine  19866880352244
  misc_feature (1)..(1): n is a, c, g, or t
nattctgcctctccctgctctctccctgatctgtctccagctcttctattgacctcctgcaaccccaggcggacctgcagagcagagccttccagtggcttctccacacatcctcccgtgctgttctgcttcctctggacgtacttcataggactttgatttccctgttccctttgcagacctttatttccccagcttctctcctaattgtgtcaggcctgatttctataacacacccatgttccacactcctgagtgattctgcttccttaactgaatctcagtggaaaaaaataaagcaggtaaagggcagatagagtgcacgtggggagtgagctgcaattttaagtaatatagtcagggaagtcctcaccaagaaagagatactggagcccagacctgaggagataaagaaaataattgtaaaattttgctaaatcacatgaagaccattcaaaggataatcagaataataaaagacttggcccagaaacacctacaactaaatatcttataatacagcataaatatagtaatcacagaaatactctatgattttctttacagcctccttttgaggttgtattttcttaaaccttatggcaacttgctgaggcggaatcaaggccagaattgttctttgagcttttagaaggaaaatagctctgtaggtatgaaaccataagaataaagtacccttgttaaatcacattgctccactgactactggagctcagccatctctttttctgaagccctcttctagcagtatcttgtgtttgcaagggcaacaatgacaaggaaatgtgaagagtgtagggaagtcaggggcggtggccctggagaaagagaaagtgacataggaaagtttctccactgggactcgctgagacgaacttggctggagcgctggagcagggtctgcccccagctggtgttctagagagagatgcaactgcttaaccaaattctgtgcagaaagaagactgtctgtttctgcattttcctgtctccagcatcagggggttggtttcctggcaacgggccacctgctttctctctgcggagcctggctgcccctagggggagcccttcgtctgtcagcctccaaggagcactgtgtttgaactctctcctcttgggacagcaggctggctctcttgcaaagcacaattagagcatctgccagcaaaagattgttttgaggcccgtaagcatttaataaattggtgttgtgggcctcctgtgccaaggcctcgctgactgcccatggacaatcgtggactttcttttgactctaaaatttaaatggaaggtggatgtctgtaaacaattctctttagatcatggtaaatcaaacacttacctatctgataatcataagagctgccaaaattctgttttgcagtgaaaatgtttgtttcattcttagtggaattttaaaaaag

SEQ ID NO: 61367 - DNA, 2440 bp, Bovine  19866880399860
  misc_feature (1)..(1): n is a, c, g, or t
ntcggcagtgagatgtcactatgttaggaaattttaaccatttaaagcctaagaaagtcaacatgctttgtctaaggtgacagttgtatattaaaaagaaaattcttgaatactttgtttgccgacatgtttcttctccttttttgcatggagtattgaagcaatggaaaatcttcatgtcaggctaattgtgtggctgaaacaaaaatttacaaaagtagtgaaagcaaggatttacgcttcaaatttacagggtaatctcatgagctcagattggcagaatcaaaagtcaacatcattgtcagtcatctggaagtttccaaatattcagatttctggcaataagtaaacaaaagatctagatgagttattgatatatatatttttttaactttgggggaaattctcttggtccatgggatagcaaaaagtcaaacaagattgaatgtctaagtatgcatacacacacacacactgttataatgttaattgagaccatgtatttcacatagcattataattatgtaacagtgtagtagctgcctctatatcaaaaccatctgggattgctttgataagagggatattcagagtaggtgcatgtgtgtgtgctaagccacttcagttgtgtccaactctttgcaaccccatacactgtagcttgtcaggctcctctgttcatgggattctccaggcaagaatactggagtgggttgccacgccacgggatcttcctgacccagggatcaaacccgtgtctcttacgtctcctgcattggcagataggttctttaccattaatgccatttaggaagctcattcaggtacactttacatattttgttgtccgagagattctgcccacacatttataaaatatcttctccagagatatgactggaataattttcctgaaagatttcctcttaaagttttagtgctttccagtatattctgaatatacttatgctataaagaaacataaggacttgagtttttgagactgatcttaaaagagcacaatggacaaacattagtgaagggtagggtgacagagttcccactgcaatagaatgagatcagggaggaatcactggtggaaatgtacatcacagaatgttccatttaggtgagagtttaatttaccttgagaatgaagcttctaggtattgtgcttttgtgccattttcagcagatttttcagttcataacgttcctctggccgtgtttgtaagatatttatgctcgactgtgttcattgttttttgtgaacttataaaaattgcttttttattagtctataaaagccatgtttggagacagactaaaataaaaattaatgcaacttatcaccctacagcagagaacaagtgcctgtttcagtctcgtatttaagtaccgcagatgcgttagaacctcataaaaatggttccctggcccatcaaccctaaccagggagcaagaagctgaaatctgtgaattgcccacaaccaaaagggaagtctttggagagctgcattgtaaaacctctgagaactgatatgttctgattggaagcgtaaagtctgggattcattatgaaaaagcactccccgtaataagcatcttcttcctctatctatcacctttactttaaaaaaaaaaagtccttttgattgtgatatgcctcattttggctttaaaatctatcttattttttatttcttttttaaaaatctatctcatcgaacaaaaatggaggctgcattctctctggtccttaagtaaaaattgcaagcaatgagatatgagatttgctaattcaaagcatgttcaacagctatattttccatgtctatgaaggctttacagcatattaggaaatatatcaaataggccagtttgacaaaatcatagctacaatgatgaggattattattactattacattacaaaatcaaaactgaacaaaaacatagctcacagccctgccaatgggattctttcccaggaggtagcttgggctgtttcagcctccagttgacttccgccgggtgtctgggggtgcacttgctgaatgagtcaggccactggcacacagaaagctgaaggatgagatggatagagcaaagcacaatccattttattccaagttttcctatgttgtcttctcatgaggtagaaaggccaagagaagagccttcagcaggttggtacttcctaggcattctcacctctctcggtctcctgcccccgatctgggccaggaatcttactgtgggcaccgtggccttgttctctgggtgtggaggcagggcactgaaggaactgatagggaaatacagccccaatactctctcctttggattgcttttcagatgtattctcagtgacatatccatcgttgaatgagtgttttcattcctagaccccattcttttcagctggccttcccacccat

SEQ ID NO: 61368 - DNA, 942 bp, Bovine  19866880402360
  misc_feature (1)..(1): n is a, c, g, or t
natgagaaacttttctcccccaaccccccctcgcccttttcctcagggcttgaaatcagcaagccaaaaaacattttatcctaatatagaaaagaattagacagcagatgcttcttcacagcagcctgcgtgctggggagaaggggggaaaaatggcgtagccctccctctggcaagagtgaggactgaatcatcacgggagtgtttgtggtaaaatcacatttttcttttagatagtgaaacgattatcacggggctatggacagctcatccagagtgactttggtgaatctactctttttcatcacggaaagagtgtgtcttgggctccaagggaacaagacgtacaagactattatcgtgggaggagagcagatagaaggagaccctggagaaagttggctgagatcaagaagtgaggagagccaacaaaataatgaagaggatgtgttttctttttgaactcagggtggggatttgggtcatatctcgataattatgtggaaacaaaaggtcaccccaatgaatgattttcccagaggcccccatgagacaagctacaaaatcagttcgatggttcaaacccatcccaccaaagaccaccactaggggctgggagcatttctttggcttggtgagtgaaagcataattttatctatattacctcatgacccagaggcttattcagatcaagaagggaaagaggaaagaaggaaagagagttagtgatggagcttcttcaatatcagagtttttccatttttaatgctttaggtcttcacctgttcaggacaagtcccatagacatctatcttgactctcgctacctgtcttttgcctcaatcagttcttccaattggcccttgcttgatctttctaaaagatgaagttgtctcccataatcctttcccattgctagtccacataactattaggaaaag

SEQ ID NO: 61369 - DNA, 1710 bp, Bovine  19866880553666
  misc_feature (1)..(1): n is a, c, g, or t
ncaacccactccagtattcttgcctgggatattccatggacagaaaaacctggagggctatagtccatgggattgtaaaaagtcaggtacaactgaagcgacttagcacgcaaacatgggcaaagtgccttgcctacaacagaagatctggctcaatcaaagggttagtgaaataaatatgtgattctacccccattgcatttatggtggaagagggagtttttaaggtgttaaatcacaggacttcgctggtagtccagtggttgggaatctgccttgcactgcaggggatggaggttcaatctctggttggggaactgagttcctgtgtgccatgaaacagctaagcctgtgtcccaaaactacggaacccacatgccacaatgatctggcatgcctcaactaagacccaacagagccaaataaataaatatttgaaaaataaaactaagaaagtactttataaaaaaaataataaaataaactgttacatcataaccccctatagatgaatctataatagaatcacagattcactgaccagacagtggacatttttgagaaaagcctcttttttttaaggctgtttgaaccatagcatttatttgaccacgtgcttcaccttgtactaaaccaacctaggtggcaaaagcgttcataattttaataaaaggcctgagtgctggagacaggtgttgggaaacccacccttcacgttagcacgaacaccatccagcattcaaatcgctgctcacacgtctctgccggggcctggcagccggcccttcccactctgtgccgcctcgtgtctacacagtgaaaatgaaactgttgccagtgttaatacagcataatttataagctgagaagagaactcagcatgcattcccttttcaagtgaaacagactattttcagaaccaactgaagggtggagacatttcttagaaaccaaggcaactaactgctgattccccagaccctctctgcctcagagaatccacctctcttcaggcagactggaccaacttggaaaagctccatctgacacacctcctgcctgaattatagaaggcagatttttctgacaaggtcaatctttctaggcttcataaagtcctttagacctacagtccagagaaggtgctcaggggacggaagatcagaaacctggcttataagagaaggcccgtagcagagaatccatgtcctatcactgagtatgttttcaggaataccacaaagccagactatctcagaagctggacacaggggacagaaaaggaaaagtgcaagtgttagttgctcagttgtgtctgactccttgtgacctcatggactgtagcccaccaggttcctctgtccatagggttttccaggcatggatactggagagggttgccattcccttctccaggggatcttcctgacccaggggattgaacccagctctcctgcattgcaggcagattctttaacgtttgagccgcatgggcacggaagcctaaccccaaaatggatgccttgggatccagaaaaagttggccccatccctatcatatccattgtcccttgtttttaacagagaaactgagattatttaactgaccccacccctcccacaaacacacacacttccaaattctagtaccaccaatcttaaggagatgaagaagagggggcgacagaggacaagatggttggacggcat

SEQ ID NO: 61370 - DNA, 1810 bp, Bovine  19866880668529
  misc_feature (1)..(1): n is a, c, g, or t
nccagtaccagattaagtactacccaaagacccccaagatgacaaacattgcccatctctgttgaaattgaattgtcctctgcagtgtgccttgtgactaagctttggttgcatcacaaaattcagaatttacattgccatatacaagctacgagtatatactgttatttctacttataacatttaggggactggaaatgctttctatcagtgttaacaggtactatacatctttctagatcagatatttatgttaagaaactagacaatggtttgcattaatacaaactgagaagatattagaatatgtgttttaataataacaatgatttcttcaggctgcatagtttaagctactttctaagattatatcatttaaatccttataaaatttataatatttttccacaatgacaaagcaagactctacaaatccattgtctataaagctaaaatagtaataaaaatgtcttaaagagaagaaatagaagcaaacttcacgctacattaaaagcaagcaattttctgtgattttaagcatatgcaaagaaattctgagtaacctacacattcaacttgtgatttcgaagaaataaagatctggggtctacttatgttccatagaattccttttttacctcttctcctaaggctgttatctcttttcttgttattatggatgaaattggtttagaacataaagaacagaatttgatatttcatccttgaataatgcagatgataatatatgcaggaaagtttttccaaagcatgtctgggtatatacttttgaattttactggaaaacatgtcattccattcagaactctgaattaagatgcacaattttttgctgaaggctattttaaattaggctaataaattgctactctctgccttgcgtgataatgcattacattatctactgatgtacatgtattgtttgactctaatggtgtggaaattaaatgttagacatgggccagatgttcctatagatgaatatgaagtatgactctggcatagttatgtctcattgggacagagaggaagaatgtgataaccaacaacaataacagccacttcaaaaaatatcctctgatacgggtccgttaagaactaacattgtgtaagcctagatcctctcctagtccttgtctttgaaaagcgttatgtatgtcagcagtacttgcacctgttcgtgaggaaagaaaatctgtttcctaaaatacaaaataaaacaaaatcatgaatataaaaccacctggaggggtgtccagagatggtaaatatttgtcatctttatttgacagtcaggagctggcttggaatgtttccctggactgagcaacctcaacgtggcagtgagatttccatgggtcattcctttgcaactgcaaagagttcacagcagggtaggagggatgtgtgagttgggggggaagggaaatggcaaacaaatgggccttatggtgaattttaatgaagattccctgctttagctccatcagaaaaaaggaggaagaaagatacccataacatcctattcgaggctaacttaatggaatcataacttgaatagtagaaacatgtcataagaacgagaagggggtgcaggagtacacaggatgtttgctgctattgcttcttcagatgctaatcagactactaaccggtcagtatatttttaaaaatagagaagtggcacaggagataaatacgttacattgtctcaccgtgaatcagtcatccacccactcagtgagaaatgtctcggcaggtctgtgctaatggatgtaagaatgggctt

SEQ ID NO: 61371 - DNA, 1476 bp, Bovine  19866880700850
  misc_feature (1)..(1): n is a, c, g, or t
ncccatagggtccatagggttgcaaaaagtcagacgtgactgaagcaacttagcagacatgcactccaaggattgactgtctattcctcttggaacatgattcacaatatatattttttaaccaagagaaagcctgaaatattgctccatgagtaataactattactaatattattggttgcataccatgtaccaaatattcaggaaacctgtgatatggtattttacacatattatcatatttatttctccccaaagagcccatttttgtcataagatgaaattttggttcagagatgagccagtgtcacctagctaaaaagtatgtaattcatacttgaacccaagtctgcctgactttaggccctatgctttttccagtatttttataccatcctacatagtataatgggaacacagtatactattgaaaaagctggtttggctaagctaaagatagaattcagttttaggaagagaaattgacctttggttagaaagccactttaatggggtatgtttggtgaggaaggttaaattagttaggatatgacaacagtattaaaatttagtgatttaaggaatattgaaattatttctcacatgattatctagagtggtatctgttcagaacatggctctcctccacttgactaatcatgaaccccagctaaggtcatctctgccatctgcaagatatggcttccgatatagttctggttgtagccgtttctaccctagggaaggaaaagacacagaggagcacacatctgagtgtctctaggacacgcttagaagaggcatctgccaagccacccaccttctgtcggtgagagcccagttacttatctgtacctccagaaaggggacatgagttgaagaagcacagtacagagcagagattcacgaggcagtagaaacaaaaaaattggagctagagctaaatgggaaggccttcatcagtcttggagatattctagcatgctaaggtgcccagagtttgggatttagggcatccagccattttattgaaaaattcactgatggtagtctcagaaaaattttgagactatatcagttacaaatggaatatctattatggtagagaagaaagatcactgggcttagaaacagaaatcgagggatcttaatccagaccttgctactaactagttctttgatacagggtaaacctctcccatcatgccaacccttgactttctttttcttttttgaagtacagaaatagaggaaaacaacagaatgggaaagactagggatctcttcaagaaaaatcagagataccaaaggaacatttcatgcaaagatgggctcgataaaggacaaatggtatggacctaacagaagcagaagatattaagaagaggtggcaagaatacacagaagaactgtacaaaaaagatcttcacgacccagataatcacgatggtgtgatcactgacctagagccagaca

SEQ ID NO: 61372 - DNA, 2134 bp, Bovine  19866880700894
  misc_feature (1)..(1): n is a, c, g, or t
nctgtatgattgggtctaagagtgtgagttgaaagcatttaagtatagctacaatttcccactgtctacgataatccattaaaaactcacaaaataaggaaaaggtgatcttcaccaaggaaaatatttttattctaattgaaagtgtctctatttcatcatctgtaattctgcaccaactgataagacttgaagggtagaagagagtgatggataggtttttcacatggggtttaagtggaagtggtttgatataaaaagaactatttcattttctgatgaggtttataaaatttggccaccatgcccatttccctaaaagtactgcctttggattacacaacctggaggtcaagaataatgaatgcttcagagtccttttccttctttgtccaacttccgttcaaatttgtcctcttgaaaaaaaggccctacaaagtctcatccaggcctaagaaagctctatattaggttggagggaaaacaaggcaaaataatatacacagcaaccctgacagcagagctgagagcccgtctctctatgctttccctggctgccctgtcaagatcttgatgcctggtgaagaatagattgcatgcatgctgcagaagataaaaattatctctcttggccctttaccagccacagatgtcatggccttgaccttaaatatcttattctagccccagttggctgaaatgctcaaagacaaaatactccgtgtcactctgcctcagtgtggcgagaggcgcccagggcctgggactgtgttcatatttggtgatgccttcctgcatcactaaagcaatcagatggatccagcctgagaagacaatcagggctggacagaagccgagagggcaaacagatgggtaataatcccctcttttatcattcgtgcctacggagaattattcagtggaattgaattctctgatgaacagagccccacacggctttatgcagttaaaattatgggatttttttttcctttctatttgcttctgtgctttgagagagatggtaagatgatattcttattcataatactagtgagtatttgcagaataaaaagggatccactgatgtttgtggcattcaatagtgtgatgccagagagtaggaactccattcagccagagccccccaacatgggtcaggcatacatgcaggacacctgtcaacaccctctgtgagttcccagggcctggggtgaacagggcctgggaaaagagaggggatatctgctatttagaattgattctggatatcagagtgatccaaagggccaagcagataacagtcccctatctcataaattttgaaataattcagtaatctgtgacttagaagggcttcgctggtggctcaaatggtaatgaatccaaagcttcagtcaattgccttgggaaaaagaagccccctgtaacccaggattgggcaggtagagaggcatttgctgcagtggaaaggccgctggtacttttcctgttgtacgtgccctcccacactctcagtccactccaaggctccatgagtttcctgtgggccagcagggatgaggggtaaactcccgggctactcaccactgcagggcaccccaaccagctgctgctctcatcttgttgactgtagctttcatgggctggtgttccccagaaatgtagcaggaaaggtgttcggagctcaggctctgaaactgactagatgtggaagaaattctttcagactcgattacctttgttttcttttggggctgccgaacaacaggggttagaaaattactgggctaatatcttatgttattgcatacctgggtggaaaatctatttctcaaagattatttttatacaaaaaagaaaaacaaataacagtaacagttactatttattgagttaaaagagcttcacgacccacacaatcacaatggtgtgatcactcacctagagccagacatcctggaatgtgaagtcaagtgggccttagaaagcatcattatgaacaaagctagtggaggtgatggaattccagttgagctattccaaatcctgaaagatgatgctgtgaaagtgctgcactcaacatgccagcaaattggaaaactcagcagggccacaggacggaaaatgtcag

SEQ ID NO: 61373 - DNA, 1229 bp, Bovine  19866880705417
  misc_feature (1)..(1): n is a, c, g, or t
naaaaaaaatgatattctttggagacctcaatagcgtgagttctgcatgtattatttgctggaagagattaatgagataacagaggcaatttctaatggagtcccttggttttcatctcccccctacccacccctgccttcaaactcagttgccagttcagcattatgaatctactaagtgttcttggcatgtctgatggggaaagggagagatagtataaactataggctaaaaacgttacaaaaaaaaaaaacctttcttccctaccttcagtctgcatccgttagctgcaatgcaataactttctcatcttatatataacatgtatattcatatttagcttgaaaccttcagtcttccaatacttcataatcaggggttttggatatttccagggtctgagttgagtcccatctctctgtagaatacctaaaccgccagactatgaaaagtcaccactattgccaatcttgatagtgttacctttagtatattacagtattttgttactaagacatgatgcttgaaatatcatgatacttgaaagaaaaataaaaggtagttcaaagcacagacataagagttttgtgtgttatttatgaatgtttgaagggaaagttaaagataagtctgctaataatgaactacctgcatgtgggctaagttgctttactcgtgtctgattcttttccaccccatagactatagccctccaggctcctctgtccatgggattttccaggcaagaatactggagtgggttgccatttccttctgcaggggatcttcccgatccagggattgaacccacctggggagcctgataatgaactacaggactccctatttccactacagagagtacccagtgaatgccccgctggctaatagcactagagctctgtagaataagtgacagtcaggtgataagagccaagagaattttttgacaaaagcagcatttctcataacagctgcagaaaggctgccacaaaagaaaatttaggaattcaaaactttctctgactggcattgcagatttaaatggttactgtggcataatgtaaattgggccctagaaatgttccttgggtagaaaaatgtttactacacgatattcagtgaataagagaaaaatatgaaactgaatggtatgaactcaaacttagaaaagagcagagacaaggacaaaacaaaactgtgtgtgtgtgtgtgtgtgtgtgttgaa

SEQ ID NO: 61374 - DNA, 2093 bp, Bovine  19866880710653
  misc_feature (1)..(1): n is a, c, g, or t
naaaagatcaagtgtttaggaaagtgtttagaaagtgtgtgatgtgtttcagaaattttcatctacaactaataaaatatatatttaactttttaattatgtttttgaacatatacaaaaatagaaaaaaaaaaaactttttatactcaatactcagcttcaacaattatccatgtgtccagtcttgtttcaaatacagccctctgtctgtatccctacccttccctgtactagtttggtgcaaatcccagaaatgttatcatttcactggtatcaaaagagactgtagcccaccacgttcctatgctcatggaattttccaggcaagaatactggacaattttccttaatatcccttaatatcatcaaatatcctgttaatatttaaatttctataatcatctcataattgttggttagaatcaatgtgcatctttgtctcttttaatttgtagtttattgctaatcctattttatccattgtaatttatttgttaaagaaaccgagttttcatctgatagaatcgtttcaacattctgagtcttactgattgtacccttgcaccatccttcaacagctattctgtactttctgtagttagaatcagaaggtcataaggtcaaggaaaaattgtctttattctttagggatgcataccagtgaaatgataaaatttctgggatttgtactaaatgaatacagggaagggtagggatatagacggacgggctctatttgaaacgtatggttgtgttaagtcacttcaatcatgtctgactctttgcaaccccatggactggagcttgctagcctcctctgtccatgggattctctaggcaagaatactggagtgggttgccatgccctcctccaggggctcttcctgacctgggaactgaaccctcatctcttatgtctcctgcattggctgctgctgctgctgctgctgggtcgctttagtcgtgttcaactctgtgcgaccccatagacggcagcccaccaggctcccctgtccctgggattcttcaggcaagaacactgaagtgggttgccatttccttctccaattcatgaaagtgaaaaatgaaagtgaagtcactcagtcgtgtccgactctagggaccccacggtctgcagtctaccaggctcctccatccatgggattttctaggcaaaagtactggagtggggtgccattgccttctccgtcctgcattggcaggcggcttctctaccactagcgccacctgggaagcctggtgttatggttatgggaaggaaaaaaaaaaattaatactctgccataaaacaagcgtcaattcttatctgtttggacaacctgataaccctgaatgactcatattttaagagttctgagtaactcctttctttctgtggtaattatttttattttgagtaacaaaaagagaaaactgttcaaaaatgaaataaaagaaccaaattctgaattctaagataaacctaccaactccagattccttctgttttgagaggccaagagctgttgtctatttaagagcaataaatagcagagcaaggaaaccattattgtctaagtgctgcttttcttttaaatgaaagatatctagaaaacaaccctgagtttggcagtacctttcagcttttgggattttcgccttgttaaaagcagaaggagtcattattttatgaatccagttcaaacactctcctctatccggcaggggtgatgtaggccactggaaaaagtacagagaagattccttgaacttttttttccccagacttttcacaccatgccatatatttaaataacgggcagaaatgggaaatgatgagtctctcaaggaaataaatacagcactctcattagaaggctcattaagaataaagtacaggaaggggcctctgagaacagactcttattctggtatttattaggacaaagcactttttttaatggagcacccgaaaagctctctgctgcagtcattattaggcatgagtgcttttagtaacttcttgggttcagcttggcccttctctctgccttggtaaacagttgacagcaacatccttgtgtcccaggctc

SEQ ID NO: 61375 - DNA, 1783 bp, Bovine  19866880810226
  misc_feature (1)..(1): n is a, c, g, or t
nttcttctttgttcttttctctcttcttttctgataattccatttcacatgcattacatcttctgtagttgtcctgcagtcgttttctttcagcctttgttctctttgcttcagtttttgagttttcagagatttctcccttagccatatgcaatctagtaatgagcctatcaaagatgtttttcatttctgctacaattaaaaaaaaatcatgtctagcaagatagggtctttcttaagatttccctttttctgcttacattgcctgtccttgcatgctgtcttctttatccattagaactcttgatttattaattctcagttttttccctctcccctttagtggaacaatagagctagaatgggcttggagttggatatcccacccccactctccctgtcagttaggctctgataaccttcaaaacaggttaggatctggttagttagtttcccctgagttcaggccttgttgagtgctctggcatacttaaacagggttcctttccccattctcctgtcatgagagaatgagaggttttttccctctgttgtttactttgaaagcctagtggagctcgtggagttaagtctcacaatactgtgagagttctgcttgtgactgtgtcccccttgaagttttaaaatctcagactttttctcactgagcctccagcagttcattaattaatagttcaggctctcctcccccagcactggttccccttgtggtttctgcttgtgagtctctgctccagaaagctgtgacttcctgaatttgccagcctctctccaattttgggggtggcaatttgacctgtgtcctcctctctcttatggatccaagaagagttgttgaatttttagcatgttttgctttttacatgatgttagcaccaagtggtatcttcaaattccttatatgtgaaaccagaactctactagagttgttttttttttttaaagccaattagaacagtatggatttgagaagctgccctatggttgtgatagtcttgtgactatattgagctgtgaaggtggtcaaggaagacatagttcttaatttgtattctgcttctgtgcagttctcaggaagcctggtcaaaaaaataccaccagagaactctagaggcagttctgtgtctccctggaatcaatacctaaggtgggataaatgtgaacatgatgccagcacatctgctgtccacggctggttagtttcattatccttcagtcacagtgggagaagtttctagcaaaaactaagtgttaaggtaaattttcttaagaacagcgttcagagtatattcttgctgagtcctcgttctgggtagatgattaggatggaggcacactttgaaacagagcccctgtgattatgaaacaggacaggctccattgggtggacatagaggaacatgatctgcaccagtgccaggcaaactttgggtggtcttctagcaaacctaagtctactcatcctcaataatctgcactgtctttttatactgagtaacttaagggtaatgaggcatgatagtcttggttcaggtggctcttgactgcaatttagtcaacttagttttggtaattttcagaagctacagaacattattatcaagtgagttacacttgacagcagctagtctgagggttgcaactgaggtttaagatggaactaggggcacttccagcccttctgatagtaagatctggtaccagcctcctacctttctcatttcatcttgtatgatatcttcccacctcactctgctccagc

SEQ ID NO: 61376 - DNA, 1181 bp, Bovine  19866880814542
  misc_feature (1)..(1): n is a, c, g, or t
nctagcaagaagcaaaagctgtagggagtggcatgaagaaatgtaaaagaattttatgtctttcagcctgggcagaagttgacagagaaaaggagctagcagtcaggaaaaaaaaaaaaaaagatatgaggggaaaaaaggcaaactccaactgaaattctctttttggttttctgtctttgtatatagctttctcactagccttgttaaaaagtaaatatctctgcaaatttaatttaattttccttcggcaaatacaaataaggcttattaaaatgtctttcccttctgcaaggtgcaaactccacgttagcagatttgaaagctctcacataattcagatggcaatggaggctttaactaggccaacatcaacatacaaaccaagaatccttcacgtgtggaacacttgcttagaatgaaattgagtacgtttgccaaacctgactacgaatggtttatttagaagtaaagaatatgaaaaatacaaaatgattttcaaagatagtaccttgatgattatcgacttttactcctaaattcctgattcatttaaatagcaagatgatgctacataattcaaagtttctgtatcttggaagggtatattgtctaaactaaagttcagtctcatttctaagaagaaaactaggagatagggcttgcatgtgtatgaaggtgtagtaatgtgtttttagtgatatactactacacggggccaagtctagggttgcgttgtctagaaaacatcccatctgaaccttaaggttgagaatataatatttaggtaactagttttggtccaggtgctcttctgcctgtggtaagccttgcatgtgaactcgcttatataccttctcagttctagagaaggaaggaagtcgacgggggtacagatgcatgcatgcatgctaagttgctttgctcatgtccaactctttgcaaccctatgtaccgaaccctgtcaggctcctctgtccatgggattctccaggcaagaatattggagtggattgctatgccctcctccaggggatcttcctccaggggatccctgaccagggatcaaacccatgtctcttgtatctcttgcactggtaggcgggttttttaccactagcgccatctgggaagcccaggggtatagagcggatgataaaggcaaaatacgaggcagggta

SEQ ID NO: 61377 - DNA, 1573 bp, Bovine  19866880820681
  misc_feature (1)..(1): n is a, c, g, or t
nttgttacacgtgtctttgcaacctgtaactgttcctttttcagatgaggacactgaagctcagagaggtaggacgctcatgctcacataggcaacaagtgacagtcataatgcattactttcagtttcataaacacatctcaagtggttctttccttctccacctctttgtctgactatccctttcttacacttctgtcaggactcaacttaaaataaacttcctccaatatctctggtctttcaagcttggtctgaatttctctcccgtctccatcacctatatctcttcccctatgtttatccttattgtattaatctttgtctaattgcctgcatccaccattatattatatataaaggtgagattattttccttgccataaaatccctagccataccatgtagcaggcattaaataattgcttaaagaatggaagaatgttgggagaataagaaacacaaattctgttcacttctgaattatagtcttggactggccctttcaaattttcctttctctagaatgattccttgtcttcagagctcttccatcttagttttcatgtgttaaactcattgccagattctgcagtttgctcaatcgcagagagcaaatacaagtattcaacttgtttatttaacaaaataaatacttaggtattgctgttttatcatataagcttgcagaggacatggttttcttgtttatccttccttccttcttggtgccatttcataggcttatggggtgtcagtgttcagagggaacttagaagactatttaatgaaatcccgcagaggaaatgcaatcccagaagcacaaggacatttacccattctcctgctgctaacaagcagtagcctccttttgttttatttactctgtgtctctccaccattttcctatttttggagtcagattaacctcccatgtgggaaggtggcacttctaatagtccaaggggtaccaacctgcctttggacacttaaaaggactttccttctttggggtttgccaaaggctgacttcagtattaaaagaaggtctcctattatctggtgttacaaccttggaacagccagcagactgaacagtcacacactaggaagcaaaatgctgaacagaaacacagccaattctgtcagccatccaagggtgtgtagctcagccatgtcagctggcaacagtgtttgcagcaaccagtcctgaactcactggagccatggcctcacatctggagtctagactgagtggctctcacttgggcccacggcctcttcacacctccagacctctctctagtgctctcactttactttttcactttgccaactttttttttccctccggtctcttgtgattttttttttcttctttcgtttatcctttcattgttcttttctcaaatgaattctagcttagagacttactttccagatactcctgacaaacatcatagagaaaaggttttcccaacaatgaggagtccatcaggacacgatgtcaaatgtcaaagtgtacagtgtctgagaaaggttccggttcaagattttccactcaccagtgcat

SEQ ID NO: 61378 - DNA, 783 bp, Bovine  19866881104441
  misc_feature (1)..(1): n is a, c, g, or t
natgccctgattcctagtatcctgctatttctagtgttacggctacaagtttgcacgataaagtatctaccagactcaccaaacctggtgacccaaactgtatcctgtgaatacacgtaagaatgaataacaggcccaaataaaattgcaacgtgtaaatttttaaaagttaaattcaagagtggataatatattgaaagccttgaaaagggaggaaacaagaaaggaaggaagagaagcatttttttgtttgtttttctagttgaaatataacgacctttaaaataatatttcagaaaagaatggttgactctatatatgttatcaaaacttgggattcattcttctggcttatgaaaatggaatgataaattgccaaagaatgaaatacagctatgcagatgagaaaagagatttttcacacacaaaaaattataaatctgatatctctggagagaaaggcagttaagttccaaaaccaagtatcatgactgataacagatatatttaaaaataatagatttaaagtaaacatagtctagaggcgttaagaaacaatccattagaagtagaaatcgtgttagagcatcataataatagtaaataacattcatttggtacttcatacgcacaaacactattctaagggctttaaatacatgaactcattggtctcctacaacatgtctgtaaagtatttatgtttattcctctcattttatagatatgaaatgaaagtactgctggattacattgcttatctaagattgtaacactactaat

SEQ ID NO: 61379 - DNA, 1422 bp, Bovine  19866881465688
  misc_feature (1)..(1): n is a, c, g, or t
nacacagctacatcttgtgcagtaatacttttttaaatgtagggcctgagatcattattactttttgccagtgacctggccatataatggggcttccctgatggctcatcaggtaaagaatctgcctgcagtgcaggagacacaggaaacacaggtttgaacccctgggttgggaagatcccgtggagaaggaaaatggcaacccactccagtatccttgcctgaaaaatcccttggacagaggagcctggtgggctactccatgtggttgcaaagagtcagacacgactgagtgattgagcatgcacagccatataatgaaaggttttataactggtaatgatgaagttttttctccaatgacaatttttaagttaatgccacaaaactgaagtacttttgtttttacagctggaaggaatctttgtgactctttagtcccacaccttcatttaataaaagcagcaccctgaagcccagcgaggcaaagctctcatctctgtggggtagtgacaagcatcaggaggcctcttcccacggccccatcgggcctctctgaacctgacagccaactgaggaaccctgtgctgaatcactggggaggaatactgaagttccctgttcttatccacgtttgaccatgatatggtgataactatggggaagtcacttcaactctccatgtctcattctttgcatttgaaaaaatgcataaaacttttatttcttgccagtccatttagagagacaaatgaacacatacacaaagaagtcctttcaaaacaagtagaacttttgaaggcatcatttagaaattgagttttcctcaactagcaatagcatgatcaagagaggaaataaattgccttcagtcttgaaagcatcaagaagactctatctcatatccgccaagagcatcatttaattacctacaggtgataccaactccgtggaccacctatcccaattaagcagcagcacatgctaattatcattagacttaattggtttcccaattcagcaacttccctgatcaagtctgtcccagttaagtggtgtttattgaaccacctgaatctcgcttaaaagaaacaaaagaaaatttctcgtctccagttcagcaaatataacctactctcaccaagtcacactatccagtttctaattaaatttgcaaagcatacgctggggttgggtccaatgtgcgtatcttctccaattagtaaatctcctccaatttcagtgaaatcaagtaagattaagcaagacattccaaacaacaatcagtaaatgtgtgaaaattagcaaatatttactaacatttccccttcttgtacacatttttggactaagatgctatgattgtgtcatactttaagattttccaaacttgaaatgtgctttttcagcaataacacttat

SEQ ID NO: 61380 - DNA, 856 bp, Bovine  19866881572446
  misc_feature (1)..(1): n is a, c, g, or t
nttatagtgatctctgggaccctgatcttttcgaacctcctcttttctcatttttgccacaaggacttactgaaaggctgtcttgagacagcagacaggatttgaccccaaacagtttttcttctccccccataaaaaggtttcactactaccattctctgcatggcatgtagtactgggagacaatacgtaagagacaggatgaaactattctgttgaatcaagaatgaactaaatgccagagactcggtgttctagatcagcaatttccaggattgatacatcttaatcaagtaatgaggtgactttttcggtggtgtttcccacaccggagagaggaacagatttgccgctttgctccgatggctgctagcagcagtgttggttgttaacagagacatttacacggaaccaccagttggcaggggctaacactatgttacttgctattcccacatgctgaggattgtgggaaggctgccaagctctctgtctcatgtagctcttcagtataataacagcaacagccacaaaaaaagcctggggaaaaaaataaagaggaaaaagaagaggaaaggaaacaatggaagtaagtccctggtttcctattaaacacgagtggaatgagaacattttagtggcactttcctttccctctcttctttctctgtctctcctttgctttctctctttctccctccctttaaaaggcatttaaaattgaggtggatgcttctcaaactttaaagttttttttcaaatcacctcagggtcctattaaaatgcagatcctgattctgccagttggagggaaagctaagggtcttcatttctaacagcaccggagatgcagagg

SEQ ID NO: 61381 - DNA, 1363 bp, Bovine  19866881919082
  misc_feature (1)..(1): n is a, c, g, or t
naatttccctggagttcaaattttctcccatgaatatttttcagcagtccactagccttatgaacactttgattcttaatgaaatggttagcagaaggacagttgcatgttcagatgttgtatagctccttggaagccagtttcccacagcatttcaagttcttagaattccattgatgatgttctcacactatgaatgctcaaaaattcactggcaacacacatctgtgtttacccttttaatcaggacaatgtccacaataattttcatattcctaaaggattgagtaatacctttagaatcttagaaggcaaacatgacttatgctggacctgaaatcatcctaccatccataatatgaagagtccaaaattggaagtcacttacaaaccagaagcagaagattgtctgaactgcctatttctggcaaattactataatgaaagaatctgtaaagttgtgaaagactttggtcttgttataagggtctttggctttctttttctcttcatcaacattccaaatcacttatatttgaattagggattttttttcccaatatatagtgtatactgttgtgcatcttgccagttttatttatttattttttttttttacaacaatgaatacagatgggagcaatcacaggatgaggcaggatcatcagtccttccatgttttatagagagaaaaaaatgtttgactcctaattagcctttcttaaagggtcttaggaaagaaatagagatcccatgaaataaatttcctacaactctggggtataatcagaatcaaagaaccagaaagcaactgaaaccacacatgttcaataacagtcactaccactctgcttcccactctcttggccaacattgttaattgatcacattagcccaatggacccagatatgagtgaagaattgttctcaacataaagctttaggtatctatttccaactgacagttgatttaagttgttgaatcctgttatagcaactttggtggggggttagtcactaagttgcatccaactcttgtgaccccatggactgtagcctgccaagctcctctatccatggaatttttcaggcaagaatgttggaatagatttccatttccttctccaggggatcttcctgacccagggattgaacttgggtctcctgcattgcaggcatattttttaccatttgacctacttcagttcagttcagttcagtcgcttagtcgtgtttgactctttgtgaccccatgaattgcagcacatcaggcctccctgtccatctccaactcccggagttcactcagactcacgtccatcgagtcagtgatgccatccagccatctcatcccccgtcgtcc

SEQ ID NO: 61382 - DNA, 774 bp, Bovine  19866880476908
  misc_feature (1)..(1): n is a, c, g, or t
ngtgttggtgaaggtggtcgtgtgacagcatttgcagaattaacaaaagcaggttgtactggggagttttatgcgggaagccggtaaggaattgcggggagacgctcactggctgccttgtgccggcttcaaggatgtgggaggcggcgcccgcggtgcagagagctggccagagagccagttctgggagacaggtctcgccgcccctggatggacctggcctctgcccgcccctgccgcccgtgggacccaagctcccgaacttccggggtatgccctcggcagtgctgaaggggagagacgctgccgagggtgccaagcagctctggctggccacctctgtctgtcacccgatctctcttgcccccttccacggccatcccctcaactgacgtgcaacagttagccagaccctcatgatgccctgttctgccttaaaattttccaggaattcctctgggtttggcggcagtgtgggtgaagaaaagagcacacggggtccaaattgcagcctggaggaatggagcacgggagacccagaccagtttagaaatcaactgcgttatagagcctccagctgctgtgtatgtgtcagagacagacagacagagacagagaagagagaaaggatacccgtggagcaaagtcgtcagaactcaggctctggtagctatttagggccagcagaagagctgcagctatgctcagctcccacccccgcagccaggtaggggctcaggtggcacctgaggggtagtggaagaaaagcacatt

SEQ ID NO: 61383 - DNA, 1805 bp, Bovine  19866881249379
  misc_feature (1)..(1): n is a, c, g, or t
ncagtaagagccaatgatggctgcagggtaaaaagagaatggattttctaaagaatgtcatgcataccatcgatcaatacttgagattatttcaagtgcttcagagatatatacatgctttttactagttgtgtgtttattttaatatatattataaaaatatatacgggcttctcaggtggggctagtggtaaagaacccgcctgccaatgactggagaatatgcatggacagaggagcctggagggctacagttcacggggtctcaaagacttgaacaccactgaattgacttagcacacacgcacagaaaaatatataagtagcatatcaagcctgtgattacccagataggattgtttaagatgaaacttaggatggttaagacacttgaattttaaaaagaaagtgaattaaaattattaaacaaggagtggtacttgtggcattgtatttagagagcacttggtggggagctaggcggcagagttagctgggtgtaccacatggcccggggtcagccccgccagtaacagtcctgtcctgcctccccttcccccacctcctggactctctcttcgcaatgtttgccccaggtcttgccctcctttgtcttgttcctgctatttctctctctgctcctgtgtgaagagctttctctcaccatctccttatcattgggttttacaaccctctaattcagactgttaatatgagtttctccttttttatataaaaaattttacccctttatcttaaagttttatagatgtgtttatataaatacagcggtaaacaattgtctggtagtttccacaactcctcccaccacccccgactcctgttctcaagcccacctgtacctcccagtccttccagcatcattgtgaattctcatcccaggatgtgctatcgacaccttagcagaattagacctcagttccagcagtgataacctactgcattcagatggagcacagctgagcaggatgactgggtctgtgaataaggttcagtgtttgaacacactctttgcccactgctgctgggacaaagcattcatccaaatgccacaactccatactccaacaaggatgtagaagaggggctgtgacacaagcatgacatgcaacagggaatacttaacatgcaagagacaggcgacacacatagagtcacactccagtgaccacaaagataaccttctgtgtggaaccaggatctatctcacggctctagcctcaagcccggggaaatgtgcaatgcctggttcaggttcaacatcaggcaagggagacaagtgtgtcattgccatggtctggagcaagcaggtctgagtcccagaaacacgcttccctttctcctttctcccttctccctgtgacccacaggcagctctgggaataaccagttgtggcccctaggcacatggtttaaaggacagccagagatttattcggagatatcatggtgactattttggaacaaagaaggaaatgggaaagcagagggctggtagcaatatccctggacactgaccacccactctcagccacactccttatggtggaggccacattcctgggatgtcccaggttccacttcaaccttgaaccaatgctgttttgctaatatcagaggatacagtggtaggacttagaggggtgatatggaggtttccaagagcaatagaaatcactgggaaagagtccatgagtaaattctgttacaatccctttttaaaaatttatttagtttttaattgaaggataattgctttactaattttttttttgtcacacctc

SEQ ID NO: 61384 - DNA, 1483 bp, Bovine  19866881366811
  misc_feature (1)..(1): n is a, c, g, or t
ncttggctattgtaaatagtgctgcagtgaacattggggtatatgtatcttttccaagaatggtttcctctagatatattaccaagcgtgggattgctggatcttacggtagtaaagcgtcatgttttagacttcctgatacatgattaaacacttcccttccctcttaccctgtaagttgacaaaattctgacaaacatataagatctgattccatgacatttcgtatttagttagcaagtaaatagagatgaagaatttcaccttcgtttagttctttattgatgtttgagaaattatgtagaggtggaatcttaagtaagttgaaaacccggactttcatttttctgacccttgctgccaaattccttccatagggaagaagcagaaacctggctcagaacagtgaagtgagacagagaagagcagcgtctctcccttccagcctatgtccgtggttccccgtgcgcaagcgggtatatctctgtcaggcaggaagccacagccttccagccgttctcagcttttgtgtcccccttcaggtaacaaagcacggatcccagttctgccctgaactctaaatctaagttaaagaagacacacaagagcaatgatcataagtttcaaaagaacagcttggtgagcttagggaaaggaaggaaaagagacttagcttctttgttgcccgtaggatgggatggtgagagcaatttacttcctctgagtcccctggtttatgtaattaagtacctggggattccagagcattacctcatagcaaagattaacaagtaccaggggcactgatccccagagggcctgggggaggggtgtgaaagaggcgtcagcagagagagggagggttaagggccaggcatcgctgggggtggcctctccctccttctcttggctgtcatggggactagcaacaccacaggcttaataattagcttagtatctgcgctgtgggtcgtgttcagaggtttctccgggcaggcagattcctgctcggttgttccacctgtgcacctgcctggcctccacgcagcccagcccctcctgcctgcccggcagagccacagtctgcttccagcactaattctcctgctgtcactggtgccaccatcatcgccacaactccaggagagccaggctgtgaggagcgggctctgcagtctctccaggtgcccacagagagccagggccgcctgcacacagctctccgcagccagggaaaagcaggggagggctggccctgcatccctgactaatgatcacgccttcgagacggatgcagcctgtgactcaaactgtggaggcactgcaaatggaaaagagtgggagggagtagagggacacagaggaaaacacagatggggggagggaagaaggagagaaaaaaacaaaggaaccaagctctctgaactttgagtctagaaagggctttcatgcccatggcctctgcagtcattaaagtacaaca

SEQ ID NO: 61385 - DNA, 2306 bp, Bovine  19866880544198
  misc_feature (1)..(1): n is a, c, g, or t
natcagatcagatcagatcagtcgctcagtcgtgtccaactctttgcgaccccatgaatcgcagcacgccaggccttccctgtccatccccccaacctataattgattacatagagttcaaaagccagaaagcctatagtattgaggataaggacatggaggagggaaccaggtgagaaatagaagggaccaggaaggggctttctgagctggtggcaacaatgtttcttgaccccaacagtagtgatgcaggctttccactgatgaagatttgctgagctgcacatgtgttttgtgccctttcctttagtgtgataacttcacatacaatgagattgaagttttgtaataatagccttaatttttttccatgaattttgtttgtaggtagatacaatgcataagcatattaacaatcaggttcaaccattatgaaggcagaaaacggaaaacagcttaaatgtccatgagtagatgacaagttcaataaattaagacacatccagaaacactgaggacacttgaaaaagaatagtatggatatgggactgtcttcaacacagatttaagcgaacattaagcaagagatgtagaaccatgcacatcatttcatttgcatgtaaaactgaagaggaggatacatgtatgtgtgttttatatgcatataatgtttctggaagaacaggtgaaaaataaagcccagcagcagtggttgtctctgaagtgaggacaccagaggtcatggatgagaaggaaactcttttcagtgtacctcttggcatcatgtgaacacaatcccaactatgctacctttcaaagtaatatgtaaaaaggtaagatatatttttaataagctgaaataatcttgagagcccacttccctattgttgttgcatctggatggatcaaaatgccctttcttggggaaattactccacagcctggagtagagactgggaacgagtgtctgtgaagagtaacaagggaagctgagagacaggggccaagcagagacaggtctgagaagccagggcacgtggagaagttaacctgtctgaacagagcctgcagcaggaatgagccaggcaaggacaaagaagccaggatgctcaggccagggaaattagacaacagcaaacacgtgagacgcacagggcccacagaaaggagacgtgcctgggcagggaaatgcctgtgaagtccactgctcactctcatgagccaggtattgctggcagaatgaaacgagcccaggaaaagaaaaaaccattctctcaccttcttacttgtattgatccaaaatacgaccacccctgaacgaagtctgtgtctactccacagtacctgtgtgtagggttatgcacacagcggtcttgaaaagaaactgttgactcaccccatttcctaaagtacaaaaaataaactttcctcccagtggctcagcaggttttcagaccatcagcctggcagtgagcctgagctactgactgatgggcaaaccagttcataaaaaaataccaggctttgattatctttgccttgttacccctgacctgatcattccacactctctgttaaacagattcatcctgttaacaaccatcatgtccacttccacctttaatatttgttgaagggatgtaggttttgaagaatacattccagaggatcagatgccatactaagggctctgatgcattcatctccaggaccctacagactcccacgagcgcagaaaagcctgtaagggaagcaaactgaacggagggatagtgccaaggccacaacaggcaggagatccattttccaagttatattctagccaacagggtccttttgccatttaacacatctatagcttttgtatagcgatgccaagtttattctcggtgcagttttttgtaaatcacatccaaaataagatttggaaaaaaatgcaccttcttatgagcccactgtgtacttgaaagacccagcgcacaaatcatttgcacctgtaccattttcatccagttctaagctaattttaaaaaggctctgaaagcctgccaacagcacatgtgcagagaagataaaatgtaatagcaattaatccaatcatctctgatttaacgttaatttaacccagtggattatgccttgttttgtgtgcaactgtgttgatcctgctacatttcagagagcccccaaatcaatcaagtcacaatccctaattgcagtcaaaatggggaattccactcagcagagcccttctctagagtatctgttcctccccaggaagaaagggaagtcaaagaaagaggcat

SEQ ID NO: 61386 - DNA, 1293 bp, Bovine  19866880693533
  misc_feature (1)..(1): n is a, c, g, or t
naggggagcacatgaagaattttggacaggggacaggtatgatcagaactatgctgatatgctgataggttgggtgagaggagagaaaagaccaaagttgcagagacccatgaactagtaggttaaacaatgttgaaagggtgagagcatggtaaagtttcaggttaaaatttccttttgtgcactcaactcaggatacacaagtcaatacagagctctaaatccttaatctaagacacaccaagtaaatttcagtctgatgtttaaaactagctcatcatgctggtgttacagtttatgctctgaccctcactgctgtctgaaacctgatcccaagaacacggggcgtgtgagatgaatgtatagtgaaagcaacgagctaatgtatctgaactctgtccagtttctatcacacttacattgcctaagaagtgactgtgggcctagggccttttcagtagtagtgtgtcgcttaattttacttcagtcctgttaatgctaagctactctaacgctttatcatccagatagctaaatttgatgccctccccttccttttcagttcatatcaatttaggaaggaagcattaacaaatgcactgaatatagtacttttcgaatcaattcttgccctgctttatctattggcattcgaatttatttaaacagtaggctctcatttcacttaaccaaaaagccaggattcagagcaagcatcaggtgacactaatgtcagcttaattagtcaatctgtgttaattatcaggtaacttggctaaataataaagccattcatgtcagggacaaagtgattttaaaagtctctctttaacaaggccttacttccctaggacagtctagcagccgtcagagccacaactgttatttacagtggctctcttttagagattctattttcagacagaggatgagacttaaggatcaggatttaaggtcaggagatacaaatcagagttagtggaagcctcacacaggagggggatcgctttaagggtttggatgatatttagaaaggaagcagcatcatatgtttcactcttaaataattaattaaaactttgaaaagtatgagaacaatctagataaaattcaaaccaccttcaaaattaatcaaccaaaggttgagaacctattgtgtatatgggtgctgttttctgatctttttacttatataatgtgagcacttttcccccatagtgctaattattcctcaaaaacatgtgtctaattttacaattaaactggatacatcctcagtgacattttaacctt

SEQ ID NO: 61387 - DNA, 1602 bp, Bovine  19866880780029
  misc_feature (1)..(1): n is a, c, g, or t
natccttttatttttttgagaatctgttcagatggaatacttattagatttatgcctgtttattcacttggtatgtgcttattgagtgcttactatatgctgggttctgctaggtcctcaaaatacagtgatggacatgatagcccctgtcttcatgaaatttacagcttaaaagggaagaaaggttgtcattgaacaaataaatgacatatagtgatttaattacagatgtgttaacagacaaagcatacagtgtgcaatggaagtcattaatatgggaactgccttgtctcaggggttagaggtgattttccttaggaaatgatattttagctggcattcatagaattagtaggctttagatcacatgtgctgtaatagtacattttaatcaaatcattgaaatcagatatttacttgtagaagaaccaattctatgtgatcaaatgtctagaaggtttatgtgaaatttaatttaggaaatcagtatctctgtgtattcatagaaaccaaaggttaacaggcaaagtggcaggaatgactcagaaggtcatatccattcactcaacaaacatttgcacaggggaagcagacaaaaacctttgcccttctggaagctgtgctgtagtagagcagacagtcaccaataaggtaagtcagaaacacagggaacatggtcagtggttggtaactgcagtgggggaaaatagagcagccaggggcttagggagtgttgggggttgtaaagttactgacgcctactttatacataatgtcttcagtctctggtttgatgcatggaccagctacttggatcgaagttggctggaattggttccatatttgaaagttcgctgacattccttagagctgtcatccctaagttgtgtaattttttacaaggtgaatattattatcattcccattgtacaaatgtcatttttcgcaccattgtgattggcagacttcagagagggaaaggtgctggtgtagacgtttttgactgtggtaaagtcagagcctcatatgttgtctgagggcccttgtatgtgcagaagaatcaagacattgattctggttctaccatgcatttcatctggaaaatgaatcaacctctttgatccacagtttccttattgtaaaatacactcttgcctccgaatccatggaagattgttcccaggactccctacagataccctaaagcatagtccgttgaccctccctacctgcaggctcagtatcctcggattcaaccaattgaggaccgattttctcagattttctgaagcattcccaaaattcttgatcggttgactccttggatgctgaatctatggagaggaaaggttggctgtgaatggcttggaccagattctgtaaaactcctttaaacctagagactttcttctctgaaaggctttttagtttttctagggggattttcattttcaggaacatctaccccagcctttgaaagcactcagtaatatgggactttgcctgtggtggcatgtgggccttctgtcaggcaagtgtagaagacactgcacttgcactggcatcatttgaataataataacacatatttgcacattccta

SEQ ID NO: 61388 - DNA, 1118 bp, Bovine  19866881123081
  misc_feature (1)..(1): n is a, c, g, or t
natgctgtccgattaattcctcccaaagacttttctacaagactattcatcctaaaacttctggcttgaaacttttcaaggtctttggggtgaccattagagaatatgtttaagaaactatcaccttcttttcttctttcatcctggtaggaagctgtgctcttctcaaaggttaacgaggttgcagaacctcagggagtgcggccaggacacctatttcaattgctctcacgtgcttctcttgtttaattcttgcaagcacagtctggagcctgcgtttagagttgcctgctgctcagcccaccagggcttccttcagaagctggctggacccagaaacagccagacactctgagaatctttaaacgcttttctgacagaaggtttggccatttcttctcccagtgctcattttaaagttaagcacgtgaacacacactttttgaatcccaaagaagacttttaattgattccctgaatattttaaggtctattaattccattgatgttgcaaacactgcaattcattccagctgctgttctaatcacattaattaacaggcttatttttacctgccagctaatattttacattgcatcaataaatcttcagctttctagccaaactgtgtacaaaataaaatgaatcacacagcctcctggttgttccacacgggttgagtcagccaggatccttccttctgaggggggctaatcaggcatgaagataaagatgatagtctaaagaatgaatatgattatccatttcaagtaaatgaattatttcaagtaaagatttttcttgtatagtctattcatttaattcatattttatatcatataaagtgtaaagggaacataacaggtcactcaaatgtagctgaaagatcatataatctgttaaaatgactcatataccaatgtcctttatgggacacaattttttttcaatggtgatgtttaatctgtatataaacacctatagtatcttcttccatccttatggattggcaataggcacttctggaggggggggggggggaaacagcccacaatttaagtgtgtagcatgtgtcagtaaaacagagaacaaaaatacccacatataaccaaccaag

SEQ ID NO: 61389 - DNA, 1596 bp, Bovine  19866881135035
  misc_feature (1)..(1): n is a, c, g, or t
ntttactcaaactcatgtccatcgagtcggtgatgccatccaaccatctcatcctgtcgtccccttctcctcctgccttttcccagcttcagggtcttttccaatgagttgattcttggcatcaggtggccaaagtactggagttttagcttcagcatcagtccttccagtgagcactcaggactgatttccacaagtgaccataaaatgagaacattcggccctcagctgagaaataaagatagtcagagggccatcaggcccagagttgccacctgtgtcctcccctctccagctggctcgtgggcagggggaggcccagagggaaccgaatggctctgcccccagtaaggatgtcccttctgctatcagctggcatgtcccacttttctcattcattttgtcccctcctgacagtggcccagctatgagcgagaaggacgctcacgccgtattaacaccacatattcattcattcctcccaagggttagaaaagaaaagtaacaattctaagaacttcccttccaatcgacattcttagcaaatacattttaataagataatgcaaatcctgctatgtaccaaattggtattttcctttgccagccagccaccaggcccatttcatacgaggcatcagagactccatctcccagtgtttgggggactcatggtgaagtctaagtgtattaataatataaaatattgccactaaaaatatagatactgttctacagaaatagacagatgtttcctagtgagtaatgagtaccattttcctccagctttcctaacagtctgaagctaaaaacaaacacacatttttatgtaaactagacccatctcaatattaagaatgtaactgacagtccagaaaatttagagaaagaaatgacaacccactccagttttcttgcttggagaatttcatggacagaggagcctggcgggctacaatccagaggatcgaaaagaatcagacacaactgagtgacaaccaccactgacagtccaaaaaatttagaagtcaagaatcagatttttttctctttattgtcacatgtatatgtgtatgtatgtacatgtttacatgtacatatgcatacacacatgtaatgttcttgagaaaaatccattcatttcattaattaacctgctcaagacaggtaaattgaaggaaagggggcaagttgggacattttgatcctgcctgacattcttacttcatgcttgaaatgggacctcaaagaagcatggagtgttggggccagaagttccttcaagatcaaagggcaagctcttctcactagtgaggaaaccagggtccagaaaagtcaagcgacttccccagagcacacagccagctggcaggagagctgaaaaaacctacatagattctagtaagacaactcctcagagaactgggttatgagatatgggagagacaccagtcagcctcttgcctgaaagaagttccttccttaaaatctttaagacggaaatttccaaactcagtagtcctctggacctgatcatgacatagcaaggacataccagcagtgatgctggcaagggtcaatgagcagtgtgtgtgt

SEQ ID NO: 61390 - DNA, 878 bp, Bovine  19866881269676
  misc_feature (1)..(1): n is a, c, g, or t
natgagtcatttattatcttagtggttagttttctaattagaaaaaaatgagcccaataatacccacttttgtccccatattggataatcagggataatgtctatacagtgtctgacctttgtaggcactcagtgaatgatagctatgaaggttactttgaaaacatacctcaagtccctttggtgcagatgttcacaagcacaatatatccacaccccctcctcagtctgtatcaaatattcagcgtggcctccaacacatttactgctttgagaaacaaagcgatgctaaagctgaggctgtttttcgcttgcacatgtggtttctcatagttcaacatgtgtggcttggttcttggattcctctcagttcattatgcaacatcctgatgttcccaagatgctgtgttggagagagaggtacatttaaaacagacagaaggaacagaggctggctcagtggtggcggcaggagatgaacttgaccagatgttccccaacctcccacaggctgtgacttacaggtggcccctggtgctgtgtgcaggaacttgggagataacctgttctcccagctgagtcctccatcgtggttaggtcagagcccagatttatgagctcctggagaggtagagtacagatggagaaaatgtcaactttagcttttgtgggaggatcaggaaggaccttgaggaattgccaccgccatgacttattggagacattatactcctgaaccctgtctcttgtgcggctcccctccactgctgacttcttccccttctgcctctgcacaataactgattatgcctatggattcaatccttacccttgacatccttctctattgatatttgtggaagcttcttttatcttcc

SEQ ID NO: 61391 - DNA, 1163 bp, Bovine  19866881322298
  misc_feature (1)..(1): n is a, c, g, or t
nttgatagattttttttgataacccaaatacatgatctcctctcatagcctcttctgttatgtgatgacatagtcctgttatcattctgagaatggtctcaaagagccactaagctttgggggcaattactaccatgaggaacagatcaatatcaattagaccaactctaggactgctgcttttcataaacacgcttcagcattttgcttctagatacagagcaactctatgaaaagattaactcatttcattatttaacagagaattttgcaattaactcatccaaaccgagtcattggaatacagccctacacaaaaccaaatattctataagttatactatgccagaaacgaatatcatcaaaactggagtttggctccacggccaggctaaggaggatgctggtgatagaactatgccaaaggtgaggtcattgatccacctagaccacatcagaccgctcctaccatccctgaatgtccctgtactaggttctatgtgctttggctaccaacgaccagcactcatgtgtattctttggaggaaaaccctcatggtactagagcagctttgccctgcatgggcagagagctgtaagggtctggatgtttacatcacatctcacagccccaccgcagggaatcactgacaatcaatctgaataatgggtgcaggatacaaaagcccaactcttctgcctcgggtaggaaaattctggtgtataaattacagcccagagttcttctgtggctcaggtgatgctacccatgttagtcagaattctccagagaaacagaactaggttacatagatgagagatgatagcttagccagataatgagaacttgaatcatttgattatgacggctgagaagtgccccaatctaccctctgccctaggagacctaggaaatccagtgggataatccaatctgctgctgaagacctgagaaccagggggaatcgtgatgcaaatgccacgtgagggcagagcagatgagatgagatgccccggatcaggcagggacgcagggagaaaggaacggattccttctcctgctgcctttggctccattcaggccctcaggggactggccaatacccaagccacatgatcttggggagggcaagtccttaactgagtccaggtgctaacctcat

SEQ ID NO: 61392 - DNA, 1628 bp, Bovine  19866880285419
  misc_feature (1)..(1): n is a, c, g, or t
ntgcagtaagggccatttgacattttattcagtgacccttaccactcctaaaatacagtttaatccatcttaaaagttggagctaaataactgattacagcaatgagcaacactgtgaaagttttgataaaccaaagcaaatcctcctctctctgaggaactcatataatagatcgatagtttgcatccaagtaagtatgctgctgctgctgctaagtcgcttcagtcgtgtccgactctgtgcgaccccatagacggcaggcccaccaaggctcccccgtccctgggattctccaggcaagaacactggagtgggttgccatttccttctccaatgcatgaaagtgaaaaatgaaagtgaagttgctcagtcgtgtccgactctcagcgaccccatggactgcagcccaccaggctcctctgtccatgggattttccaggcaagagtactggagtggggtgccattgccttctccgccaagtaagtatgggaagtgtttaattccatctgataaatagtgaggcaaattagaattgattagaagataaatggcatattatagactcactttgtcttcatgtttagtctcaaacttaactttcttattactctattaggacttaatttcgactcagttattgctttgaaaactggtcttagagatctactctacaagtctacatttagcatttggtatattgtcttatgtgctcagtcacatctgactgcttgtatcctcgtggactgtagcctgctgggctcctctctccgtggaatttccctggtgacaattcttgagtgggtttcaatttcctttccaggggggtcttcccaacccagggattgaacctgtgtctcctgcatggaaagcagattctttaccactgagccacctgggaagcccattaaatagaatcgttacaacaatcttacaaagggaatgtaattacccacttaataaaatccaaaaatgaggtcagacaagttgactgacttttcctaaggtaatgatatctctgattatacactaataatcaattttctgaaaaagaaatagatcaatcaatcccatttgcaataacatcaaaaagaataaaacaggaataaatttaactaaggagatgaaagatctctattctgaaagttacaaaataccaatgaaagatatcaaagaagatacaaataaacagaaaagcatcttgtgttcatggactggaagaattattattgttaaaatgtcaatattatactgtattggtgtttttccttctggcttacttcactctgtataataggctccagtttcatccacctcattaggactgagtcaaatgtattctttttaatggctgagtaatcctccattgtgtatacataccacagcatgaaacgagtagccagtccaggttcgatacacgatactggatgcttggggctggtgcactgggacgacccagagggatggtatggggagggaggagggaggagggttcaggatgggaacacgtgtatacctgtggtggattcatgttgatatatagcaaaaccaatacaatattgtaaagttaaaaaataaagttaaaaaaatgtcaatattactaaaagcaatctacaaattcaattcaat

SEQ ID NO: 61393 - DNA, 922 bp, Bovine  19866880718878
  misc_feature (1)..(1): n is a, c, g, or t
nagttgatgatattggacagtgtttaattacaagagagacaaaaaacagtggcaagctcaggtggaatttgatgtatataggagttaaaatttagcaattaagctttggtttaagataagcattcaagagtacatacaatttgtaataattttctctcaactattcaagacaaaaaatcaatagaaactaagttgagggagaaggctaatgagaaaaagctgcaattttttaattacaccataatgataaatggctttcattgtaaattaccatctgtgatttttttctttcactctataaattgcaattaaagttactaaaaatagctagtttataagtgaaaagttttaggcaaaagattacttggcattacagcctaccgaaacaaaatggataagcttgtgattaagctcaattgcattacttaatattaatttggtcttccccaaatcacggaaaatcatagttaattgatacagattaggtcatgaccacttgcctaagtccacatgaggaaactatatttaacatgcttcttgtcctcttgaaaactatttacttgcaaaaataatgaaacatataaaagtaataaaatggttaaataatatactgctcaccttaatttatagaagatgccaatgaatagtgccacaaatatgaatggaagacaacctgtgcaaagttcaacaagaagcaaactttgaaataataaagaataagtttcaatttatagctcttccacctatttttgtctgttaaacagtacctgagcttgcatttcccaaacataaaataatggtgctaattaaaatttcaattaagagatagattgcaataaagtatttataagtatctatcagacagatgtgttctaaatgttttttatgccaaccagaaaaaaaaaagttttttcttactagg

SEQ ID NO: 61394 - DNA, 906 bp, Bovine  19866881063909
  misc_feature (1)..(1): n is a, c, g, or t
ntggaagggaacatgatggattcaatcctcagagaatgtggttacatgaaaatgagtcatgtgtgatttatattcaatattggatataaaaactgtctgcatatattttgaaccaggtacttaatttgagaaaccttagagagctaaggaatagtcaacattttgaagttatctaacaactcttggcaaaaataagaccacattaaatgagaactggggtgattttattaagttgaaaagataaacaggaactttgacacagaattgaaataaaaacaagatcgaaggaatttggatttctgaaagttaaaaattatattatcaaactagtatttatgttctttctactgatgccgtgagctatgtaaacaaagtctttggatcttatttagcaaaatagcattaatagtcagaaagaaattcagatggtctgaaaatagtcacattgaaatggaaagaaaattacctgaaagaaggtataacacagatgaaatggaggaagatatttcagatatttggagtatttggggagaattgggaacaaaatgcttttcgaggcagaagacacatgcgcattatggcctttcatctgatgctcacttcagtagtcagtctataatacaattttatgcatagtctaaatgtcttttacatatttcttgttaagacataacattgcagaatgaaaatcacctcttacaggcaaaatgcccccaaagttatcatctaatgttaaaagggaatgtgatttttcaacatctgaatctgttaaaatagctagaatgtaaaattgtgtgaataataccagttttttaatagtagaatatcattcaacatgttaagatatttcaacaaaatgaaaggcgaaaatcactcatgatagatattcataatcaagtcgaatta

SEQ ID NO: 61395 - DNA, 1633 bp, Bovine  19866881098064
  misc_feature (1)..(1): n is a, c, g, or t
nttatttctgataagttcattttgcaacatacatttaatttttttaaatgtgtggttaaaattgagatacctagcttcttattctcaagcatctattattgctatttcaaaggacttaaacttttctgtgttgcttttgctgaaataaaacaggtggggaaattatttcacacattgactttgttaaaaaatgtgattttgtggatttttcaaattagtcttccactatcaataataataccccttgaatcctgtcccaggtctcaattattagcaccatttgctttagtgtccataagtcacacatgactaatattcagcatcatgtcttgaggtgttattatggagcaatgatcaaatttattgttctgttttcctgatacactcaatacaacacaatctgtctgacagaaattgcattactgatgctttaaaaaatatgtctcaactcatttcagataagattgaaaatttattcttgcttctgaacatatttaatatacttaccatgtctatgattttttcttagaaggatataaaaacagcttttcaactctagtataaaaggtttaaggtcatgcttgactctcttcatccttggaagaactataaacattctacgtaaaacatttaagaatattttatttaaagcagacttgcgaaaaagcttaggacattttagaaaatatcctttgaattgtccactcacccttctaatatcaacactccaattgtgcattgctaaattactgctccctgggataacatacctagattcatggtttgctacatttatgtatgcatcagtacataaaccttagtatacccaaagtgaggttaatatcattattcagcacgcgtgtggataatgcttaataatttatgtctttcagattttcaaacttgtaatgtttctaagtacaaaagagttgacaaatattctgccttttatacatggatgtgtacacttatacacccatgcttcatacacttcttcatcttttttttgaactaaaaacaaatcgagcacagttaaccactctacttttgaactattttcttcacttagctcgcaaggaaccaatgaatctgattggaaatctctcctacccaagactggtcttgtcagcctccttcctttaccctttcctcttgctgacttttcagcactgaaatctcctagagtccgttttgtccctccttcattttgctgtctatatccacttcttcgatcatcccatccagtgtcatcggttttaaatactatctaactgtagacgactcctgagttaatacctcccatcagactgcttattcaatatctccatttgggtatctcaacacggtcagaccacaaacaccaatcagactctcaccttctgcatgtcagtcttccctgtctcagtagaaggcagctctctccccccagtcatttagattagaaatgttggagtccttctaactgctctctttccttcatattccgtatctaatctgtcagtgaatgctgcctggtctaccctcaaaatacataatgaatctccccacttcccattgcttcttctcgaccacactgtttgaaacccccatcacctctgggcttattaggttgcagtagcctcttaactgattc

SEQ ID NO: 61396 - DNA, 2077 bp, Bovine  19866881235999
  misc_feature (1)..(1): n is a, c, g, or t
natatggaatactattcagcattataaaggaataaactattattatacttatcaacataaataaatctcaaaaatatgagtgaaatcccataaacaagaaaaagcaaatatcttataattatgattctgcacaattctaaacacacagaaaaatgtatagtgacagaaatcagattggtggctgctgaagtatatgacagaacggtgaagggagggagggttttctaaagaccataaggaattttggaagatgatagatccatcattaactggattgtggcattgactttgtatgtgaaaatatcaaattttaccctttaaatatgtgtagtgaattatgtgtcaattatgtaccaataaaatgttaacaaaaataatttgtaaaatttctaggatgtacagatcaaattaaggcaggtcaatctgacatgtaacagataatacaagcctttcaacacagagcgaaaagttactgtcaatggatcagcatcactatattaaagtagaagggtcggtggaatgccagggagattcaggtatggcagatagctacagtaagtctcagcaagaacagctgaggcccctgaggctgttaatgccagggtgtccaatttcaagtgaaaagcttgagttggtttcacatcagtgttgtcattatccagcatgaaagtgcccaaactcacctcccactaacccatttcactctcctatccaactattaaatcttttatatgaagaagttatttttattactgttgaggctaaagattttttaacacatgatctttaattaacatgcttatatttttgaaaactaatattttaactgataattgttagttccaagttgaacaaaatttgaaccttttgtataacaaccttctttcaaataaaaattaggcttttttgtttgtttgtttgctatgttttttacagatattactttaggcagttatgctgacaaagagcttcacaaatgggaaatgatgtaatggtatttgcagtcaaatgattttaaagtgataaggccttaaccccgttaaaaattgattcttttaaagacagctgctttgagaatatgtaagcgcctttgaatgatagaactgctgtcttaaaacacttcccttccatctgtgtataatagaaatgtattgattgttccttgccatctgtatttttgatgacctctttgcaaccgacaggatgacacagtgtcactttcaacactgttcctatcatgatcattaaatcagcttgcagaatgagctggctcctgggagaatggataacttcattgaaaaagacaagggcaactcagagacaagactttaacgttctgacatgtctgttataatgacagagcaacaaatatcttagagaaatatacttttaatatcatatataatatcactattatacagaggaccctggcaggctacagcccatggggtcacaaagagtcggacatgactgagcgattaagcataatatcattaacatgtttagaaactataatcacatatttcaatttctcttcctgggttctgagaaatttctcttaaaattgaagtgcaagctaagtcataggtataatagagaaatttttaagaaaaattgcaacaaaaaggaaaaataataaagcatcaacctaagtggaagaaagtgggatggtcaaattaaagactagactcctaggagctcagtgtggtcatagcaccctccacttggagttctactttgtgttccttcagcttcccatctaaggaatggtaaatgtgtgtatataatgcattatgcttttatgcagatcaaaataaatgtgaagtataagtgctattaagttttataaataagatattgttgtgtcataaatattgaaaattcatagtctcacatatcaacaatcttgatatagtacaatgtaactatttttttaaacttctctttattaataatgaaaagttcaattgttatcttcctactcaaatggtattatacgacaaacttctcttttcctgaaaataagtgaacagcagcagtagcagttccaaaattcctatacaggacacccttggta

SEQ ID NO: 61397 - DNA, 703 bp, Bovine  19866881931865
  misc_feature (1)..(1): n is a, c, g, or t
ntttttagctataccatactgcttcctccaagctaaaatgatcaagttttgaaaaggatattgcatgaataatgtactaattatcattttaaactgtgaaatttaattacctaatgtaattaaaggcatacattaatttggccaattcttattcttgtaattaatggcaaattagatatttaatgtataattatctgaaaattattaacctcattcttcaatgtcttttcttttaggaaaatctctgaatattgattaaccaaacatatcagtaaaacctgcaacagaaaataaaaatacaataatattccttttataaaaaaccttttataataaatataaaatttatgtttagagatcttgaagctgctaaaaaggaatgcattcatcaggatagattaatatctataatatacaattgtaacttcacagttgcttcactaatgttacaaggaagtttacaaagaatctcagcttattgcagtcaaggacaatatacatctttgggtgccatcagcttttacacagcctctaagtttaactataaagtggaagagacaatagcagaatcccatggacacaggagcctggcagggtgcagtccataggatttgcaaagagtaagacacaaatgaagcgacttagcattcatgcatacagcagtccaggaatcagaggaagaaatggggttcatcaagcccca

SEQ ID NO: 61398 - DNA, 1033 bp, Bovine  19866882035411
  misc_feature (1)..(1): n is a, c, g, or t
nggtaagtttttcttgaagagggcatagaagagaatgatgttgggtctttatgtgggggagattagaacaggtcacaaggtcataagagaaagaaggtagtaatgtatgacaatggtattgaattgcttgaatttgcaagaagtaaagctcaaaattctaacttcgtaaatttcctaaacttcactcttcacttcctgatagaaaatagatgaaggtaataaagcctgcatatgctgttattaagggaaattgtgtactgaaaataataacattctaaaaatacgtgagtatttgtgtgtttgtgtgaatgtatgtgtgtttcccctgaaaagtttttaaatataatttatggtgacttcataataatcttggatattgtaatgtaaaatattagaatactatcaaatttcatacatctttaatttagggaagcttttttttttttttttcaaagtacaacatgagccatcatattggaactattaatgattttctgtgaaatgctcttatttcttaaaagaaatgttttattttcacttagtaaaggttcttcaaatgagacatatatatgctttttaaaaaatcagttcacctttcctcaaagagaatggaagtaatgttcagattccactttatggcaggacgtttttcacacactggttgatgattgacttctaacaaatggtaagcacagcttgaattgatatttcctaacatgagctgactgaaagctattaaaaaaacagctgagtgaatgttgtctccccatgccacctgtttatgtcaaaaagtatttttataatagttgatgtgcactgaaaatgtaaacttaatgcttgtgttctttcacaaagtgaagtctgttaaactgcttcagtaatcacaatcttcatcaactttatatgagtttaaaatatgataaactcttcatttgtaactgagcttttacttgtgattgatgtgtttgctattcaacttaatgaaatcttacctatactgaaagggggaaaaaaaaaagttaatagcattatc

SEQ ID NO: 61399 - DNA, 4227 bp, Bovine  19866880458238
  misc_feature (1)..(1): n is a, c, g, or t
nacgtttggactaaattgtagtttattgtgtgcaatagcatgatgtctataaaaagtacataattaaaaaatactttattgctgaagacagctagttatcatctgagcattcagggagttgtagtagtcagattaaagatcactgatcatagaccatgctaacaaatataatgaaaaagtttgaaatattgttaacaccactaaaatgtaacacagatgtgaaatgaacaaatgctcctggaaaaactgaaagacttgctcaatgccgggttgccacaaacattcaatttgtttaaaaaaaaaaaaaaaaggcagtatctgggaagcacaattaagtggagcactgtagaatgaggtctgccttcgtagacagtggtggtactgggttaggtcaaagtggaattatgagctagattctcttagtggctgtagtgatgaaaatctttttcatcaagattttcctgaagctttctcatgttcctgcaagcggaaatgcctgactattctctggtctctttctgatgacgctcatgtgtttcctggacaaaccttcccactctgcataaatggctgcctagtttccactgaagtctcatgtcccatttgtaaggggtttttgaactgactggagtgcttgctgatgagagtttctcaaaactgctttgttatgttttcatgtagaccacaggatggagtcttttgtgaggtggctctgagctgcctctgacttcttaaactatccaaatattggtttcagtcagaattgccactttgctgtcctttaaagtccatcaaaactgtagaggttgttttttccacagtcttcacaaggcaaattgtgtactgctgcaattttgtttgatttgtttttagcattaaaaaaagtggatactgttgaacgttgacaagggtagaaagaaggggctcatttcagagactcgtggcacagtgaattccctggcagtccagtatctaggacaccatgcttccactgcaggggggcacaggtttgaccccttgtcggggaactaagatcccaaaagccacacagtgtggcaaaaaaaaaaattgtgtcataaatggaaaatttacagccacttaggaggcaatccattaagtatatttttgtacgaaaagggtgaacgtaagtattcaggacaatgaattttacagattgaacactcctgtgtagccacctccagatcaagaaactcccataacctccctctttctctcttccagtcccttctcccaaaggctcccctgagttccagcaccgtggattagttttgttcatctttgaacctctctttaatggaatcatgcaggaggttctcttttgtgcccggtttcttcttattttttattttgatttttttttttgatcatggtaaaatatacataatataaaatttatcatttcaagtgtttcaatagcaatatgtatcctcctgttgtgtaaccatcaccaccctccacccctagaatgttttcatcatcctaagcagaagcgctgtaccccttaaatgacatgtatatagtttatttattggctatgctgggtctttgtcgtcgcgcgtgggctctctctagctgcggtgcttgagtttctcattgccatggcttctctcatttcagagcatgggctctaaggcacgtgggtgtcagtagttgctgctctcagagtctaagcatgggctctgggctcagtagctgtggcacacaggcttagttgctccatgacacgtgtgatcttcccagatcagggattgaaccggtgtcccctgcattgcaaggtggagtcacactctctggaccaccagggaagcccaggattagttattctgaaaacgtgaaatcacggggcaatgaaaccatgtgatactataatgacagacacatgtcatcatacgtttgtctaaacccatagaatgtacgacaccaaggaaccctcatttttattaggggctttgggtgatggttatgtattagtatagggtcagcagttgtgactaatgtcccactctggtgggggatgttgataatgcagaagtcagggggtacatgggaaatttctataccttcctctcagtattgctatgaacctaaaactgctctaataataataataataataaaagtgaaatcagtcagcttagggatgcagggtttttaaaaattgttttgtttttggctgttctagttctttgttgctgcctgggcttctctttagttggaactaaagggctacggtctagttgccgtgtgcaggcttctcatttcagtggcttctcttgttgcgaagcacgggctcgaggtgctcgggcttcagtagttgctgctcccgggctctagagcacaggctcaatagttgtggtgcacaggcttagttgctccgtagcatatggaatcttcctgacctagggatcaaacccacatctcctgcattggcaggcggattctctagcgctaagccaccagggaagcccgggatgcaggttttacgggtgattttatttttcatctttagagagtccatcttctttagcaataagtacacacatgtgtgaaaccatggtgatctggggacatccgagtcttttattcatgatgacaaagcactttttgtttgctttgcaatcctagcttactttcgtttatactgtgtagccatatgaatctctcactcaaacttccagggccttttggggaaaaatgagaagctaatggggcttccctggtagctcagctggtaaagaatctgcctgcaatgcaggacacccaggttcgagccctgggttgggaagattccctgaagaaagggataggctacccgctccagtattcttgggcttccctggtggcttagctggtaaagaatccacctgcaatgcggaagaagctaatgagagctttctgtacagtgagtggggagcagaggggcctgactgtttaaattatttaccctggagatattcaacgtctaccacctcacattagaaccttctgctcaatgggcagatctccctgcctacccctccctcaccagcatgaatcaagaggaggcccaaaactactttagctgggggagggggcgctggtgtggtcctggaatatcccaggagaggtcaccaactcagtgcatcctgcttcagctccagcacttccagctgacatccatcctggggtccaaggtggaagttctgaagcagtcggagagtctgaggtaagacgctgggccttgctccccatggggctcccttttccaatggccactgggtgcaccagattgtattgaaagaatccagttagggtaacccccttacatcagaaaaaggccattttggattgaagttcaaagaggattccatctttgttttgaccttgtaaacacccagaccattgatgaggaccattgggggttgttgtgatgtgggagccttgaggggctccaaagagcttcagatggccttcccttatctggaggaaggaactctcgccccatattttcctggatgtcactctcagcatgtccagattttatgtctgcccagcaccctctgggcttcatctttaagaacattctggaagacactgggcacacattgaggcctgcccttctcctcctcctccctgctgagatgggggttttccctggagacccatagcttctttctccctccccaagccaagctccccttggtgacccagccaagcctggaattctcccttggcgtgtttcccagggactcctgaagtggcttccgggccacaaagctcagtccagccgccagtctgaagacaagcccatctccgcagattcctcttcctttttaattgcaaattcatttgtttaaaaaaaaataataaagcctttgtgcagggatacagggatgggggagctgtcaggggcaaacggatccccactgaaaagcttaggggggtcctcttcgaggggccagtcagggctattgtccctggggagtctcatcagaaatgctaagtcagtgcgcagggctgtcagctcctggagagaccagactgacactagttattccagaagggtcgggagccattagcatttctcttgaggcctgaggccctgggggctgccacggtgggtgggggagggggcgggggcagactccacgtggagctggagagggggcagtgacctcccccggggaagttcagtagggactcttgtgtcccccgaggttctgcttg

SEQ ID NO: 61400 - DNA, 3455 bp, Bovine  19866880602865
  misc_feature (1)..(1): n is a, c, g, or t
ngctgttccctctgcctggaatgctcttccccacatgactccttgtgggagaaacaaggaagcagtcggtcaaaacctgcttctcaaatgtcatctcctcattgaggccttgcctctccccctatttatttgcacccccacctccctccagctctccccacctctctcccagactttgtctttctaacaaactgtgtaacccacttcttaaatattcttatttctcacttcccaccttccatccaccccacactccactctttgtttgcagagtggcagatagtaggtgatcagttaatcatctgttgagtgaatgggtatcagggagtggtgagtagcaccatccccattctgcagggggggaacagaagctcagagagattgagtcacttgtcccatgccacacaggtggctcatgatgaatccaggcagcgtgactccagagccaccctctgatccacccccgcccccgccatcccgtgtagatggcagagatcaggatccctgcatggccccaagtctcctggatggtcctcttctggcctcaaactcttccatccttggttctcagcctcctgcagggtgagcaggcgcctggatcagacaggggactgtctcacagactgctctgaggaagggtttgtcagggctgtggtgggtcagtgatggggacaggtgtcccaggaatgattccgcacggccccagttcctgggccaggaggcctggggtggggtcttcagccatggtggcctctcaccgcccccactgctgtctctcagggggcgtgttctgcccgtcaacattcttggtgtccccacaatcaggaacctccccaggcataaggggactgagtccccttggatgtgtattcgctccccactcacgccccacacatagtaggtgcacatgggtgaatactgcataatgaaggaaggagacagacccttcatgagacctactatgtgcccagtacgcagatgtgttatcttagttaatcttggcgatgtctctcgaggtgggtagcctatgcccactctgtaggtgaggaaattgaggctcagagttgccagcttgtccttgtctgccaaggagggccccccaggtgatggggctgagcgagatcccagaatctttcgtggaggagtttcttctgtctgctgagctgagttgtggcctaactcagaggcaggggactggaagagatgcccgcacatgctgggggagggtgcagacccttgcctgggccaggcaagctgcaggtcagtatcatttgatattgatttgatattgtattaaccctggagaaaagcatcattgatttgttcactccctcattaggttctgggcacttgtgatgtgtctggggtggtactaagtgctggggtcacagcagggaaggaaatatataaaggtccagtcctcatggagctgaccttctggcgagggaggaagcaggacgggctgggaggtactttagaggggcagtcaggggaggctgctcggaggaggtgtcatagcggcagtgattccaatgagaaggagctggccaagccaagactgagggagcctcacgacagatgctgtcacagggactcagaggtgaaaggctcgcccaggtcagtctcactggtatccacagggtgcgaccctaaactggaaagggaaatgaaccccacttcccagcagcctttgccactctctgtctctagagacccagacgcaggcccgtgtggtcctccaagctggggacgatgggatcagcatggacgcggtagccctggtggcccggccagtgaatggccccctggagctggtggtgaatgtcagccacacggcacctcttctccggaggctgggcctgccctttgccagccaggtgaggcgtgggtggccagcccaggcaggggcagactcccctgctaattctgtcaactcccatcctgttcccaggggcagaggaccactgtgcacagttgatgcgaatggtcttgccttgtgtctgtccagcactttacagtttgcaaaggctttattaataatgatgataattgtaaccagcggcctctgtgctccccgccgtggggccggtgtggatgggctcctgcacctgcgttccagctcctggtcctgtgtcttttccacgcttctgccttttaatcagaatcaaagcccagcttgcatttgcacagcacctactgcgcgcttggcactgttctgagggtcctacatgcactggctcatctcctaacacccccagtaagaggcagagcagcacagttgctatacatgccgtgtctggaggccagtcccagctctgtcatttgctggctggctgtccttgggcagattccttagcccctctgtgccctcagtctcttcatctgtgaaatggggtaatagcggtactgttaatgtgagggttgtgaggatggagtgagtcagtaccagtgatggccctgggatggtgtgtggctcgagccgacgcttcagaagcctttgctgctctgatgctgctggtgatgctggccgctgtagtcatcagcatccttgggtcacaggtccatctctcggtgacctgcccaaggtcatgtagcaagtaggcatcaaaacaggggctcagacttggtagtgggtccttcctgagatgcaccccacaccctctaagacaggaactgtgctgagtccccatgcagcgggccagtggcgcttggtgtgaactcagcttgcttagtggggccctccctctccctcacgagccatggaacatgtatccaagtcttttccagccttctgtttggggctatccagcaatcttcctgcccctcactcccctctgccgtgggaggaggggcagttcccggagtccaggggcccaggatgtcactcttcccgaagagggtctgagtcaccgtgacccaccgctgagcagcacttcatctgaatcccctttccctgcccttagcctgggtggtggggaggtctgtaggatgccggctctttgcggcaagagagccggccagggtgggcagatggggccaagtctgatgggcatctgccctgccaggctggtgggcggacagggatgtgagggtcctcaggcccctcctgcctccaagcctgtctccccaaccctcaccccgtcctgttccctcttcagctcatgttccgggagctctggggaaaggaagagatgcattcttccctgcagctgacgtgcgattctcaaaccagcctggtcctcaacatccaaggccacaaccaggcactcaggtgagggctttgccacactctgggagccccaggggaagaggactgagtgagggagaggcctcagctgagcacctgacccacagcactgcttcaaaccctccccacagccccattgcacagaggtggcaagggaggctcagagaggccaaatgacttgcccgaggtcacacaactaataaaacat

SEQ ID NO: 61401 - DNA, 1828 bp, Bovine  19866880660143
  misc_feature (1)..(1): n is a, c, g, or t
ngcctggcgtgctgcagtccatggggtcacaaagagtcggacacgactgagcgactgaactgaactaaatccagtgagcccactcctagtattcttgcctgaagaatcccacagacagaggagcctggtgggctacagtccatggggtcacaagagccggacatgaccaaagggacttaacatgcacatgcaggcactacaggctgggcttcggatggaggggccctaacacgtgatcacgtttcactcaccctcatcctgggagccgggcacctctgcagctccagatgggtgcctgaggcatctgggcaccaggattcatcccagctctgccagcccgcaaagctctgggcactcaaccgctgagctgtgccgtcactggtgaacccccatttcctgccagctgcagccgttggagagtttcttccccgaaagcagatgggtggtcccgagaaggaaggaaggggctgtccagatcctctggggtgccagctgctgtgagcgttggcggccagtgactcacagccgtcacccccgccctgctacccgctgctccacacacagcccggagggactgacaccgccccccttctgacaacctccccctcaaaaagccacgttcacccaaatccccatctcaggctctgtttctagggaacctaacctaaaatgaggttgtgtctgatttccccaacttagaatcttcccatactccctcagtccttccagaaagagtcttgcctcttcagctcagccagagagtccttctctacccccttgctgaccccgcttcttgattctcaaaagtgaaagtgttagtcgttcacactttgcgaccccatggactgtagcctgccaggctcctctgtccttggaattctccaggcaagaatactggagtgggttgccacgccctcctccaggggatcttcccgacccagtattgaacctgcatctcttgtgtctcctgcataggcagatgtgttctttaccagctaagctgacccagcgcttggtaagaagaggcaagaacagcttctctggacacttttatagaggcgagatttccaaggtcctcttgtgcattgccagtatttattgggtgttgatttggctgggcatttggtaagatgttttcttggtgtgctagaaaagtccaactcccaggactctgagctggaggtgaaaggtgcagtgacacagtcttttcagaggaacatggaaaacctagggagcctttagaggtctctgcagccacaccaacctcaaggctggttagggctgggatgagtaatgattgtcaggcaggataacctgcttgagaaatgaaccagagcttattttagctattgagtcatcacagaagaatgagaaatattttccctcccttcagcccctctcaaggatcctcaaagtctttgctttctaaagggtggtgtttaccatggacggaggagcctggtgggccgcagttcatggggttgctaagagtcggacacgactgagcaacttcactttcacgcattgggagaaggaaatggcaacccactccagtgttcttgcctggagaatcccagggatgggggaacctggtgggctgccgtctatggggtcgcacagagtcggacacgactgaagcgacttagcaacagcagcagcagtagagaatcaaaaagccatgttttgtttttgtttttttaagtctagtacatagtcaggcttcatctagctgcaaattacagactctgactgaaattaacttacactgaagcagaacatattattttgtctccctggaaattcaggagagcaacagcttcaggcatgg

SEQ ID NO: 61402 - DNA, 957 bp, Bovine  19866880684856
  misc_feature (1)..(1): n is a, c, g, or t
ntcccctggctcctgggggtctcatgggccccggtgggggctgcaaggctggcccaggaatgtaaacccgggcctgtttgggaaacctggagccaggggttcccgagggtggcccagcggggcctgctgcaggccgggggacacatgtgatgtgttaacactccgcagcggcggggccggcctgcgcggcccccaacccgcctcgggcagggcatctggaaccagttaggggctcaggggtggccgggacacggttaccttggctgaggcggaggctctgctggggcagcggccaaggaggacagggaggtgatgctggccggagagccgcagctctttgctggaagcaaagaaggcgtgagaggcctggcttgagggcgccctgtgcaggccgggtcaggaccaagccaaccaccccagcagagggctggagacccagaacatggcagcaacccaatgaagggctattaacatgcccggaggcctgacggccgtgggctgcaacgatcagggctgcagcgatgcacgtttgcattccagcttggcctccgcctggtcctggcacggtgggcaagtgcctccgtctcccctccagcacaggggctgggtggtactcagcggcaggtcttctgtgggcccgcccatggggccctctcgctttggacagctaactttaagcctggccccctcctgcagccctgggctcacagctcccctccctcggctcctcaagccaggcactcatggctccccactgccgcctgccctgggggctgccctgtccgggcgtgtccctacaccacgtgtgccaacctcagcacggctgacaccgtgggccacaccagtcatcgctgtggcctgacctgcgcattacaggacgtctggcagtagctgtggcccccgcctgcgaggagccagtagaccccccttcctggctgtaacaaccggacctttccc

SEQ ID NO: 61403 - DNA, 1006 bp, Bovine  19866880915558
  misc_feature (1)..(1): n is a, c, g, or t
nctgaggtatatttgttcgtgtatgtgtgtgggtgtgcatgtataaatatatgtgtgtgtgtatatatcagggggtcaggagaaagtaagactagaacaagacaaagcaaaataaaaatttcagacacaaatgcatgccacaaagttctacacaggagctagtatctgcagcatgaccatatgtcaaattaagtagttttctgcatttgtatgtttcactataataacggaactgaggataatgggcattgagaatattttgaaaaataatcaattgactcaaagtttttttcttggtcttttgctgtttaaaatgctgattttgaaagttatactttcaaaatcaacacatgatactgctggtatcatgtactgtgtggaccaaaattgcctataataaactttttatttaaaaaatgcatattgatccacatactgtacaatgccatgtagtatagacttgttcatacactagaacttcaactctaatctcttagtgacaaataaaaagaagagaatacattgagtgacctgatttgcattgtcgatgttttctaaaaactcatactctctgttaaagagaagcaagacattttttagcaataagctatgagaggaatgtttctcttgaggcctcttaagggagacattgcctgatatagtggacaagacctcaataacatccttagagcaaatgcaacagaaaatttcatattaaagatgctatctcttttacaagctgaaaacataaccccaaaatacaattaaaatacaattttacagtggatttaaacaattcagaccaagtccgtggtctgggatggcctttttgattcagggccagaggaagaagggggggaaatctagattattttggaggattatatgaaaggcaaaagctttaggaaacactttataaacattagtttatacaattgatttcttgttaaaacttgggcttatgctaaaagaaaatttaaaaaattactatattccatgtgcaagt

SEQ ID NO: 61404 - DNA, 1202 bp, Bovine  19866881091613
  misc_feature (1)..(1): n is a, c, g, or t
naggcactgccaaggagcactttgctacagcatcataagcctctctgaatcttcctaaatcacttagagccttggatttccgatacagagctttgtagttactggcatttaaactgaggactgtatcacagtcttctaaaactttatcatggaaaccctggtgagtgagaccaaataaagttagcaatcaattcatgtcttgcaatgatgcaaacacaaacaaattcagattctcctctcaaatggattggtaatggtttttatttgtcttttaaaaattattttcattatgaaatttcaaatacagaaaagtagaaagaatatcatggctacctatgtacccaccacccagacctttggccatacaagaccccagatcttcaagaaagaaagctgtccaggtatagctgaggtcctaagtgtgaatgtctatatgaaaactttaacaacatcaaaatactactttttaagtttagataagtgaaggttgcgttaattcttttgaaggctcactactccttttttttaaattaaaaaataacaataactcctaagagaaacataaggagcaaactgtcagttgagatacctgatacccccatctgtgaatacctgtatcttcccaggctgactttttttttttttgtaagagcagattacccctgcccccccaaagccatactcaaaagggtatctccaaggaccagtatctaaaaaaccaattatttttaaaaattcctaagtatttggccaaaactgatttttcaaagcttgaagcctctctaaagcagctaatacatctttcctataaattgaaattagaaagctgacttttgctaatgtactatgttattgaaaaatctttttttctctccagaaacactgctttacaagtcacaactcaccatattggaatagcaagcaatacgatttatatatagtttttcaatgatttctttagggattaaaatttcttcagactttgcataatcagctatactcaaagcttctgaatactgacttatagagtggttccaatcacgttcgcgataaacatcatttccttcattaaaaagatttctcacaagagcatgtaaatatacctttaaaaaaaataaaaagaatgttaccccttgaaactttttaaggaacaagtcagagtgcaagcaaattttaatttctgtatctaaaacttcagagga

SEQ ID NO: 61405 - DNA, 3138 bp, Bovine  19866881240321
  misc_feature (1)..(1): n is a, c, g, or t
ntggtttagtaaaataccgagaataccccgtaacttttgaagtctgtaaagaagggcatttttttagtatattttttgcatttccctttttacgtatgtttatatgtgtgtatttttggctgcgctgggtcttcatggctgcacgcaggcttttgtcagctgcggtgagtggggactactgtctcctgtggcgcatgggcttctcactgtggcggcttctcttgtagcggagggcgggccccggggcagaggctcggcagttgcagcacatggggtcagtagctgtggcattcgggcttagttgccccatggcacgtgggatcttcctgacccagggatcaaacctgtgtccaccgcattggcaggtggattcttgaccactggactaccaggaaagtcctgaacttcatattttaatagcaagaaaactctttgatgataacatcaggtcaaaggcaacaaaattgaggaggaagagaaggaggtagatcagttgcagatcttgcaatcatttggggggtaaagttgggggaggagcctacttaagttacttctttaggctaaaccgtgtcctgaacactcactgagctgtaaatcctcccagctacagcatggggctggatctattatcagtccccatggacagatgagaaacaccaaagcacagagatgttaggtaacttgcccaaagtcacacagctgggcgatggcagaatgggaatgcggatccaggctttcttgctccagggtctgtgtcctacatcgtactgccggatattctgatagtctacacgaggggtcctgaaccaggggtgattttgaccctacccttccccggggacagttggcaatgtctgttgacattgctggttgtcatactggtgtgggaggtgctaaaggcgtctagtgggtcgagcccagggcggtcccccacaatgaggaattatcaaggtcacgggttgagagtgccaaagctaagaaaccctggtctacacagcaccacctgctatgattaatgactaaatgatactgtttctccgaagaatgtggaggtgctctttctttgctgatgggagcatctgtggccccgcccggagccctcagatctctcctgacttggcggtgcctgctccctttcccacagcagcccacacctggggatggcagctctgcactgaggtgcgctggccggcacccgaccagccctccctgctctcggtgcctgtgttcacagccgtgacgctgaagaagcaggactgggggctccaacagtatctgctggaagctgcctacaccttccacccccaggtaggccctaggaaaccttcttctttctcaaccggattcagggcctccctaggtcttctactcaggggtcagtgttgagcatcactcataaagacgggggcctcctccccggagctgttgggctgggcttgtcctgctgtagttcccctcctgcctcaggacccttgcacatgcggctcctctgtctctggctgttggcttgttaacgctgaatcaaccttcgtagctccattcaagaggtcacctcctcagggaagcctgccctgattgccctgaagtggccatgttcgtttgttatatgctctaagggcactgtgttccttccctttcagtcacatttgtgttcattactgaagctggttaactaagatctgtcttcccccctagtcgctcagttcctgggaacagatccagtgcctttctcactcctgggtccccagcacctggcacagaacagacactcaacagcctcctatctgacctccccattcccactcttgtctccttcctgtgtgttttctaccagcagccagacagaccttccaaaatccctaaaggattgtgtccatcctctgctcaggactctgcagtggctcctttctctctgacctacaggctttcaatgatccagccgtgccggcctctcctccccatctccccactttttgaccaggttcaccgctctccagacacactgatctccttttaattaaataccaagcacattgctgcccagggcctttgcattggcgatttcctctgcccggaacactctttcctagacacccacttgactctgtgccttgctgcctcctggtctcatcaaatgccccttcttcagaaacaactttcccctcccctgaccacccggtccagaacaatgacccctgactccgagtttgtcagcagagcactcacagccaccagctgccgtctcacttccttctgtgtctggaggtcctgtgagtgtggagtggctgccaggagggcaggactttgtgtataacactcggctgcaccccctgtgcctgtaacggtgcctcgcacacagcagtgaatgttacttggttctgggtgaatgtacgatggtgcaggatacacttacttacagaaacagactcacaggctgagaacgagcttatggttgccaacgggaaggatggggcaagggatagttagggagttagggatggacatgtacaaacagccgtatttaacatggacacccaacagggatctgccgtacagcacggggaactctgctcaatgtcatgtggcagcctggatgggaggggagtctgggggaggatggatacatgtatgtgtatggggctgagccccttcattctccacctgatactgtcacaacattgttaatcagttacaccccaatacaaaataaaacatttgtgtttttttttaaaaaaggcaaagcacacaaaagctgggagatgagcacgctgagctggtgaaggggcccaggggggtccaggcaggtgtgtgttgcagctgctcctgagttgtcctgtaggactctcctccaggatgtatagccccagactcctggttttagggttcttgtcttttgaggacaagaatgaccataagaactcaggtttggggttttttttggaaacacatttatttacttttgggtcttcattgcttttctctagttgcggctattgggagagcttgggctcctcactgcagtggcttctcttgtttcggatcatgggctctagagtgtttgggcttcagtaatttctgcatgtagcctcaggagctgcagttcccaggccccagagcacaggctcagtagttgaggcg

SEQ ID NO: 61406 - DNA, 1475 bp, Bovine  19866881589494
  misc_feature (1)..(1): n is a, c, g, or t
ncagggatcgaactcacgtctcttgcttggcagacagattcgttaccactaagccacctggggagcctgggtgtgtctgtactgggttgcaactggtgttctggctgaaaaagagcccagggaagatggaggcactgggagaaggtggtgggggaaggaaacagagctgggaggtggatttagggaccgggggctctaagtcccttggctgcaggccctgggagtcttcagggaaggaagccactgggctctctcagcccctcctacctgcctcactcaaagcgctgatgttgtgactcaggctgccagagagctggccgtgcccagggccccaggtgcagaccccgaccagagccaggctggccgtgtcagcacggaggctggcctggcccccgaaggctccccgtctgggcctgcagccgcccgctcagccggagctctcctggcaaggtctggctgctgttctgggcaaggatgcaggtcacactgcgcatgctggtgctgttccctgccttctcgtgcttgtcccgcaagaggaatcccagcacggctgagtcggcagtgaccttgatagtacctgcaaaggatgggaaatagtccgaaaaaagaagggcgtcagcccagggcactgggctgctctgggaaagaaggaatagaacccaggggcaggaagttcctagatccatgatgtaatgttaactcatgtcagagagagcatatctgagaacaggagcaaatgaaatcagcttcccctacccccaggatgctccgaggaccaaacaacctaattcacaaataaagcagctttggataaaagcagtaagcctgataaggcatgtctgttaacaccagcgctgctgaatcctgctcacgagagtcacatatcaccatgatggaatggccccattttataggcaataaaactgagacctgggaattttggaattttaggaagaaaaaaattgctcagaggtgtcttccaccctggagaaaaagattccatacccttgacccaggccatacataagtcatgcattagggatattctcgctcttatcaaaaccatttaggtttcctgacccccaccagtctccactagggccttaatgtggtccaactgcccaagttccctcctctcattcaagtgactcaggggtcactacctccaggaagccttccttgacccttctgcagccacagccctggttagacaccctcgttctatgcttccagacaccgagcgcatgctaaactctgtcacagagtactttccatacagatagaactttctcacagaatcttgcaatcatcttttttacagattctttacattgtagggccctgtgtctccatgttctctagaaggttaaccctgtgtccttatctggaaaacatggataatcaagagtaaaacttcacttgattactgtgaagaaaattgaaatagtgtctatgggaatagtatagaattcaag

SEQ ID NO: 61407 - DNA, 1014 bp, Bovine  19866881717697
  misc_feature (1)..(1): n is a, c, g, or t
ntgaaaaattttctaactatacttaaaagagtgatactattaatactacttccatctgacctgagaaagttccagattgacacttggaatataattcaaaggcagtttcaaaagtgatgaccatctactacgaaaagatggttgtgaagagtcagagaatcctcactgccagctcagagatcatctgggcaagcctgaatgaacttccttctctgtttggttatcttaagatgtctcactccagtacaggcaaactagtaaatcttttcaggtaactcaggtgagtgaaggaaatgttcaaggagcaactaaaactctgagctcagatgccaacatccaggattagaagactttgccacccaggtaccatgtctactgcatcccaggtagctctcagtggcaaagaacctgcctgccagtgcaggagaggtgagtgatgtgggttcaattcctgggtcagaagatcccctggagaaggaaatggcaacccactccagtgttcttgcctggagaatcccatggacagaggaacctggagggctacagtccatggggtcgcacagagtctgacaacagaagtgatttagcctgcaccctgtctactgatacaatgactgtggaattcaagccagaccagcagagttcacgtgggaagctacagagacccacgtacctatcacaaatactaaaataccccgttggaaagcggtgctgccagcagtactggtcatcctcagtgtggaagaccttctctttgtgcttctcggaggagatgtggccctgccactgcttctcactgtttgcagttcttcccgcacatccagcagtgaaagtccacctgcagtgcatggaagacaggagtcgcgtcagcagctgctgtccggggggggcccctgatgggtcacccgtgttcaggccccagattgactaaaaacaactccacctaaggcccacattctattcctggggagccctgccagcaggggtagcttgggagagatgggcttgagggtg

SEQ ID NO: 61408 - DNA, 1788 bp, Bovine  19866881936295
  misc_feature (1)..(1): n is a, c, g, or t
naagggttaagaagagttgaccagtaagaactttactttttaggctttattgctatgctatgctatgtcacttcagtcatgtccgactctgtgcgaccccagagacggcagcccaccaggctcccccgtccctgggattctccaggtgcgaacactggagtgggttgccatttccttctccaatgcatgaaagtgaaaagtgaaagtgaagtcactcagtcgtgtccaactcttagtgaccccatggactgcagcctaccaggctcctccgtccatgggattttccaggcaagagtattggagtggggtgccattgccttcttcgttaggctttattacctccctctaaaattcttgggccttaatcagtgcagatttattatagatatcaccagactgtcatgtgtggattatctgtccccttccagcacattcctgtgtctctaacataaaacttgtgtggctcagagtgttgtttctcaggagctattaaatagtatttgggcaaaaacacacattccttccccatctccaccctcaaatttccctctgggtataaacacagtttctctgagtaactttctgatggtcacttctgtttttttaaggtaagtatgtggtgttatattaatatttgaaagatctaaacctcggtaatgtgtaatgggcgatgagcttgccctgaagagatccctgtgtgtctttttttggaaatagggtgcagatggctagcagggagtgtaggccttgaaacagtgtgtacccaagcccgctgcccagaggtagacttagctcgatgtgacattaaaatcacaagagttcccttgaattgagtacaaatgtcgtttcaggttatgtgggtgtgcagcactgtcttacactactggttttcttagttttatagaaagattgaaaggacatgaaaggaacgtcagaaatacttagtccagccctcttagtttacagatggggaatctgaggctgctataccttaaagtgcctgcccctcctcttggcctgttaaacctttacttgtttgagttggttcagaaccattaatactcatttcaacatctaccattcccgttgtaccagaaaataaagtgctacggcagagacacccaaaaggtagcctttttgtactctgtgctgtttgtgtaacagcttaactagtagtagctacctatagaaattaacaggctttcctgttttgtgagagcagactccgtttttttgtcttgttttactgccagtcacaaaggcagtttaggaaaggctctgaagcaggaagtagttttcccaaaacactctgtgcagaattcagctcccctcagtcagcttgtccgaaagcagtggccatggtgtgctggcaaaacgtgctctacgacctgcatctggggatcttctcattacacctgatccctgggacccttgtaacacgggacctgggaacctcagcagagcctgatttgcgtgagtggatgaggtttccaggtccctggcccactttctgctaagcaaaataagttatcagatgatttttttgatttcttcctttaaattaaaaattggtggtggatgatggggttggtggtggtagtaatttaaaaacaaaattagttagcaaatgaattgtactaagtcttgaatccatagagtcactgacccagtgtctccactgtgtgtagaatgctatttttacctctttctgctgatgttcctctgtctgctgtcatattctgcagtgcacacgaagattgtttatgtcatcacattatatgtatgtgt

SEQ ID NO: 61409 - DNA, 2024 bp, Bovine  19866880216466
  misc_feature (1)..(1): n is a, c, g, or t
ngactgatgctgaagctgaaactccaatactttggccacctcatgcgaagagctgactcattggaaaagaccttgatgctgggagggattgggggcaggaggagaaggggatgacagaggatgagatggctggaggccatcaccgaactccatggacgtgagtttgggtgaactacgggagttggtgatggacagggaggcctggcgtgctgtgattcgtgggttcgcaaagagtcggacatgactaagtgaccgaactgaactgaactgaactctgctttgttagataaaactgttttatcattacctgacacattgcacacttggcgcacctgtaattctttccttgctgttgatctgtcttcccaactagaagggaagctctgtgagaaaggcctccgtctactttgctcactgttgcctccccactgcctggtccacattatcagagctaaacacaaatatttttggaatttatgggtaaatgaatgaatgaatatctgcagcattgtgggtattagaaaactttcctcagggaaggattcatacattccttttcatctaggagagcaaattctattgcatggctgatttgtttgcctccgtcaatgatgtagccaaaaagaaaaaagcttccagctcccacttttacaagtaaatggcacaaaagtcttccccttcttaaacatatctagtttctggagatgtatgaacaacaaagccagctacttctaattgttaaaattattgttttttaagattgttctttatgaaagaattctgcatcatcagaggtgaaagggctgtaaaatcccttcatccatccttctctttctagagggaaccatgagcccagagagaggagaggacctcaaggtcacagagtaggagggcaaaggctctgactaacatccttatggggaatcaagggtacataactttgcactccaagataatacattctcagaagctattaaatgtggagttttaatatctaatggattcttccctgactcgcagttattaataatcagagaatgaatatgtttcccacacctttgaaaaaaaaagggcccagttgcatgggaaattatttttatctttcaaacaaagattctgacttattctgactttggagcttaattagctaatctttggtatctcacatcaaaattagttgtctttccaatgtaggtgtgtgatcattgaagtgtttatcagggagtgtctttcatccattttcaaaccacttttctcttattttgagaatctgaaatagaaagagcttcttaatccttccactgcttctttctccagcccctgctgagagtagagaaggaaatcaaatttactgagaaccaactatctattctgttgtgggcattcatttaatcctcatccccaccatttgagggatttatttttgttttacagacaaaagaacaggctggaagagttaacgttagttttttcaaggtcaggaaaggaaagtgaatagaggattcagaatcagacagactttcttccaaatttcagccccagatctatccattccatgactctggacaaatcactctgcttctctcagcccccagaccagcactgtccagtagaacttcctgtgataaaggaaaggactcgtatctgtgatgttcagtgtgatagccaggagccatatggagttcttgaaatgcagccaatgcaactgaggaactaaatataaatgttatttaattttaatgaatttaaacatacacagccacatgtggtccgcattaccatattggttagcgtaattctaagtcttattatcttaagcccagacaagctgggcccctactgtggcccaatatgactctcctctgcagcactccacagggggtgcggtgagtccacagtccccctagcccacccctactcctacttgagctctgaaactgtgatctggaattcctgcccaaacaagcccagtgtgcttccaggctgcctgggcctcttccttggtgccatgttccaagagcaat

SEQ ID NO: 61410 - DNA, 1709 bp, Bovine  19866880430558
  misc_feature (1)..(1): n is a, c, g, or t
ntactcttgcctggaaaatcccatggactgaggagcctggtggcctgtagtccatgggatcttgaagagtcagacacgactgagtgacttcactttcacctttcactttcatgcattggagaaggaaatggcaacccactccagtgttcttgcctggagaatcccagggacggggggagcctggtgggctgccgtctatggggtcgcgcagagtcagacacgactgaagcgacttagcagcagcagcagcaagctagatgaggattagctcactgatactttcaccctcacattttctttctctatcacccaaatatgcttccatcactatcttttgatagaaaacaacattactatgactgtactaaattttcttgcttcagtgccaactagtatactatgattattttttgtacagttttatactgttccaatagtttctaagtatcattattttctgcttgcaatttgttataagcaataagtcaaaaatttttaaagtttcatcacattaagtattctaataagcccctgtctttcacatttttagggtccctctcttccttttcctgtctagactgttccttttctagccctttacacaaacaaccttctggaatttcccataatttctttcctgggttcgacccattgttttctaaataccatgtcttacttattgagggtttgttccctttggctctgaatcccttagaaagcattgggttcctacgtctctcctgaatcttatggcaaatttggctgtgtaagggacataatttgtgttaactataatgatccctttcaattagaactgattcaaaacaactctggtcttccctgttggctcagcggtaaagaatctgctggacaatgcaggagacatgggttcaattccagggtcaggaagatcccctgaagaaggaaaaggcaacccactccagtgttcttacctgggaaatcctacagactgaaggacctggggggctacagtccatggggtagtcaaagacttagcaactgaacaacaacaaaacaacttcataaagtatattttatcctcattttatagagaagtatactggggttaaaaaagttaagtaacttgccccaagtctcacacataggaagtagcagagctgggatttgactttctagccccaaagtctgatgagctaccttctgctgagggcttaccatacatcagactaccgtcctgagctcttgtattattatgatgatacatcatccttaccacatccagacgttgttgaaatgaatgctgttatcaaatattgactctcacaattaataaagaattagacttcctcaaataactacagagagcataacttggatcagtgagaaaaagtcacaaggagatagatattagcttaaaataaggagagaatgtctaaccatctgagccattccaggatgagtcactttgtaagatagtgagctttctacccctggagatacacaagaagaatcttccaggtaaaggtgactgtaaaatcaacttctttgttttatgtgctgatgacctaaggaggagaaaggaaccatcaggttgaactcctgctatggccaggcacagggctttgcatacaggaactcattaaaaaatgtacatcttattcatttaacaagtaaggtaactaagctcagaaaaatcaaattgttaacccaaggtcacacagttcatg

SEQ ID NO: 61411 - DNA, 960 bp, Bovine  19866880472013
  misc_feature (1)..(1): n is a, c, g, or t
ncaccaaagctcactgatcacctaacaaatataaattatgaaaaactttgaaatgttataagaattgccaaaatgtgacagaaacacacaaagcgatcaagcactgttggaaaaagggcactgacagatttgctcagagttgccacagaccctcaatttgtaaaacacacaatatctgtgaaacacagtaaagccgttatgtctgtaactacatcttacacatcgtctcatgtatatgatgtgaaccctaaagcatgaaaatagcacgaaaatatcaaaacaaaggattatagacaataaggcaatgaaggagataaaaagaaatcataaaaacgactcagagaagcctacagaagtcagacaacaaagagcaaaggcaaccaagaaagacccaacagtaacacacacacagtatgtgagatggactacctcgcaaactccacccaacgtggtacttgtggatttaaaatttttaatagtgttgatttttgaatcatataataagctataggagaagaaatttcaacatgggatcaggaattttcagagaagttgtatttatgatgtaaaacaagcattctagctatttagtcaaggtcagccaacctttatctcttctcaccaacattataagcaatcactttagggtattaaattagctaatatcctattagctaatttaagttaaattaaatataaattaaatattaaatttaaattaaattaaatataatttaaatttatatcctattagctaatttaaattaattaaattagctaatatcctattagctaatatcctaaagcctcccaaatatttcatttgttatacttgacagatcagttgttttatttcgtcttttatgagcttaagctcccctatgatagcgtgccttctgcattcatttacttttacaaatgccaaataaaaatttattgaaaagcaacattttaacttcc

SEQ ID NO: 61412 - DNA, 1817 bp, Bovine  19866880546920
  misc_feature (1)..(1): n is a, c, g, or t
nagaaggtttaagacaagaggccatcaggacgatctattaacacattaagtcaaaaggcataccgctagagttacctgtcggagaaggcaacggcacccactgcagtcctcctgcctggaaaatcccatggacggaggagcctggtgggctgcagtccatggggtcgctagactcggacacgactgagtgacttcactttcacttttcactttcatgcattggaggaggaaatggcaccccactccagtgttcttgcctagagaatcccagggacaggaagcctggtgggctgctgtctattgggtcgcacagagtcagacacgactaaagcgacgtagcaacagcagcagcagcagcagtattacctgtaatcatggactactttccttgccgcctccagctgttcgttggttaacagaatgttcctgggatcagttacagtgaagaaatgtttggctcgtccaatgaaagtgctttgatcccatcgaggttccttgatgttaatgtttggtggaagttctccagacatcttcctggactggagaggatcagaaagacaagctgatttaagatttataatgttaccatacaattggaaactttgtaatcacactaaagagttacagacacttcagtttgcgaaaataactttgtaataaatggcagagaacaatttaagtccaaagctaaatttgtttgcaaatctcagttgatcctaaacaaatttcaataatttcccacacaattgtttttaaaaggacatagtatttcatcatcccttacttttaaaaagctatcctttaggaaaaaattaaaatatgaaaagttagaaataacatcaacagtaatcaactgaagcttgaaattctttttctgggtgaaagaaacatcaaactactactgcattctggtttactaaatctgttattcctacaagtagaagtgactaatgcaaaaaaagggtcaatgctaaaaattctacaattaaaaaaagattcagattcattcagccttattcagcataaaaaccaccaatcaaaaatgaaaaagtatgctcttcaatctaacagggtcataatgggaaaaacacattttaccaaccccatgaatagtcataacatgggagcatataatttttctcataaagtatgtattttctggctaagaacccttacttttttctaaagtaactaatttctttctctgagtaatatatgtttattgttagaactgctctgtattgttgtaatatatgcttattgtactattttgaataatataagtttatgttagaaaataaagaatacagaaacaaaatttactataatttagccattctgaaataactattgttgctctctttgtatatttctttgcagatattttctatacatattatcatctaattaaaacaaataacaaagttgatttcatacttggtattttaataccctgactatttcttgcacttacttcataagcaccccctatggcactaaatattcatttggggtatttagcaacaccttcaaagtttatgttattttaaagtaacgctgtatcactgtctactaattttttccctcgtcgctagtgacttccttaaactatatctctctgtacaatattagaaggtccaaggatttggtcactattatggcttcaaaccactgctttctcatactggtttcctcctcttccatttctaatattggttcttctagtagctttcttttccaggtcattttttcattaagttaattttcagtgcttcactagatggcaggtgttttaagatgtcagtcctgccatttaa

SEQ ID NO: 61413 - DNA, 1866 bp, Bovine  19866880599794
  misc_feature (1)..(1): n is a, c, g, or t
natctctctggggcctggggaggataatcagcaattagtgtgcaaaacattttccgacaaatgttaagtattattagtatttaaatttagtttcatcttcccctgcatccagacaaaagggaacagatggccctggctccaggtggagagggggagggcggggccgcgccacaccaagcaggaagtttcagcgctctgccttacaattagcccctgcctgatgtgggagcccagggtgtcgcgctgcagttgcagggagatcttaataaaagccacgtgaaggtcatgggatagcagggtttggggtctgaatttcccttcctagctgcctgatcttggccaggtcagtgctcctctgcaagcctcagaacaatgatatgtgctttgcaggtttggagtcgggggtgaatgagacccagtgtgagaaaacgctggctgtggcccccgagccgtgaaccagggtctccttctcatccacgccttcaggatgccaagcttggatctgctttcctctggagaggctttctgggaactgaaaaaccctgggacgtggaatcctggagatgtgaacgcaagctctggctccaccacttttgggttctcttctagccgtgaccacgagccttacctgtaaaatgggcgtgatgctggtacctgctctgttgccttgcagcatagagattggctgagacgctggctttgtaaactttaaaggaaggtatagacggcagtgtttgcttcctgttttttgctccaggcctctgtccttcgggctgtggaggacagtagtagcaggtaggaggcttggacaaaagctgcatgtatctcactctggctgaactccacttctgggccccatctctccacctgccctcttcagttaggagaccagaacccagaacacaagtgttcacaagtgggctctggattccagagttgcagggaatgacctgagcaggaaaaccagggtagccaagatggctatgccgttcacgttttccttggggccagaaaatatgcctgaagtatatgggcagcagagggactgtgggcagcctgatatgcaagaaaaatgggctgcagagacatcagagctcaaatctagaatctgccccttctaatatctgggcccctgggtatgcagttttatctctccaagccttcattttctgatctgtaaagtgggaatgctaacaccctcagaagggccactgctgctgctgctgctggtaagccacttcagtcgtgcctgactctgtgcgaccccatagacagcagcccaccaggcttccccgtccctgggattctccaggcaagaatcctggattgggttgccatttccttctccaagcattcactaccccagctcaaaccccttagccttgtcaattcttcaccaatgtatcatttccgtgtccaaaaggtataaaagtttcctgctgtggtcacttttccaggtcttgattctcttgcgaagacttctaatatttatatatatatataaagatgcaataaagcttgtatgcttttctcttgttaacctagctttgtcaatttaattttcagtcccagccagggcctctaagaaggttgaggaaaatgttgtttttcttccctacagctctatggaattcctgccagaaaatggatggaaagattaccctcacaatgtatcatttctgaatttaaaaattcagtgaaacactgttgtaataatatgatacttgcatatttagatacattttttttacatttagacaaatatgcacagataatctattaagcttgttatacttttattttctgttttcatatgaacatgtcttgttactggagacagactagaactaagacataataggtttt

SEQ ID NO: 61414 - DNA, 1762 bp, Bovine  19866880618415
  misc_feature (1)..(1): n is a, c, g, or t
ntgagcctcatcaaaatcctcacagggaggtatcttaatccccattttgcagatgagcaagttgaggctcagagagggcaagccacctgcccaaagacacaaagccagtaaatgctagcaccctttcctttccctcacctcagggattggcgggcttccctggtagctcagctggtacagaatctgcctgcaatgtaggagaccccgggtttattcaggggtcaggaagatcccccagagaagggacaggctacccactccagtattcctgggcttccctggtggctcagatggtaaagaatccacctgtaatgtgggagacctgggttcaatccttgggttgggaagatcccctggaggagggcatggcaacccactccagtattcttccctggagaatccccatggacagaggagcctggcgagctgcagtccatggggttgcaaagagtcggacatgactgaggtactaaatagcacagtatgcaggggttggcagacactagcctgaaatggttgacagaagtgaatagaagacttatattttgtgactagtgaaaatgatatgaaattcctattttggcgcccataaataaagttttattggaaggcagccagcaccgttcatttctgtattgtcaggggctgctttcctgctatgccagcagggttgagcagtggttaccacagaacacaggcaccggaaagctaacttacttatcctgtctgccctttgaagaagaggcttgctgagccctgccctccaccctgccttttcccaggggtctggaaggcgtgtaggacctctctgtgactctgttctctgcacgagggtatcagggctgaaatccagacctccttctgctcgccaagccatgtactttcaagctgggtgccctggagaaaaggccttctcctaatttgttcaccctttccttgtcggtgcaaagctgctagcggtgggcccaacggcacggttccccctccctccgcgttgcagcccccgagaaggaagccccatagcagtcctgtcagacctgcgacagaaggagccagaagggagggtcaggaaagggcaggcgccagggtctgtgccaagccagcaggagggagggagggtagccaggcaccgctggggcctccagcctgcttcaaaggcgctgtccccagagggcgggaaatgagcggttctctacctttcaagtgactcctggggggccacggtttattctccttgacttgtgaggctgtaaaaggcttcccacctcctttccctctgctctccttcccctgactccagggctggggagggggtctcactccccaaactctctgaagagacagaagatgaaaaggattaatgccttggtgtagcccgtgtgctccgctgtgcagcaggacagatccccccaggcctgagtaggaccttcccagctcacccaggcaggagaggggacaaaggccttcacgcggtccaggaggtagcctcacagctggacccccacacccagggctgtgaacgacccggagcggccaggaagcccgagcactcggtgaaagagagatgggaccttggacacagagggagcgggggactggagggaaagacaacacagagaagaatgggaaaaggaaaggaaataagaaaagacagaaaatgcagaaagcacctcaacagcacacgccaagtgaggcagccaggcacggaagaccatggatcatctgaaatgcccagaacaggcacgtccatggagacaggaaa

SEQ ID NO: 61415 - DNA, 1169 bp, Bovine  19866880675505
  misc_feature (1)..(1): n is a, c, g, or t
ngcagtcagctctgctgaatgattcttagttttcttccaagttcaggattccatagctttttcagaaccagaatgtaaagggaaagattgaaagtctttccttctcccatctgtgttctctcctgtaatgcctgtgagtataatgatgtgtgatggaaatgaaaacaaaagtgggaaaagcaggtagtcgaagcctcaaattttactggaacctgaaacacaagtagcgggcgattatgacctagttcctcctttctttgtggtctttgcttgccttcttttcaatccccctgtctcctgtagacaaggcgggagccatgtggctaacacagtcatggaaaagggtctagaggtgtcaggtctcacctgaaaacctaaagggaagactggaagtctccagaggctgttttgatgttgccttccagccagaggatagctgttattggcagaactttatcaacgtttgcttagtgctgttattaaggcagccagcttgccccaagctgatgaattttaaaagaagcataaaataaaaaaaaaaacaaaaaaaacctgaagctgaaaaagtaatgaatgtttaaaagcttgcctcgtttgaagcttctcactggagcagattaacccattcactgatgagggattcaaaaaaagtgattattagcagattccaaaaagtatgttagacattaaaatatctccaaccatttaatccttcgaagaaccctatgatgcaggaatttttgtcaccattccctccaacccagtcgtgaatacaggagatggatgtatacatgggcctgtgagacagccatgcacgccttggtatccatcctaggcacggccgtgatctggtccttcacgcaggtccactctgggattcagccaggacagatggcccatttagccttcccaaagacaatcttctgtacttgcctgtcagctcacaaaccttccagcttggccaacaaggtcagaaagagctttgggggtgaggagggaagagaagggggtgccatgggcatgggcttgggccgtctcctccatgctggttcctatcagctcagaggagcaggctgccgagccctgagagagtggagggaaagctggtcttggtggccccaagggcagatctagagaccccagagaagacacctgtgctaagtgctaag

SEQ ID NO: 61416 - DNA, 2129 bp, Bovine  19866880760825
  misc_feature (1)..(1): n is a, c, g, or t
nactgcagggcatgcatcctgtgggtgctgtctgtgtccctgtttctcacgggagctcctggaggcacagaatggatccttttctacactctccttccagtgcccagcgtagcctggcacacagacgtacccaagtggatatatttttaaatgagtggttcagttcagttcagtcacccagtcgtgttcgactgtttgtgaccccacggactgcagcactccaggcttccctgtccatcaccaactcccggagcttactcaaactcatgtccatcaagtcagtgataccatccaaccatctcatcctctgtcgtccccttctcctcctgccttcaatctttcagggtcttttccaatgagtcagctgttcgcatccggtggccaaagtatcagagtttcagcttcagcatcagtccttccaatgagtattcaggactgatttcctttaggatggactggttggatctccttgctgtccaagggtgaattaatcattttatgaaaatgaatactgcttacacacataccttaattttcaccgtggggttgactctgctgaagttgcaaaggctgatctctgctaagttcagtttctccagtactgatacaatcgcaggaaagtaattggaaggggatttaaatggcaagctagggctgtctctcttatcgctggtgagtgatcgaccctttcacacgagagagagaggaaatgtcaaccaaatgtcaccagcccattctgagattatctagccgcatgcatgctgttttgaggctgagtttttaggtcagatgtatttagcattataaacatgttgactgtaattaagataatgtccaaccccatttgtaagatgctggtttaacacactctgctgttggttgctaaactagggggaaggagggagctccattctaattctgcccaaagagctgctggttttttccttatttgatgggtgtggttgccataaaacagcgtgttcctgactgttttaagagaggattaaaggcggtccactctgagaggggatccagggcaagaaggcaacagtctgtttaaatagcctcgttgtaatactttcaaggcaaaagtaaattgtcatgccatttttagacagcatccattgcacccgtgttgaaattaaagctcatttgcttctcatgggatcatgtaacttagaatgtcatgcttggatgtggccgtgtcaaagaatagcagcagaacctctaggttaggggagggaaatagccagtctcctgccctgctcacaggaatgtaactgacatgacattgaagagaaatttgatagaaacagccagctttaaatggtacatacagtttgacccagcagttccacttctaggaatctggcttatgtatatcctcacctgtgttctcagagatgcctgtgtaaaggctgcagccttgctttaaaagccagctaagtgaaacgagtaactcaagtgtaggaggtccatgggaggtggtagtgaaaaagaaaggtgagcccgtgtgcactattatgaaaagatattcatgaagtcaaaaggcaagttaaaaaaatcatatggaccacatgatctcttttgtttaaaacagtttaaggagtatatatttacatttaaaaaaagatgtagaaaaatgcctacctacctggaaacagcagtgtctctggggagagcaagggggaggagggtttcactctttccttttttatgtttcttggtttttacaagaagcttgtgcttatgtatatcacatatataagtaaaatatatattttttttaaaagcatgctgaaccaggggtgaggaaagtagaattttagttgcagccgctgggtgtgtccttgggagaaggagccgtcattgaatactgtgctcacgttccactgatggtcagtcgaagcctggtctggttggcgctgacaggtcagtgggtgtgcctcccacagagcccctctccttccctcagggcaggcccttcctccaccctataggggtcttagtttcgcacaacaagggtcctttcagagtccatgcttgaaataattttgttggccaaaatcatgccatttagagaatcatagcctgtgtggtcttttgatgtctcaagcactttctctgtt

SEQ ID NO: 61417 - DNA, 1475 bp, Bovine  19866880846302
  misc_feature (1)..(1): n is a, c, g, or t
ntgagaaattgtggatgagtcagaagtcttctagctgcaagtaacatatccaactcaaaatggcttaaaggagaatttactggttcatagaaataaataggagtagattttactggttcagacataattagttctagggttaaaatgatgccaccaagattctgttctccccatcttttacctctgttttgatttctccggcttattcctcccatagtttcaacaggtcataacatggggtctcaccgtactattttgtcgttttcccattcctgaacaaagcacagaggcctcgggatgtctagtacaaagggagtgtgttaccatctcttattttcaggtaagaaaagagactcactgcagcagtgcagagtgaccagaatgacatgctgccctgggatttaaatgcaagagcgagactccaaagtcccctagacctgatcctgaccaggccctcctgcctcccacctgacaacggcccagctgaagatgtgcactgcatccagctcatgtttgcttattccctatctcagatcaggaggtttgggcatcactttgtgctgtttctaccttagaatgttctctcgttggaggagaatgggcagaaatactagtctagcccctggccaacagtccatgacagggacagatgtttttgttattttttctgtcatcgtcattatgatcactaacattttggtctatctgtttccaacttatatctatagctacggagccatattgattacattctcagaaatgggaacaaactataatattgctttatgatccacttttctcatagatgatagtgtgaccgtccatgtagcttgtctcacccagaatgtttaatggacacatatttgcccactgaattgaaataacaaaatttcttcataggttttttttttttctctgtgtgattaaaatccttatattctcctttcattcattgtctcattacttccttagggtatgatcttagaagcaaaatttctagatcaaaggtatttgcaaggtaatatatatgatacaaatcactaaatcaccttctagaaagatgactccaaattatacactcatcaacaatatatgaaaagtacccatttttcagcaccttattttaaagtatcttgtttttaagaggctgatataagccctgaaatttgaggatatttttacaattgattctagaaactagggaaaacaaatcagagattaatttatttcccccaagttatcatatatacatagctgctttgctataaattaattcaaacttgcctgccttaaacatttagcatgaggattttatgctttattttgacaagtgcatttaagagaacccttgtagcttctaaccatttcagcttgtttttcttcttgttttatataaacaccacattcagctccatgctacagataaaattgccacacagttctcacaaaatgtatatccctgctactgtcctccc

SEQ ID NO: 61418 - DNA, 2975 bp, Bovine  19866880864094
  misc_feature (1)..(1): n is a, c, g, or t
ntgagtgacctggaaagcccttctgtgtatataccagcttacagcactgagcaaggcccagaccaggcattgagcaaatgtttcttatatgaaggaatgaaacaaaggaatctttcaaaaatatgtttatgtttagtcttcctggttggaatatatattctttgaacatgggtactgttgcctagctcatatagtccatataatttaagcttagcaaatagatcaagagtttggcttaatatgttatttattttcaattattataattattatgcttaatatgctatgcaggattttttgttgtaaatggcagaaacccaggtcagatgagttccagcaaaaaagggagctgattatacctgggaagtcccggggcagcacaggcatcagccacgggtcctcagtgtcatcagtacctgaaagcccccatctcttgactctgctgtccatgaagtctcagacaggctccttttaggtggtgacagaggtgaccactagctgttctaggtttaataaccacagccaatggagagcagcactttcctgaaagctccagcaaattcccaagcttggctcctattcttccagcttggcgctctgttctcatctagaacagtgggatgcaggatcaccttggtcaggcctgggtcacgcggccacactggtgtcagggcactgaatgcctcctgccccgcccctactgcaaccacatggcctgagactaggtcagaggtggttttgcatggagacactgagctgccaaaaatctctatctagatttgcttacactctaggagatgcaaaagagtatgactctttagatggcaaaatcaaaggctcaaaataaacttttacataaacagacaaagaaaagcctttctactatgattgcagagtagagtttcatgttctataaaagatctaaaaatgaaaactgagttagattgctacattttataacctgccattttcagacaatggataagtactaattatttctcccacaaccccttgaaaggcaaatagtgctattaaaataaacctctcacagattaaacaacggagaggttgtgacaacatctgtaccagagataagacccgtgtgtgtgctctgtcactccagtcatgtccgactcctagtgaccccatggactgtagcccaccaggctcctctgtccttggtattctccaggcaaaaatactgcagagggttgccatgccctcctccaggggatcttcccaagccagggattgaacctgtgtctcctgcattgcaagtggattctttaaccactgagccacctgggaagctcaaattaagactggtattaatggcttaagagctctggggtcataaattctgggttaaaccatccctctgtctctaagaggcataaataaacctcttcatcttcctgggccatgatgatatagcccccagaggcctctaaagagggccaaaacatattcttttttttttttttttttttgaaaaattttatttatttttttctttgcttctttttttttaaattttatttcatttttaaactttacataattgtattagttttgccaaatatcaaaatgaatccgccacaggtatacatgtgttccccatcctgaaacatattcttaaatgtaaaactgatggtcatgccatttcttcagccagccaatcagtgtatatttgccctggcactagagataagagtcttgtgcttgagatacacgagccaaaaccagctgtgtaaataaaagattgtgaagagatgtgtagttattgtgataaaagcccattcctaggcatctgaggagggagaaactgattcccctagtaggtgtagaggctagttcacaaagccaggggctaaggcttgaaggatgtgtggacgctcacagggtgaaaagtgagagaggcaggtgacaaacgctgggacacgtgcctgcccagctcagctcacaacccctcccctctagactggccctctgcagccatgattcccagtgcttggcctgtctctgcctggctgcagctggctggaccaaggtggatagctgacccaggacacagtctattggctgaatggagccaattagattttctttcttgggaatttgaagttgaaaacttgggtcagagaaaagaaaatgttggaccttcaaggccatgtcagcttgggccacggctgccatgcagaggctgtccattgggattttctacaatgatgtataaatagaaggtttgcagaaaaatctggagaatgagagtgaatagaagagcagagtgagagaccctagggcccagacacacacacacacgcgcacacacacacacacacacgcaagcacaaacatgtgaagagagtagctgcacctagcttcagggcctgtcttataatgaatcatttttaattaaagctcaagatttttatttgtttataacaaacaaacctcgacgcaaatggttttctggacactagcacaagcaaagtcctagagatgcaatctcttaattcatgctatttttctcccctcctcttattgtatatactttaagttctttcctcctcctccttctctcacagagctaatcttttctgatgtttgctcacattttttgaggcttttttggaaaatgaacaatagcttcacattatctgtcccaccattaccattatcatcatgttagtacacaaaattacaaaaaaaaaaaaagtcacatttgaaaattttctttaagtcacgttcagtctaacttggaacttctgtccacctggttgctgggaattttcacctcagctactgtcactacaaacaaagctagtggaggtgatggaattccagttgagctatttcaaatcctgaaagatgatgctgtgaaagtgctgcactcaaatgccagcaaatttggaaaactcagcagtggccacaggacggaaaaggtcagttttcattccaatccctaagaaagg

SEQ ID NO: 61419 - DNA, 1057 bp, Bovine  19866880946968
  misc_feature (1)..(1): n is a, c, g, or t
nctgctgctgctctgctaagttgcttagtctgtccactctgtgcgaccccatagacggcagcccaccaggctcccctatccctgggattctccagacaagaatactggagtgggttgccatttccttctccaatataggagaccctggttcaattcctgggaagggaagatccattggaggagggataggctacccactccagtattcttgggcttcccttgtggtttgatgaatttctaaagcttccataccaaccttgcactccaacttctttgactattttatgtagtaaagtcaatccttgtgtatttaagcccctgtttctttgggatttctgttacaaacagctgcacctaatcctatctgatacatatctaattacaaattctttgttctttatcaagaggccgatgtctgcaaatacataaaaacgtgactgaaataattttcagatacataaaagacctaagatttaatatgatatttattgacactcagattctccaaagaaacttagagctgttgggagggtgaaaatggatcatttatattataaatgtaactcagaatccagtccacacaaagcgcccaaacaatgacctgcgtgtgcactcaattagtcatgtccgactgactctttgtgaccccaaagacagcagccagccaggttccctgtccatgggatttcgcaggcaagaatactggggtggttgccatttccttctccagggcatcttcccaacccagggatcgaacctacacctcctgcattggcaggcagattctttaccactgagccacctgggaagcccaagcaaagacgacttctagattattattgttatcagatagtccagccctctgatttgatctgtgaggaaatggagatccagagaggaatcaacttgtccaaatcatgtagctcagcagtgcaggcaagactagaatccatatttcaacactcttgcttcagaggtctttcccctctcctgagcattttgcaaggttggaagctccatcacagaggaagtgtacaaggggccttggatgcccaca

SEQ ID NO: 61420 - DNA, 809 bp, Bovine  19866881222629
  misc_feature (1)..(1): n is a, c, g, or t
ngtgtggatttgaaactcaagttcttaattcctgtggccctggggagggaagagaagaaagggggttctggaggattcaccccgtctccaagcattttgagaaggatgctgaacattttacctctaaattggttactacaactggttggcagggaggcattcagaagccatcagtggggatgttcaggaggcctcaggctgtgttcttgggcctctggctgtcccccaaactgaaaagtactggagtttgtgggagctataaaagaagaaacagtagcagttaaatgcaagcatcaataataagaaccatcaaggccaggtctaccattgcttaaattacccaaagatttgaaagatgcttgctagaaacatcactgtctcagttaaggatgcagggcaaatgttttcagatacactgcttttggcaacagaacactattttctaaacacatccacagagaacactgtatatgtatatgtgttgggtgtggcagggattcctctgtattttttccgattcctttcttttggcacttgggagggtcaccaagcatcccaggttacttagctcagtctggcttctgcctgttgtcttggcttagttatgaagacacccctttcattccccccaaataattccagtttggaggataaattatatgctcgtctcaggtcacactgagaagggtagacccatgttctaggtgagactcaagttcacttggacagaagcatggggtccagggctgagaccagggagggggaagtactttttggatgttattctgtaaaatgtatgcttggagcca

SEQ ID NO: 61421 - DNA, 966 bp, Bovine  19866881325641
  misc_feature (1)..(1): n is a, c, g, or t
ntctgaaatgcctggagttttggttttgtgggtggttgggagattctcagcatgtttttcttagcagggaagtggcagagcagttcagtcagttgagtagaggaaatggatgaaggaacgggagaaatcagagggtaggagaccctgaggcccttgatggatccaggtgaaagatgatgcatgcggtggccatcgtgagtaggagaggcatttaggaggcagaatggaaagggctcagtgagcagtggagagagggagcaggaggcagtaaggtcgactttggcctcatagcttgggtaatacagtgataggaacatcacttacaaaacaagccattttccctcctgcactcattccaaacagtccaccccatgaaaggccacctgcctcctcctgctggttttcttacttcctcttagagcattgctatttttagcacctcttccccatcactgtgaagctcacccctttgcttttttctttcttctctcccctcctttcaaagctccatttccttcaaagagttgtcatttcaaccagcttctcttccccgggccttctgcctacgggtagccctcccaccacacctcttcccacaaatgaggcttttaacgctaattactgagatttttggatccagcacagaagccatgcacttaaagaagtgagaccaggtgactggagcttatttttagtggttgcaatttgtcaattgtgccatctattgtcacagtggcacccagagaccagagctcaactccagagcccaatgcctgaggatttgtaaactctgcagttagttagttagctagctaagtagctaacagaagggttagcctagtgataaagtcatatcctgtgctgtgcgggaaccctgccccttccagtcctccctgatgaggataagaaattatcagggacaggaatgcaaatagagaagaagaaaaggagagaaagacgagggaa

SEQ ID NO: 61422 - DNA, 1653 bp, Bovine  19866881415441
  misc_feature (1)..(1): n is a, c, g, or t
naagtcgtgggggctgtgcctggaagtttctgaagggggactccagaacagttttggtcactttctgaagcagcatccccctgagctggccagccctctggggttaggcagtgtgctttctaacaattcttgaaaagcctaagaacgtaggtggcttggggaatgagaagaaggattctaatgtgatgggatcatcctttttttttcctgtatctttatcaacaagctctgagaggtaggtatcagcattcctgtttgcagatgagaaaaccaaggtttagagaagtgaagcctcttgtccaatgtcacacagcttgtaagtttggggctatttctctgcaaagccctatttccccccttgcctacactgcattctaccagtgctgagtcaggctagccacactcgaatgtgctcatgtttttctaggggaaagaacatgcagtattgaaaacagttctttatgacaagggtatctgaggtacaagcacaagttctccaccttaattacaggtcctccagaatccccaacaggctacagtgaagtgaaagtcgctcagttgtgtccagctctttgtgagcccatggactttacggttcatggaattctccaggccagaatactggagtgggtagcctttccattctccaggggaatcgcctcaacccagcaatcaaacccaggtctcccgcattgcaggcagattcttcaccagctgagccaccagggaagctataagcagtcactaaattttgaacagataaagaattagaatagctgctagtattaattgagagtttgctttatacacacttcatgctcaatccattgaaatctcacaataacacatagtgttaagtgctgttattctcaccatgttacaaatggagaaataggcacggggcagtgaagtaacttgcccaagacagcacagctaagaagtggcagctttgtctacggagggtatgttctgaatcccgttgttctggagcctgctcctaattgaggagatgatggagagatggagggctgtcaggaaaaagtgagaagggaaccatcatttatcaagtatctggtcctccccagctcctgtgcccagctgtctgcctgttataccgcatataacacaagcctatggggttaatggcatccccagtttacacacaaggaaactgggctcagaaagtcgagatgacttggaagagtcccacagcggcagaactgaaatttgaagcaaaattgtctcccgtcaaagctgaagaattttccagtcctgcaggcaccccttgggggtcaagaggaagaagagtgtggagggtgagaaggctgcagggcaattcgctctttgcgagaagctcatctcgggacccagcgtccccgtgacacacggacgactggcagctttcttccgtgtgaactgtgctcgtggcaggttttcgtttcctgtgatgctcctgacagcttttgtgggatgattgcagggtagaagacagcaacctttaaaggtttggtaaaaactctgcaagtgggaggtctgtcgtcttcctagggcgtgttgtcagctgctgcttagaaatgtttctttacaaacctgggtgcctgagctctccaggtggggaaagcctgagctcagacaaaagctagggtgaggaag

SEQ ID NO: 61423 - DNA, 1160 bp, Bovine  19866881461379
  misc_feature (1)..(1): n is a, c, g, or t
ngtgcctgtgaggacacagcatgctaaccgaggactgtcctcacgcaggaacgctacactattggatggatcccttagcgtgtagaaaaccggtgacaaatgcccattacaacctccagcagggtctctgacccaccgtgcaagtgcaattgtcaacgatgtctccctcttatccagcacctattttcagaaatcaatctaaggagactctctgcccttgaaaagacaagtgtaacttctaagacttaagtgcccttcacagaagagggcagtgagttcaaaactgtgggatgtcattcaagaaaagctgtataaacagtctagccctatttcctgacctcagcttttccgagtccaaagtgggcagggagattttaagaaaaaaacagttttcaaggacaaaaagtggaagtgcctttttgattaagaatacaggtacccgtgggctgcttctgcagtggaaaaaaaaagacatctcttttaatgacatagattacacaaactttcttgaactctaaatttgaaatagcatatttcaaggcaggtgggtggatgggtgttggaggagggaaaaagcaaaaagacaataggaagtggggtgggcctgagggagctcttgggagctcatttgcagaactctctctgaaattttcaagttgagaaatgatgttatgttaatctatgtcctaattgctcagcaataaacaacacccacttgctgcataaatgtcaggaccaagactatttctgtttctgctttgaagcaatgtcagtcatggtgaagagcacaaagggatggaacgcttgggttagcgtacaaaacgttacgtgttagcataccaaaagaccgaggggcattggttcccgagagaaagagctctcagatgcctcgggactggtggagctgggttgaggtgggactgtttgcctgctgactgctgatgtgggagggataggcatgatgtctacccactcatcacctcttgctgaaagtgttaagaacaggtcactgccaagcttggatggcactgggaggagggagataacttttcaaacaaaaatgaaggccagtgagacaactttgaagactccagtcctccaagtgggtgaagatgtcaagaagtagagtgaaaaagataataataaaataaccagacttc

SEQ ID NO: 61424 - DNA, 1350 bp, Bovine  19866881643785
  misc_feature (1)..(1): n is a, c, g, or t
natatatataagaaaaaaaatcgaatatctgatttcacttataaaaaataaatccagtctttcttaatattttaagtgttgataactaattcaaacatttaagaagcatgatggttcaattagaacatgtttgtggcttaccacctgcccatggtaagtttttgtgacttttgaagatatgatcaagtaatgcctgcatatgttaaagatagataggtaggtataggaatcacacagatagtgatcacccattttatggatgaaacattgaggctcagagaagagaagttgcatatagggacttactccaagtacgtgtccttttcacacactttcacctcagtgcctctccgtgctaaaggttgttgtcatatagtagatgtttgttatttttttccacctaatatctaaaccccttcctctgtctgaagactctcattttggggcagaatacacctttcactacaaagaaatgaaagtgccagatccttttctaggctctccatggtactggatttgtccttcaagtggaccacaccctagactttgaattataagctagagaaaaaaaataaaaataaaaaagacaggagcatgccaaatcattggtggtgatgggttgtagtaatggtggcttcatcccagttccagttctaatatcatgacccataatattgccagtgtaagctgtagtctgttcttagtagtggggctgctaagaattgacgtatctactgggtcaacagtgtacagtgacttggagaaattgtccttgtctatacagcaactatatccagttctccagccatctttgggaagcaagatggctgattcaatccccttacaataaatctttgtgtgtgtgtgtgtgctgaaattggagccagtatcttatacaggttcctgatcctgggctcccagaaaacatacaagagatagctgggagcttttcataatgatttttcttctttcaacacttcactcaccaaagttccatttaaaattactgacaacagttttctgattgcccgtgataatatattctggctatttacaactccatctgtggggagaaaaaaatcctcctgaattccttgagtgatggcctttgcataattctgctttgcccccttattcctatgattgctgctcctctaaatagccatggaatactagattgtctttctttccaaatcacaagagctgaagtttcttcttcaaaatctcctcattttcagaggatgtgaaggtttgcataggtatttgtgtcttcttcatttttcccaaatccttgtttgggaacagtgtatcagccaagacagactagaattgtatcaggtaagaagtcat

SEQ ID NO: 61425 - DNA, 620 bp, Bovine  19866881948044
  misc_feature (1)..(1): n is a, c, g, or t
nttgggtgaagcaccagcttttaagcagtgaacttccggtttactgcaaagatttcagtgagtcacctgcccacagctgatgctttttgctagcactccgtttggaaaaagacagggcgtggggggaaggatgagtcatgccaaatgctccccaagctcacgggttaaaaaagccaagaacattcaattcctttcatgtttgcagaggagtttggtcacatccaaggtgaaagccccgagaagcacatccttgcagggaggcacatctggctgctggagctgtgggaacagagggccgaccgacccaggcagacgtggccgcccacacagacctgatgcacagctgaagaaatgatctctgggcctttgtaaacagggctcagaaaagcctccctttcaaaatagtgtgtgaatgtgctttgcagatggaaatgtatggatacaaatataagctgcctccacctccgctttcacaatggccatactatcggtgaagtcctacagtccttgccacgtgggcaaaaatgcaatattctgatgtaacaacaaccctgaatgtaggggtgggatgtacgtctgaggagctcaacatttaaccatagctttttcaaaacatcatc

SEQ ID NO: 61426 - DNA, 997 bp, Bovine  19866881985670
  misc_feature (1)..(1): n is a, c, g, or t
ntcctaacttctatccttctatcttcccctaagacctacaattacaatgcccaaccctggctttcaaggctgcgtcttcctgatgcagccaagcctctttctccttccacttgagcaccccacaaagtaagagctggtgcataacaggtgctcaagactgggctgaatggggtctctgattcaagtccccggggccgcagcactagcgcatggctatatgagggctgttggcggatttaagtgaacacctatgaccactaactaagtgggcagagttgagcacacttaggccccccgattgtaaggatgaggtagctagaagagagggcccaccagttctgagtcagatgccagctctgtgaggggccctggcaaccttgtctgggatctgacttgctcctttcgaaaacggaggtcaaaagttctacctgaggggacgttcgggaggatggagcaacacagggcttgcaaagtgctcatgaaggcttcccagcacgcagcatccgaggcagcacctggggaacggctgttaccctgagggagaccctccccctcaccacgctccgtcccgcacgcaaactgccgggggagttacctgtctgtggctccctggggggccgtgagctcagtcccactccacacctggagcctcaggggcctctcttccggccacctgggtccctggcccggatgcctcaccagctgagagctgttggaccccagagaagtcctgcgcgcgtcctggccggcggggctgcagcggaagagctgctggtaggccgtgcggaagtctctgttgagcgcggcgtacagcacggggttcagggccgagttggcatagcccagccacaggaccacgtcttccacggtcttgtcgacagcgctgtcccctcgcagcccccggtaaacgaacacggtgaagtaggggagccagcagacgatgaaggcccccatgacggcagccagcgtcaccgtggctttgtgctccctgagcgtg

SEQ ID NO: 61427 - DNA, 1244 bp, Bovine  19866880447462
  misc_feature (1)..(1): n is a, c, g, or t
ncctttttaagcaagacagctgctacttgctgtagccacttgtgttatgtggaaaatcagacctaggggatgtcatattgtctacgttttcccccatgaaatgaaattctaatatttatgtgaaatcttttgatttttagtatttgtaacagattcaaaatatttttaaaaccctatagagactagtcattacacatcttagggccatattccccctctgttgtcccttcacttatggatagtatgtgaatattttttgttcttccaacaaccatattttgggggtacttgcgagtgagtatctagtttcctggtgagtaagtagatctactttcaggggcaaagtgatttaactctgaaatatcggattagcaatataaattattggtttgatggatgcatgaagcgagggtaattcacctcttggaagaaagtcagaaatgtcaaacccattattttaagatctgtaagtattagggtagaagaggtagaagttaaatgtacagtcattttgattagaaatgagtcatttttctattagggcaggctaaataaacatggatagacctaataaaaagaagatgagtagcaatagctcgcttttgtttaatgatgtttataatttataagcacttaaatctgtgctttcttacttgttcccagcagaaatgccatgaactatagcacaggtattgtcctatttatatataagaaaactaaagtgcaatgaggttagtatatgacttgcctgttgtgattcagcttgaaatgggagagtttaattctcagtccagttcttctgaccaggctagttttattaacaaacccctaagtcctttcctgttgtgtatttgaggttcagtaacttaagctaaagggttccattggtgattttgtaggttgcttgaaaatccttttgattcaaactgtattataactgattcttaagggtcattctggaatctgaatgtagtcgtatctagatatttaaagatgcgtttttctccccacttaagtaaactgtgaagttgttcagttgaggatagtattttaaattttccagtataaatattagaggaaccatgactgaagcttttcttcttggttttaaaattgcagataaccatttctgatgaaccggacacattatataagcgcctgtcagttttagtaaaaggccatgataaggctgtattggacagttacgaatattttgcagtgcttgctgctaaagaacttggtat

SEQ ID NO: 61428 - DNA, 1611 bp, Bovine  19866880545561
  misc_feature (1)..(1): n is a, c, g, or t
ncaggagatccagtttcaatccctgggttgggaagatcccctgcagaagaaaatggcaacccactgcagtattcttgcctagagaatccccacggacagaggagcccagcaggctgcagtccacggggtcagagggagttggacacaactgaagcaagtaacactttgacacttcaggtcacttctagagcttctttcccaatcagtccttctgaaggcagcctgagtggggggcacacatccctgaacccacagggtggccaagagtgtgtgctaaatcacttcagtcgtgtccaactctacaaccctatggactatagcctgccaggttcttttgtccataggattttccaggcgagaatactggagtgggttgctatttcttcctgcagggatcttcccgacccagggatatagaacccgtgtcttttacgtctcctgcgttggcaggcgagttctttaccactagcaccacctgggaagtcccataggtggccaaggggcagtcatatgtggtgaggatgagggtgtatgctgggctttgggggttcaggctgaggccctccctgtggaagaagagccaggtgggcagaggcagggtggcttcggcggggaaagggtgctccatctgttcactggctgcaggcttccgacacccactcccacaggaacacctggagctcccctacccgagagccctgccagctaacatcagccaagagaatcactcaaaagccaatcatgaccgactgcactccccagctcacccaaaggagcgccaaccccaaagggagcctgggccttggcttccaagacagctcctggggacggggatagagaggaagggtggaaaggagaaatccagctgactcgggctgcatctctgctgagtagagggtgggcctccaaacagtcaggcttcctgcccggagcccagcctgacatctccccaggccctgccagccctgcctgactcagagggtggggtgacccagggagctctcaccgcccgaggcaccctgggggacctgtccagccagtttccccatatttgcctcattggcatttctttttcaattcctcatatgcactgccctggagatggtcgggttcagactggggtagggccagaggcagccccagagacaagtttgcccttcccaccaccagccgtcctaccgtctcagctctgagaagctagggacagactctggcttgaattctgggccgagcttccccttggagggagaaggaagtggggagaaaggccccttcccagacttagcccaggcccatccatgggtggtgtagatgggaattggggagaagacctgggcttggggtctgtctctgcctaggagctgagggagttgcatgcatcccccctccctgggcttcagttttcttattccaatgctcaccaaggtccgtgcccaccccccacccccagttttgaagtttgccatgctaatccagctccttggagttctcagagcaggaaagttgggggcagggtggggtcggggaagccctggtggctagagggcctccttttcagagggcctggcatctctgggggcctccagagacctgaccccacttcctgcccct

SEQ ID NO: 61429 - DNA, 2276 bp, Bovine  19866880595799
  misc_feature (1)..(1): n is a, c, g, or t
nctaaaaagaattccgcaggaggtctccttgtgtgaggctgtatcatcagctctccattctgtgtctctcttgggaatggagtctgtccatgcacagaggggtggacgggaaggacaggaaaggaggtgagggactgagtcccagtgggcttgtgactggcggggcatcctcaggggtgtggccccaagcccagaagcatcgagggaaagaagactggaagtttcaggtgcggaagggcaagggtatgagtagctatgagcccggtcaccatgaggcagagagagggaagaatcctagaagggcaggccctggtattcccactgctcaaggacccctcctgtcagaaacatgtttttttttttcttctttcttctggtgtcctgcattgctcaaaattagatgcacctacctgatggccgagcccagccagggtctcctgagtcaaggtaggatggatgcgtggaggcttgttggcgtgcggggggactgggaggttttcctggattgtctcatgattcatttccaaattcaaagtcagttcctcaaagaaatttataaggacaataatagcagctattgtggttgagccacttaccattactccatatcatgtctaataaaagtaactcagtgagggtaggtgtgattaccatgtgcctagcatgtagtaagcactcaaccactgttaactgttattatcattatgattttacaaatgagaaagctgagtctcagagagcttaagtttgcacatcaagaaagcgggggtgctggcatagactccaaagcccatgttctgccctcttatccatttggtgagtgtttgttgagtacctactgtgtgccagacatagaactaagctttgagtgaaatagtacagtcttgctttctcccctcgtgggtcttgtaaatcattaaagacttagccagaacctgacaaacttaagacgtgtaatctgaagacttaatcagtggactgagactcatatctctaagggaaggcttctagaagaggaggacccaagcaccctgcttctagaagggtagtaagccagaggtggggaaaaaagacagcacgtgaaggcctggaatgaagaaggatgtttggttcatcttttgcatgatcttaagcataccctttcttacttttgagcctccgttttccatctgcaaattgggctcagttctctgaagggaattggtgaggggccatggccgtgggagctctgggtgaatgaaacgggttcattgtggggtatgtggccttgtgatgagtcattgtttcccttcgttgatgtgcgtgtcctctccacttggccctacccttgagcagtggccaacccaaaggagtgtttggggagcagtttgatgccaagaacaagctgacatgctccatctgcctgaaggagttcaagagcctgcccgccctgaatggccacatgcggtcccatggggggatgagggcctcccccagcctcaaacaggtgagcaggaatccaccccctatcctttccaggccatgtgctgcttgctttgctttgctgccgtcagatggagtaatatgagccccacccgggggacctggagaggcgtagtctttccctaacagaagtgctcaagctttgacgctgggagccagccaggtcacacagtccccacttccactggcaccatgaacaaaaatccagaactgaggtggtagaaatccttttaggggatcccagcctctctgcgtcctggagaagacagcaaagaaaacatggagatgcaatattgtttttaacttctgttgcatgaagcactcaagaccagggtcccttaggccttccagatcagtagtcagtggccagggagagctagtgtgaccaccaggctcccagccattattttctattcactggggcaccagtgttagactctagcatttagagtctagagacctttaaatgccctcgggattatccaggcaggatatgcttgtggtgaactatccacgcagttttagagttaggttaaaactcaaaagaattttcttgattctttgaatattttgcatcttaatttaagtctatgagattaacttgctgttcaccaaaaactttgatgtgatccaggtcactccgtctcttgacgatgccagttaaaagatctttgtctttgacagatgagtcaactgcagcccaaagaattaaaaggtcctacatgagagcttatgtgggggtttttccttctttttttttttttgcctgattctaagtccagatccttttcgtt

SEQ ID NO: 61430 - DNA, 951 bp, Bovine  19866880814311
  misc_feature (1)..(1): n is a, c, g, or t
nctttcccttagtaaatacatgattcttataccagagctagcctcctgctttgtaagtttatgaaaatgcataagcaaacaaatgtcccagtactaccttctcacaagattattgatacccttcagagattctctagaacactggaaaacttcccttgaccttttaagatcagtgctgcagagctgtgcttctcaaacttctaccacgcacacgaatcccctggagaggcttgttaaaatacagcagttcaggaggttggggtccaaggtgctacatttgtaacctgctcccagaggatgctcgggctgctggcccatggactgcacttggagtagcaagattccagaccttgctctgccccctaaaccatccactactcaactccacttgtgccatttttaaagaaccccaacaaggctgaaggaggcagatttgaataggttatttagtgaggctccctggaaggacaatgtgcagtacagttattactaatacagctgtttgtgttcagttatagtgaaacatgtaattttttttttctgcaaaaacagttccaagtcacccactcatttcctcagaacccttccccagagactcagcctccattcataggaggcccccccgtatctctgacaccagggccctcaccaaggaaggcgtggcatttgggctgccacctgtgtttctgtgacatgactagctagctgcaggcatgggcaagggaggtattagaatgatgagtcctgttgggtgctgactggaagaaggaccccaaataggggagtctccccttttttcccttccagcacccccaccttgggccctgccatgctggctgatcttccttgtgggatagttggtcttccgaggatgcacagccccatgaatgactctcgccttttctctcccgtgggtctgcaggctgctctggaaatgctgctgttgcggaa

SEQ ID NO: 61431 - DNA, 3540 bp, Bovine  19866881000569
  misc_feature (1)..(1): n is a, c, g, or t
ntaagaaacaccagaggcttggattggtcagaaggtaaactccaccagcaagttgtttaggactccccaaatgagcctgtgaatgccaagtttctgctggagacgaaactgctcagggttttaaaaaactgtttcagccccatgtcctattcgtcccacgtgctgtatacaagttctctgaatcagctgatcattcaactccctatgccttccacaccgctactccaagactgaaatgcaaacaaagctgaaatgaagccacaagaaagtaggaaggcgcccaaaatcatgtgaaaagagcccacaccacacagcccttccaccaagccttgaacttaggcactcagagcaggccttactaaaatctgatcgtggcaaagataaaatgccataacatggagtagaactgttgttgagtccctaagactcttgcaaccccatggactgtagcccaccaggtccatggaatttcccaggcatgaatactggagtgggttgtcatttccttctccaggggatctttccaacccagagggtgaacttgcatttctgcattggcaggtggattctttaccactgaaccgctaaggatgcccagaaatagggacagaggtaccttaaaaaaattcaatttttctttggaataatcctcactctggtgcatttccaatggaatgcagctgacacacgaatctacaaagctgcaaagggtatcaagttgcatctgtatccatggcaagcctgcctaaccatcggtaaagctagtggaatcagggtgagggcatcccctggacctgcaaggttcccccaaagagacattctagggccaggccacgccctaagcccagccatctcagaaaccaatgtcagtgaccacagagggcaatacgggagacacaagctgtgactcaagtgaacttcgggacaggacacccacttcatctcaggttactgaactcactgctccctggcgcagtggcctccactggctatctgtacagtggagttccttcagcaataaataagatgatgcctcggacctagtattcccaaatgtgcctagtaagagctggcttaccattgctatctcattatttcattattattattactattatccagccatcactgagcaccagtaataacttccctcccaacctcccaagcttgggaggagattaatttgtgaaaaggcaggtgaagcttcgacaaacacacggctcttatcacacagcaccgttattgctggctgcaccccactcacagccctgacgtagctaactgaacctgagttaactgggctccgatatccaaagagggagcacccactggtagcttgcatcctcaggactgtatctgctcttcaaatgaaaagcagtttataacaaacattccctcttggtgcggccagccagcgatgcatccccgagttgtcccccatgtgtgaagtgtgtcctctccagtgggaggcacctcagggatcgaccacttaacagggtcttgttccagtcaatggacgggccgctccggataccggaaacaggtgactgaatttgccttctctcctttttgcagtcattggcagaaaataagaaactgagacagaagcacaaaaagaaaaaccctgggggcagaatgccactttccccactgtcttcagtcagggtcatgcagagtcctatgagggaaggtctaaaagaagagaaaatttaaataactttccccagccctcagtacagaaaagtggagtgagaggatgaaagggcctgagaacaccaacccgatgtgaaatttgcatacttttgccaagcacggcggcgtgtgtgtgttggggggcgggggttggaggggcagtttgcatcgtccctaaaggttatttcactccaccacgtgctctctccacgggcctctccagaggctgaacttttaaaataaacaagaacttctatctcaaccatttaagagaactctatgatttttaaaaggggaggggaaaaaaaaggtcgccattctgagcacacatcgcaagctttgttctgctcccttccccacttcctgttgctgcctcacctcgtcacattttagttctgaagcctgtgtgtttgctctggtatcactgtcaagtttcggtgggaggccgccggcgggaccaggatgaggacagtacggttctgagacacaaaatcccaaccgcctgaccgtgaggaaagtacagccagcctctcacccgcccggaggccagcagcgcacccactgctaggaaagcgtttgtgggcgagttttactttgtggggaactatctgtgtgggcaagggccacctaaccaccagccaataccaggtggcttaaaactgggaaccacggggggaaaatactgggcacccacagaccaagaaatgccccggaggcgccccagccccccaaacctgcgctccagggagccgtcgccacctgggacaggaactgagagactgaaatgctttggaagcgggtccctgtttaatctccggcttagaataaaggttagagcggaaaaagagacgttaaaccgtttggccaggcccctccggttacagggaaggaaaccagaccaagacctgcctcacacagctgacttactaaccacagagtggacactggatcccagctctccatctcccaggatggggattttcagtatcttatcaaatgaacgtggagccaatggtgaataaatgttggctcagccatactggacactggctggtccataacacaatggggtccaggtgggaagggcagcctaaaatactttttggctcttacacaccaggagggcccatcttctagcagcatgtcttgtgggtaagagtagcccgtcctcgtaacttactccaactcctgggtgcctggggttggggttgcccttaaactagcttactgcagccttaactgttcctaaactagcttactgcagccatgtcccattattccccagccagaaatttaaaaaaaaaaaaaattaaagctgggagacggtggtgctgcacaggctcaggactgggaatgcaacactgggcttcacccgtcggtgaacacaagggtggcctcgggagagctatcctgcccttctcatcttcctgggtccacatggaccatgagaacatcagcctccaagaagctgccaaccccacgggtctctgattctaaacctgtgtatcctctctcaggccctgagccccacggagcttgctctcctcctgcattcaccgctcagccctctggctcatgccacttgcccagcacatcctgggagtcctcagtggggtatgctggagggcgcagcgccctgtgcgcctgactcgagctcaccatgagctccccatctgccttcctgtatcatcaccacggagggaggctttgctcccaggcacccaaccaacaacaaggtgaggaggggctgcagcgcacagggtgcccactagcttcagggtgggctctatttcacgggcagtgagacaccccccccccagccctgcctcatcagcctgtgtctcctcc

SEQ ID NO: 61432 - DNA, 1696 bp, Bovine  19866881004488
  misc_feature (1)..(1): n is a, c, g, or t
ntctaaatatagatccaactactgttccgaagccccaatggagtcacaattttttttttttaatgggaaagagaacacttaagacctcatattagaaaattaacctggccggcacacttcaacaggtaacagaggagcatttcgggtaagaattgtttaaaatagtgtgcaagaagggcgggcttcgtgtatatgcagcttgtgtagtcacattagaccccgcacttagaaggtcccagcactgttcaatcaagatggcgatggtggtcgccatcttgaaattcattgtggtttttgaacgaaaagttctgcgttttcattttgctctggacccggtggtttagatggtaaaatcttctgcttgcaatgctggagacccgggttcaatcctcgggtcaggaaaatcccctggagaaggaaatggcaacgtactccagtattcttgcctggaaaattccatggatggaggaacctcgtaggctacagtccatggggtcgcaaagactcggacacgactgagcgacttcgcttgtgcagagctgagggaaaccaggagcagacaacatagcaccagaggactaaaagcagtgtggaaccttaaacaaacccataagtcagaaagggcaagaaagagaaatatctggaatacagggaaggatgttgctgaagtcatatgtgagagggttacacaacattagtgactgtcttctgtaagaacacaacacagaacacacccacagtcaaccggcagcatgcaaagagcactctctgcccctgccctctgacctccagcacgtgcctcccattggctgaaccctacaggaagtcagagactctggagcctattgaaatccgtataggtcagcctgccggggtaccggatatgctaggagaaggtaagagtgagtttggagagggcagaaaatagccagctcaggacttctatctgaaattttcaggatcatgggttaagagtaaataacacggaaatggaaaattcaaacagtgagtttcagtaaatgactttgtgttgattttttttttttaaaggatagtcatttgctaggcatcatgaagagggtcttacgtactttcaaaggaaaaacgaggtagtccaagaatttttttaaaaaaatcagatgtttgaaagaaccatcgttaagtgaagagagaagcctaagatttcaaaatttttagaaacattccaggccccaaagtcgaattttgtaggtaacacctcacctttacttctctcacgcttaaaccaacatcacaacaaaaaggtacctttgacaggcactggatcccaagaattgcaaggaccgttagggttcaagagattcttttcacacatgaatagcctatacaaagggagttcattatgctgatttgtaaccattccgactactcaattcctctgaacatttttagactattcagatcactttcaaaaaagtgcatatcactgattaattctcatgccactcagagttcttaactattcagatacgggctaaactaaatttatcctttataatttccttgaaaaacaaagatttttgctgcaaatgtgaagaagactgcagggacacacttcatctcttttttaaaaattgaggtaagagtcacagaacacagaattaagcattttaaagaacatagttcagtgacacatctatgtagttccaaacatttt

SEQ ID NO: 61433 - DNA, 1472 bp, Bovine  19866881050741
  misc_feature (1)..(1): n is a, c, g, or t
ngtgacacgagaacaaagcagcgtactaaggccaacacaagctaggatacgatgcatgacagaagaaaatggatgtcctcttccaccagaccttattgtcttagtagaaagaaagtggtcctcagctaagactggaatgggagagaaggtgttggaagtttaagcagagaggaaaggtcatgggtgcaaatgcaaatagttagggaaataattaccgtgattgactgaggattggattaggtttagtgatcaaaaaattattgtgtgactatcttttgtcttacttcccaccatactcagctgtttgggtgcattcaaacaattgacagcggagaaggcaatggcaccccactccagtactcttgcctggaaaatcccatgggcggaggagccttgaaggctacagtccatggggtcacaaagagtcggacacaactgagcgacttcactttcacttttcactttcatgcattggagaaggaaatggcaacccactccagtgttcttgcctggagaatcccagggacgggggagcctggtgggctgccgtctatggggtcgcacagagttggacacgactgaagcgacttagcagcagcagcagtagcaaacaattgacagaaagttaaacttaactttaaatgttcaagggacttaaaatatttactgtacttttattttcagttgcaccatcatttgaaagtggcaaggagatccaaccagtccattctaaaggagatcagccctaggtgttctttggaaggaatgatgctaaaactgaaactccaggattttggccacctcatgaaaagagttgactcattggaaaacactctgatgctgggagggactgggggcaggaggagaaggggatgacagaggatgagatggctggatggcatcaccgacttgatggacatgagtttgagtgaactccaggagttggtgatggacagggaagcctggtgtgttacgattcatggggttgcaaggagtcggacacgactgagtgactgaactgatatgaaatgttcttaacgaacattaatttcatcttgataaaatgtacttggtgagttattgcagttctgtaagttttttaggctatagttggatttgcctaagtaaactgatttaaattgtttcataatgtagtatgtcttaaaaccagggctggcaactttttttctgtaaagggctagataataatattttaggctttgtaggccatgtggcctttgtcaaaatcagcaagccataaggttactgtaacagttactcaactctgctgttgagtaaagtctaaagctgctatggacaacatgcacatgaatgggtgtggctatgttctaataaagctttatttaccaaaaaggtggcaggcaaaaaagtacagccctgaggttgccaacctctcttttaaactattgtaatatagctcacttaaatcttctatgaaagcagttgaaatg

SEQ ID NO: 61434 - DNA, 717 bp, Bovine  19866881071551
  misc_feature (1)..(1): n is a, c, g, or t
ncggcgaggcccggttgggaactgggagagggggaacagaggaagaggaaagagtaggggttgaagggaccatccccaagtcctcagatccaggcaaggcttcagactcaacagaactgctgggggaagggtgagggagggtaccgcaaaccccgggagccctttctagcaacaataaaacaaacataacttcctcggaggagggaaaacaaacacctcgggagagggacaaggatcagatgcggcctccccctcaaagatctctgaccttgcggtggggaggggcccctccttccctttcccagagacctccctttgccgaaggctcctgcccggccagctcacaggttcaaacgcgttgctccccctccgccctggcaagtctcccgccctcgccgccgcggatcatccagagcccggggagagggccgcccttggggttgggggaccacgcgcaggcccccgcgcgctcccgctcccgggcgcactcaccgaagccccgggtcccctcctccggggcctcctgggtgaagatccagggagggttggtggcgtagagggaagtggcgggcgggttggcatgcttcttgccgaagagtttgctgaaagtgccctgcaccgtcgggttctttttcatgctgccgccggcccgcgcgggcgccgagggaggaccgtccctccctcgcctgccctgctcgggactggactccgcaccgt

SEQ ID NO: 61435 - DNA, 767 bp, Bovine  19866881081240
  misc_feature (1)..(1): n is a, c, g, or t
nttagggggaaaaggaggccaacccttgagatttggggaacacttctagacctgttgtttttctgtgagttttgagctaaactgtggaagctccaaaggaggaaaagagttccaaaagatcgcacgtggcaggaagaagccaacctgagggagaaagagcggaggcctctagtcgttggccaaagaagccctcagaaccacacacgaccaacaagagcctccgcatgactcgagtgtgccccaagacataaacaagaaggcatcatggaagtgcagaggaacaaaccccggttatttctactccaccgatgagagcagcacggcctctctgtctctcccgccagtcctcctccttgtccctccactctccgtcttctggaccggaaccaagcctcccccctcctctggatcatgtgcacacagattatctgcctcttcatgggacactcacaggaaatttaaacattctcagaaggggttcttctaagcccacttcccctgccctctgccccaccccccacccagctgctgtgtattcaggaaatgcaaacccaatataaagataacccgggccaaacagaaaaggagactggccctgtgaccttgttgggcaaatgacttcccctccctgcatctcagactcagcttctgcagaatgaagaggctggacctgacgggctgcaagaagctcccactgcctgcaaccagcaagggctcagctgggggaacccttccagaccctgcctgtctcgggggacacccagcaa

SEQ ID NO: 61436 - DNA, 1901 bp, Bovine  19866881125410
  misc_feature (1)..(1): n is a, c, g, or t
nccgatgactctgccccccatggactgtggcccgccaggctcctctgtctagggaattttccaggcaagaatactggagtggattgccattcccttctccaggggatcttcccaacccagggatcaaactcaggtctcctgcactgtcggcagattctttaccatctgagccaccagctcaatagatggtaaatattgttattaaatgctcataaccggtagctcataacaatggccttcaaacttttccacctcacccccaataagatattataccatgactcggtacataaaatatcaacatatacatataaatatataaaactgaacaaatatttcataaataaaactgacccatacacatctgatccactcaagtctttttctccaattctatttcaacctttctattctatttcattttttaaaaactgctggtttagtcactagattgattgcacaacccactaatgggatgccaacagcaacttgagaaagactgatatatacactaagcccaaatacctcctcctgtagtttccacccctttccattctagctttaccttctggaaccacatggaactactgtgctcttcacgtgcttgttaaatgtccaagcacgagaaacatttcccattctcttgagcagccactgtgtgtgatctggcttcccaatccctcttcgtacccatctgctcctcctctggactccttcctccctctgcaagttttcctccttcagttaccactgcccaggatgccctgctcttttggcagcccttctgctcttctggtggcttctatgttgcctcaagtcaagcagcctgataagagcatcattttgaaccttcccaacagatgcactattcatcccagaggaactcagctctccttcagcccatccccaactcctctctgtaagctggttcgttcatacaaaggtgttccctccacctcctcttctgcctttccacaaacgagataaggatgcctcaaggcccaccgaccagaagagggaaagtgaggaagagtttcaatatgcacagttgagcttgaatctacaaacagaaagtgcccccttcttactcatttctgaactagctctgcctgcaaaccctggcaccaaactgagaaggcctcatcacccagtcacatctgtcccttcatggtgacagcagccttgtgacaaggaatctcacacctggctgcaaacacagcccttcgtgctgacatctcccagcaccaccttgcatatgcaggaaatgatacatatcagatacagccagtttcccatatcctatctgcatttgtagtcatcaaaaacatacacttctaatgataaaaaaaaaaaaaaaaaagaaatgcacacacttgcacctaatgtcactactttgatgggtaacatttcataatctggtctttaaaaagtttccaaagcaaaacctaaaaaaagcctactgtgccttcaaactgagagctggcttctcctggctcccctatctatcctgcaggtggggatctcatcacaaaaacatccacatgtctttcccacagaagagaacccatcaactcatatttatgggtttataatttaagtttgggcttccctaatggctcagacagtaaagaatctgcttgcaaggcagaagacctgggttggatccctgggttaggaagatcccctggaggagaatatagcaacacactccagtattcttgcctggagaatcccatggacagaggagcctggcgggctacagttcatggggtcacaaagagtcggacatgactgactgactatcacttatatatatctgtacccctaaataatgtattttaaatatttgttgagtttttaaaatatattccaaaagtatcataggtaggaatactcagggt

SEQ ID NO: 61437 - DNA, 1664 bp, Bovine  19866881205312
  misc_feature (1)..(1): n is a, c, g, or t
nttgtttgctgatgtgttgtcccacccagaagttacaaaggaaataaatgatttcaccttagtaggtcctgggcatgtagctgacttatttagaatgaaggctcggcatgtagctgacttatttagaatgaaggctccggaggccagaatcctgctttgagcccatgtggggattatgacagcatcttgactggttgtccagacttgactcctacttctgaccttagatggcccgccaagcccttgccagctgtctctcactgtagctctatgggtgactcggtgtgatccgtcttcaaggcttttctcctattgaggatgtcaggggtccctcccttccttttttgtaatgtaaaaggggatatttccaaaacaaaaaaaacatatctcgcatttgctaggcgttggtggctattcccctctgtggctcagtgctaaagaatctgcctgcaatgcaggagccacaagaggggtttgattcttgggtcagcaagacgccttggagggggcaaggcaacccactccagtatacttgcctggagaatcccacggtcagaggagcctggtaggctgcagtccatggggtcgcaaagagtctgaactgacaggactgaagtgacttagcattcaggcattggttatcgtgtgccctgggtcaataagatcttcattcttatgtattagctcgacttagtctaattggcaatgatgaattcaataaaaatgattgaatcctcactatatgcagaatactgggctaagcattagatcaagaattggcagtttttcttttttacttttatttttttttattttttaactttacaatattgtattggttttgccatatatcaacatgaatctgccacggtatacatgtgttccctatcctgaaccgtcctccctcctccctcctccctccccgtaccatccctctgggtcgtcccagtgcaccagccccaagcatccagtatcgtgcatcgaacctggactggcgactcgtttcatatatgatattatacatattttattgaagaattggcagtttttctataaaaagccagagagttaatatttcggctcggtgggccatgtctctgtccccagtactctactccacactgtagcataaaggcagccacagacaacacatagatgggtgagtgactgtgctccctgcggactgtactttcagaaccaggtggtgggacttagcagcagaccacagttgctgacccctggtctgacccttttgacccctttgttggagacacagctatgaacaaacctgacatcattataaccctcatggcgctttcattcccttgggaataattctttgctattgttaatagcattgctttggaaacacacctgttataaatagttgacaagtagctttggggggagcattggaagcctaagtaactttactgaagaaagtttccagtgaacactcagttctatttatattatctatgggtgtgtagtggggtctgggtgggggtgggggggtactgtgtgtccttaatttggtagacactatttttgagttgttcttttccccacttaacataattttgcatgcatatttctatgtattggtctagagtgtataattttagggctacatagtatttctgctaattaaggcgagtcatgtg

SEQ ID NO: 61438 - DNA, 633 bp, Bovine  19866881284213
  misc_feature (1)..(1): n is a, c, g, or t
ncgggctgaaaggcgagccagggttaaacctcggcggcgccaggggggcgagagccggacagccccctggtccctcaaaggcgcagccggcctttcggtccatcctgggacgccagcctttccaggaggcttcacgagttcagggaaacgtgaaccaaagatggttgggtggcacagaccacctcgagccgggtagggggcatctctctcgttgaggtcccacaaaacagcgagtgctttttgctccggagaaagttaaaccatgcgtttttcactatgggaaaatcgttgcgcccgttcccccaaatcttcgggcagcacaaataaggtgctcccgctccccggaccttcgccactgtcccccacccccacccccactcgggcgccgggtgtggacagggcgggggaaggctatatgggagcttaaagcatgaggtcatgggcagagaaggctgctgccaaaagcggccgaggtttttgtatattttgaggggtaacggttctccatcttcagcagtgttgagttctcccgcataaccctataaattctggggcacctgggccagagagcccccgaaagaagagggggctctgcgctcttttcattctatgagcttttggccggtgccctac

SEQ ID NO: 61439 - DNA, 709 bp, Bovine  19866881949137
  misc_feature (1)..(1): n is a, c, g, or t
ncattgttgacagtgggcagggcacagcccgtcctagcccaggcactttctgctcctccgggaggaagcagcccttccccttggggacccagcattgtgggggtgagggtgcagggtagggggcttctgactggcacaggcctacgagcgccacaagaccaggttggcaggaggcacgtcgaagcgcttgcgggtgtggtcggtgtcccggcggtacaggtagccgcaggtgggcttctgcaaggtgtagaaggggttcagggagttggagtactgggaggtgtagaaattgaacctgagcttttccgggttctgccctctggggtccaccaccacgggcacgtaggctgccgccagagtctgctcacggtcctgcttccacgacagggacaggggacggtgtggagccttcaccttttggcctgagggtgtcttcggcccatgactgggtactgaggatttctgtgagtcctgggaggaggaaagaaggggagagctggggactttgcgagggccaagggcaggaaggagggggcaggggcactgctgagaggcccacagagctacgcctggagcccagccctgctggccctggagctagacacttgcaggcaggagaaagccttcaaggtccccccaccggacctgcttctacagacttggtttgcttcttggagacctcgaccagctcagaggctggggaacccgg

SEQ ID NO: 61440 - DNA, 799 bp, Bovine  19866880350093
  misc_feature (1)..(1): n is a, c, g, or t
nttgggaagatcccctggagtaggaaatggcaactcactccagtattcttgactgggaaatcccatggacagtggaagttggctggttacagtccatggggttgcaaagagttgaacacgactgaacacacatgcatgcatgcatatatgtatacacacatatatgtatacacacacacatatatgttctccaagcttttttctcctctgcttctacactttaattttcttcccactttttgtgagaatttaaaaaatgccatggttggaagagagttttaactgcaaccccctcattccacagatgaccaagttgaggaggagggaagtattatgcagtgccttgcctagagacacagcgattcagcagaggtccagggacctgaatttttggctcgtggttcccaactcacctttccgttgggccacagatgtctttcaggggttgatttacatggtggtgtcaacctgtacactggaaaagttatttctaaatggatgctaattgcttcttggcctctctgttaattaatgaatgtttgggtttccaggcaaagaaaagcctctttgcacaattaacagaaataacctgattagagagacttctccaaatcgtgtgctaagtaagttaatcagaccatagaagaaataaagtcaaggacgcttggaagcatctgataatgtgccaaatttcagtgagaaaacaaaattaccaaattgtgttaggttatctacggacagtagttttttccagctcttaggttggtaaagactaagtgatcaggaaaacattcttatt

SEQ ID NO: 61441 - DNA, 2006 bp, Bovine  19866880401165
  misc_feature (1)..(1): n is a, c, g, or t
ntaggaggaaaaaaaaaaaaacaggaaaaggagaaaaaaggaagtctagttggcaggttttatgaacagatgtaattccttcaggcaaatctggtgaaagggaccagggcttcttcagggcctcccaaggagccccagggtctctgggtgcctcatccacatcaggcagtgatgccaagtcattcagataaagtgtctccccaagccaacagaagtttctgtgtttgagcctagactttgcatttttgccttgcaagaattctccctgtttatttcttttgacttggaagtgctttctccttaggctgaggcaaaaagaaaaaaaaaattactttttagtagtcaggagagacaggaagaggtttccctgtgcctttgtaactgagtggtttgaaaaaatctgtctcaaattgctttgatattcctcctgttgtgaggtggagtctctgtctgacccccttgacactgggaggtcttcacgactgatttggtaaatagaacagaattatgctgtgtgacttccaagcctaggttagacaatgccatgtggcttctctgatttctctttgggacagttgcttggggagtcttcagttattttgagacaacatggagagacattgtgtgttaaaggattaactctgcaagtccagttttccaaacactgaacactggaaagaaaggttgtatgtatgtatactcagccatgtctgctctttgtgaccccatggactgtagcccagcaggcttctctgtctataggagttcccaggcaagaatactgaagtaggttgccatttccttctccaggggaatcttccctacccagggactgaacctatggctcttgcatcttctgctttggtaggaggattcttagcaccaagccacctggaaaactcagaaagaaaggctgacatttgctaacctcctgggaggtaacctttaagcctttgggctttcctgcctgttaagaatatctttgctcactggagccttggactatgccagatagttaactctggtgatgtgatatatgctgcggaccttgggctgaagtatcaacttgaactctggagaggtaaggttagctatgcagatggtcacccatgctgacatgactgacccttaagaaaaataccagacatcgaggcttaggtgagctccccagattgacaatattgcatgtgtattgccaaacatcattgctggaattaagtgttgtttacatgactctgctgggaaaggacaactggaagcttatccctagtaccttctggagtctttcctatacacctttttccattgctaattttaatctgtagccttctgctgtaatagaccataattatgggtataacaattctgctaagttctgtgagtctttctaatggatccttgaatattacaaaatatagaagttggccaaacctctgaaattatttggtccaaacatctcccagacttctctggtggctcagtggtgaagaatctgcctgcaaagcatgagacacaggacacatggggtttgatccctgggttgggaagattccctggagtaggaagtgccaacccacttcagtattcttgcttgggaaatcccatgggcaaaagagcctggtgggctacagtccccaatggacgggaagagtcagacatgacttagtgactaaaacaacacatctcccagggaattaagctcaataatacatttgatagatgaggaaactgaaacttgaagacattaggtgacattttcgaactcataccaattattgcctcctcgtaagattgtattcaagcctctttagaaagtcttgcacaacacttttccaatggggcttttatagatttgtcatttcctttgacactttgttcaagtgatttggccaacggtgaagccaaatatacttgcagagtatcagtgtagctttgaggctagcacttcctcttattttgtggctcatgatgtcagcagatacaacagtgacatgctttttttttta

SEQ ID NO: 61442 - DNA, 1583 bp, Bovine  19866880404697
  misc_feature (1)..(1): n is a, c, g, or t
nactagttatgtctgtatttgaagatactgcttttgggaaacaaggtttttttccctcaggcctgaatcatccatcattactggctctatactctgctaatctgaaaataaaacaaaacaactggtgtagagacaaaccagagtaggaaagggcgcacaatcagatggcaaagaaaaggtgaggcacactcaggcagagtcacacactggtcagtttttggtgccattgcattctgataacaaagatctacttccaaagaaaccactcttgatgataaaagagctccagtctgtggaaaagaaaaacactcttcaaacacttacaatggcttccttattatttggaaaatatatttctgcagtggccgagttctagcatcagcaaagaaagaatttattcagaagtacaaaaggatttagaattccttcaaggctcctttcattctgtttaagatgtgggtcatgtctttgaagcattgttgtctgtgggttgtcatggggtggttgacagaaatataagagcaattgctaccatatcgagggacccatacatcataaagatttggtttggatggatgtagcaataggatatgtatacaaaatattttgctgatgctagaccaaagatatcaatgaacaatttaaaaattcagctgcagtacaaagggcagtcaccttgccatgtgagcagcagtgcgtgagggccaggaaattaaaaggcttaaccacacacttgaaactgtccaagctactttattgcttaagtgaaatgaaatacaaacacaaatagccaagagggcaaaatttaaattaaacttcaaaatcattttgtgttttaaccatctacaatgttctcagtgctacaacgaagtctactttctttggaagcctagaaaaataatccaagacagaaagctcccctgacttcatcgtcttcctttacatgctctgtgcatgttcactttgaaataaaagtttaccaagatccaaaggaatgtgatggaactacctaggaagagtttagtttctaaaccatgatgaccattgccaatgatggccttctctaaaatgagaccttgtctgtagcaaggtttcaggccaagattgcctgaaatgctttcccttgttaggtgactgcattgagaattgccctgcaagacagatatctgcaagggaatcgttaggaatcttcttcactgtactctggctttcagttcagttcagtcactcagtcatgtctgactctttgtgaccacatggactgcagcacgccaggcatccctgtccatcaccaactcctggagttcacccaaactcatgtccattgagttggggatgccatcccaccatctcatcctctgtcgttcccttctgctcctgccctcaatctttcccagaatcagggtcttttccaatgagtcagttctttggatcaggtggccaaagtattggagtttcagcttcagcatcagtccttccaatgaacacccaggactgatttcctttaggatgggactggttggatctccttgcagtccaagggactctcaagagtcttttccaacaccacagttcaaaagcat

SEQ ID NO: 61443 - DNA, 2033 bp, Bovine  19866880506038
  misc_feature (1)..(1): n is a, c, g, or t
naatggtgtttcattaagaactatctgcccacttccttgtgcctgattcaaagtgtgccctgcttcttgctgtaaataacgtattcaccttaacaccaccatgtgtcagcaacctgctattgtttactgctgaaacctatggctggagagcattccatatgttcacatcgactttactctaacactcttgcttgcattaaaaggattcagtggcaaatggcatagctttcggtgttaaggactactgcattttaaatcatttccagatcacttcgcagcacatctgctaatgtcttttttagaaaaataagtgccccttggaaagatagtcttaaaaaagaaccacagagcagggagctccttgggcttgtagaggtcagacagatttttagaaaatagaagaagaacccaaaatcacttcagccccttaaatttttattttaacacaacttagagatatctggattttttcatctttaaaaataaggaaactgaagccagagagtttaaattacttattcaaggtcgacttcctaaccagctagggctggcaatcaagtggccacagttcacagttgtagaaacaattcagaatgaatcttagaggaaagtctgaacctaaaactgttcatccagacatgctctgaccttaacataaaatgaactctgatgcctgggacagggtacttctaaatttgaactttatctcttcatttacagattgggatttttatctccacatactctcataaaagtatcaaatacaccccaatccagaccctctttttgttcactaatcgtttgaaacttgcgactcctttgatgcattattgaatcactagactacatagactcctttgatctatgagtcaataagccttgaagtccagtcacccctctatttcgtgtcttcctcagcgcctagtgacacagaatcttgatattacagttggtatgcaactgtgtccatgtcactgtcgttgctactctgtggggtgaatacttgggatgagtgaacctccctctgcagtccatcaagttgttcaataaaatggaaatgagtgaaaactcaggtgatctgaggaatatggttccagtcacccagtgggctttgcctgggaatcagaagactggtaaataaaatgtctagagtctcctttgcactttgcccaccaaagctgtaagtttatgaacacggcctactgcttggtttgacgcgtccctcattcgctgttgggtgttgtgcctggttcagtgggtttttgctggtgccgcatgtatctacctcatgttcacagactgtttctgttaactaccacaggtttacaccctacgagtggtataacccccacccatgcaaccctgactcagacgtggtggaaaacaattttactttactaaatagtttctggtttggagttggagctctcatgcaacaaggtacaaggttgcccatctttgtcacacgcatcccacggtctgctgacaggcttttatgctggtaaactccaccaagaacatagcgggtaggctaaaaaccaactcagaagttaaaaaagatagaacctggcttcttagacatttctaaaaataaaaaagacaaaaatatgacagcaacagaactcctttgctacagatctaaaataaacttctatcaagcaacaaatataaattttcctagagggaaggaaaggataaattgccttagaaattgtttaccaactggcatagatggagatatctatcttttcctttttagtcataacctcacaagttacaatttgaaagggctaaaatttgaatcctttgaaaattaggttgatttacatccttccaatagatgacagtccctaaaactgtcacctaattaccactctgacaaaccctactgggattcatcttagcttcccagtaactttttacaatctccctctatgctatggttggtaaccatagcaacagtaaactggagatgttggaggaaataaaattcaaaccacagaaaatgtaatatattttgtacattttctatg

SEQ ID NO: 61444 - DNA, 1897 bp, Bovine  19866880663019
  misc_feature (1)..(1): n is a, c, g, or t
naaaaacagttttgttttgtttttttaatctgcccgtgcactttggaaagtattaggatatgactgcagaattctgagccacaaggaagaggtatgttcattttgaaaaaaatctaagcgtacatgtgactcattttgaccctactcaaatctgtgtgattcttctgaagtcaagaatgtctattttttttttaatagaatgaatttcattctaaggaaagattgtcctaccaggatacagctgagattgtgcttaggtcaaccacagaatgatttatgtccacactgtggataatcatcctccatcgaattatcagtcatacttgatgtgatactaaatatttggaatccattcaccatctgataggtattgcacagtccagtattggatttgaaatcttaagcacacatatgaagttttatctgcatctgatatgctgatagatgtaacttttaactggggttgggatctattttgactatccttactttgattcttctgggccttttgctcatatcacttatattcttctctttaaagaatgcacatggataatataactaatgcttttcatgcatctcttttgcttctgcaggagggatctttgaaactgtggaaaatgaacctgttaacgttgaagaattagcgttcaagtttgcagtcaccagcattaacagaaatcgaaccctgatgcctaacaccacattaacctacgatatccagaaaattaacctttttgatagtttcgaagcctcacggagaggtaactattttcacacttgtaaaagcttctttgggtgatgtttctgctcaagtcaccttctctttgctacctgcccttttgcacagcagacatctctgtgccaagggtttgctggcgatctcagcccagcatcatctgaaccctcctaatggacgttgcctagttctgttttctgggcctttctgatcagcttgcccttcagtgccctccactctatggttaactggttcagctgtgaatggaaaatgtcaagcttgatctgtttttccttcctgaggctgagataccaccatgaaattgtacagtgcagtcaaataaaactttgtggaaggtcatacctactgagcatgtggaaatgcccacaacacacagacttcacaacctgaattctaagcggccatgagccactgggtttacctagcatcctctcaaatattaccttattccctttccgcaagatcagagaaatgtgaagattatgaatattgaatcattatgttttacacctgaaactattataatattttatgtcaattatacctcaattttttaaaaagggaaaaataggaaaaaaaataatggaactgtgtaataaataaataaagcagggaaatttatgggatcaaagaaaatcttttgtgtctgaacagaagacaatttcctagaaaataatctaagttgcatgtaggctgcaaggtttgtctcatggaaagagtctttgatgtgggacttattacaaatcctccaaacacttccaagatgaccctttcaagccgcatttgacgtacttgaagatagactctaactagagagttgttgggtttccctacaggtgttcgtctgggaatatcaccccagaatacgaggggctctttctcttttagagaaagaaaattaacctttttgatagtttcgaagcctcacggagaggtaaatattttcacacttgtaaactagtgaaagacacagaatggggacttccctggcggtacagtgctgaagactttgccttccagtgcaaggagttcaggtttcatccttagttggggagctaagatttcacaagcctcacagtcaaaaagccaaaacacaaaacagaagcaatactggaacaaattcaataaagactaaaa

SEQ ID NO: 61445 - DNA, 1233 bp, Bovine  19866880708732
  misc_feature (1)..(1): n is a, c, g, or t
ntggccccctggtagcccagggacatgtctccactcaagtgacggcttcatctgagagtctgggccagaaagtgggcacaatttccccgtattctgaatcccccaccacctatcaggctgtttgctttctcctaccccttgggagttttatcccagcgctgacaagtgagggacccttctcaggtatcccttggggtttaggctttcccatacctggttggatgtttctccttgaaagcagataccgaacactccaatcttccccacttggcccagtcatgtatactggatccagaaggctctgaacatttacaactccaagtaccttcttttttctcctttcaaacacctgactattgtaattaataacttcaaagacagcaatggcttctatagatccatacaagttcatttaagaactcaaagctgcaactttgactagtttttcccctgtgtcagccctaccctaagggcaatgcatatgaaagctctcgctttagaagtagaaaaaaagaggctgagatatagaagaactggaaaaagcacatagattagtatcaaaatgttctgcctcagtgctaacttcatatttcaaaactttctatgaaatcatcactaatgttaaagggaaataaacttccctatatcctgagacaggggtccccagtccctgggccacacagccgcatgtgagttgggggcaagcaagcgaaacttcgtctgtctcccgtatagcaggcggattctttaccagctgagccacaaggggagcccgtctgtatttacagccactccctaccttttgcattgccgcctgagcttcacctcctgtcagatcagcagtggtattagattagcatgaaccctactgtgaactacgcttgtgagggctctaggttgtgtgccctagaatcagtcctcgcccaatttttcttggaaaaaattgttttccatgaaaccagtctctggtgcaaaaatggctgagaatagctgccctaagagcttggggattgtggacagtcacaccaagtaaaaagagagaaagaagaaatgacatcacacactatacttacatttaatttaatggaaggaaaaaaaaattctaaataaaatccttaaataaaagtgaacccaagaaagatgatccgtgtgtgtttggtgccaagtaaccccgtgtcccccatggatgtatatattttagtttaaaggccctggataagaaacaaggagttc

SEQ ID NO: 61446 - DNA, 1727 bp, Bovine  19866880732553
  misc_feature (1)..(1): n is a, c, g, or t
nactgtctaaacttcctgtaaggttctctattagaatttcttttgatgagtttctgtaaggcccagtcagccatactgcatctaaattcctttgaaatgccagaaacagtgtagaagtgttattcagtgacctcatataaccaacacatagtagcacatgttctgtaaagtaagtttactttttacagtgttctttgcttttttcaaacctctatggtataaaaattgacttgcttagtttatatgtcaagaagcatattttcagttgcattttaagtatcttttttttgttctctgctgctaaaatacatgtattttaagtcatccattcaacacatcattcagcgctagtgaaacaagttaacctgtcttagggattttctgagctgtgaaaaaatactaaaaatctagtccagggattgacagacttcctatagagcacttcctataattagtaaatgtctcagaggccttgcaagccacttcctctctgtcttaagtctccaactctgcctttcccttgtagaaagcagtcatagacaggatgtaaatacctgatcacatctgtgttccaataaaacttacgtaaaaagacaaagagcaggccagatttattctgcaaacagacccccctgataacttgggtgacttcccttaagtgccacagtttttcattaacaagtttgagacaaaacaggtcatcaagatccaagaacagtggtcctcagacaaagaggcttcgatagtaatatgtttattgcatcatccatttaagggtgcaagatacaaacacaaaacacttcttaatttaaggagaatatgaaaacatcaggcaattcctatagtactactacaaatacaaccttcacctacagtaaaatgaaaccatttagtcattttggtcttcatcccagtctttcttcccacttggaggcttgggcccacccgctggttttgccatgatgatctgcaaaacaaaattcacacgagtacacttacaaactcaagctttagaatgaagagaaagaatatttttctgagcctgctttgttattaagcaatcatcaccaatgagcaatctgttattacatcgcatatggaacactagagtaatgttggttatcatccagcaggtgagctttctgttttgtggacattaacagcaacaaaattcacattcattagcgggaggccttctaagacatgcatttcaacgacccaatgtgcggaatgtgagaaacatttgcatgcatcactgtcatcaatcagtttggcacctgatttgctatttatatatgagattcatcttgccaaccatctttatcccaatttccttgtggtttaggagctttaggtccacctgccagttttgccattataatctaaagtggttgataggtaaaatatatatacatattaaagttcaacaatggtatttcctagtaccctataagtacaagaattgtgttcataaacaaaagtcctagcacctagctgcctataaacttacacgccagaaggctcatttatctagaatgcactaacccaccatttcataagtatgaccatctagcgtttttaaaggatttatgtttgggcagaaaaaaggtgggtggttgcaggtttgggctcaaatgaatttggggagaagttaaagttagttggctttccacagagtagaacttctaaaaccctgagagagagagagatatatataaatgaattta

SEQ ID NO: 61447 - DNA, 1402 bp, Bovine  19866880747136
  misc_feature (1)..(1): n is a, c, g, or t
ntctgcctgctctgcagagatattttagattctttctttctgggattctgagtgactcggagagtgtgtggagtgaggaatattaaatagtgatttgatgctgtgctgtagcactctgacttttcataatgcaatagatctacctgttgcctggatgcagatatttcagcttgaaattcctaatgtctgcttaaagatagccagtgtgacagcaatgtcatcaccaggaagcctcgtagaaagattaattcatggcctgtaccaatgatatgctgaagctgctctcctcacctgattccaattttagtaaaatgacagagaaaggggcaaatgtgcttagaatttatgtcaaaacttgcatctcgaagaattatactgaaatacagaggctcattttggttttatgttcatatacgccaagcttttacttgaatggaagatatagaatgattctcatactaaagacttctaattaagggattctttttatgactgagaacggatatcaggctacatcaacaagagggagatcttttaatggagaaagccctcaatcttgtaatgtaactggttgggtttatagtataactgtagagctacagtcaaaggttttcttgatttttctttgccagaagccaaattaaaaaaatgtccattttaagaagataaacataaattgtaagatgtaagcagacattatttctggatattcagtctatctaaattgtatgtatttgatggacataattccttgggattaaatactttgcaaaaagtaatttagaaaatgtcaaccacaaagcaaaaacactgacatgcacatttgtaacaagtcatagtaactaaaaatttttgtatggtttttccttagtttgtctaactttataaatcaattcagttcagcaaatggtttgtaagcttctgtctagtgagaacataagcccaaaagcagtgatgagctttatttttccctctaaaaggacaagaaagtgtatacttcaaaacacaaattcaaaagcctctctagagctaacagtgattaggagattaactgtttttcatttctatctcactaactttgaatgcaaaccactaaggtgataacagaaagtcattttccatcttagctcactgacgtagagtgaccaagttcatggtctcaggctatgaggatgggaagtcaaagcgaatcggcacacttatttaaccaagatttgtcttggggaatcacatccaagatgtatttagtggctttatgaattggaagcagaaatggattcaaaggtatggggaagatgaatatagttgagaatgcaatccccgtgacagtgcacctgtgcactgcagggagttattttttaaatttttttaatgttttaccaccatgctgtgtaaaagattg

SEQ ID NO: 61448 - DNA, 1146 bp, Bovine  19866880819977
  misc_feature (1)..(1): n is a, c, g, or t
naagatccaaataggtttttccaaaaggatttgttttaatgaacatccttttgaactcaagtaattgaagaatgatttgttttcgcttacctgctgaactcctggcttatggtcactgatgtgatagctttctgttctgggcttgcactggtgtggactgtgactctgtaacttctcatggccaccacagacactgattgtccttcattgttggtttcttggggggggtctgatagacactgttgtaagtaattgaaattgcaggtgtttttcacatctcgtacttaaatccacaaatatataaaaaaatgaaaattaagagaacacgtccagagctgccatggttgggttaaatctttctctgagtatcatgctcttttcatgaaatgaaatatctgtatttcagaaatacctgacctgaaataggtctcctgcattctgaaatagaaacagcacttaatttcaaattatgaatgttggatgaaatcccctattcgattgtgtgtcattcacgagaggagggtggaggtgtcacttacctttatttttatttgtctttttgctcaggtaaactgttatctgatagggtatttaatgtttaccccgggtgttcagattggttgtagcataactacagcagttaagttccttgctttattttcagtcttcaggtgcttttgtctgctgttgatgatttgctaaatgcgcttctagagagtaaagatgctaatctcctaggaacttatattggaagcgtaatgccagacaacagtgaatgggaaaaaatgagacagtctcttcccgtacaggtatgtttgatattggagagtgctcatatcattcctgaagtttgtatttcatgcaggcttaaatattttaattttattctgggaaagagaaaatgtaaatgaaatgtgtatcttactttccctttctgcctttgaatgctcatatattggatatttgatctttacaagacagcagttgacacgacagttgacagcgaataggatatagttctgtcctgaaggtaccctaaaatacacatgttgataatttctgctagtagaaactgaatttctaggcttctgtgcttttactagtaaactacccacagcttcctttttgaaattattctaagaacat

SEQ ID NO: 61449 - DNA, 2972 bp, Bovine  19866880852350
  misc_feature (1)..(1): n is a, c, g, or t
ntcatctatcacagctgcttctaaacggttccctcaacatcaagtcagaacttgagagaaaaggtctacattcatcttggtttagaaacttgggtttctaaagctcaaaatgttttaagatttgtagccctttacttgaaatgctttcaactcgcaaacacattattattcaattaataaagcctgggcacttacactatgaaggtcagagccagagaatcccaacaaaacatttgagcagtaggctattacctggcaaatgtgttttttctttgctctcagcacataactgaaagagagttaataataaatcttcagatgatggcattagcaagcatcctttcgctgagctgaaatagttataggccacatcacagataaaagacactgatgagtcattattttcagcttctgacaatttctttgctttggataaagtttcatgaagtttaacaataattctttcaacataaacttctccaatcaagtaatctagagaaaaaaattcagacagacaaaataaataatatgaacagtgaattttctttttttcaactttcgtttttcatttttcaatcggtgtattttaatactttactttgggttaacattccaccttgtctttccatgtgttttttaaaaaacacatcgttgttttaaaaaacaaggtgtttatgtattagatagaataaaagtacatcaataaatcaatctgttccatcacacataaaagccttcacataaaagttttaaattaaggcaaaaagacaaaattagagtgaacggttaaattcaaatccctttaaaatataaaagtaaaagcattaaacatctcaaatcatgttacaaaggagaaagggacgtcagaggacagatggttggatggcatccctgactcaacggacatgagcttgagcaaactcctgcagatggggaaggacagggaagcctggcgtgctgcagtccacagggtgcaaagagccgggcacaactgagcgactgaacaacaacagggtgtttacaagattaaggtatctgaatgaactaaatcctgctgttctcaactaatactatgctaactaaaaacatggaatcccccaaaaaaggtgaaaaagaatgactcccttcctactgaaaaaacaagccatactttacctaccgtttttaacatgttgggataacaccatgcttaaaagagtccatctttctgagaagtaaggttcagaagatactgtggattccaagtctttgttacaaagatgctctgccaaggttaccaatttctctccaaggatatctcctttgagccaaggtgttactaaagcatgattatctgaactagagcatgcctaaaaccataaaaattgtaccaaagattaggataaagattaaaaaaacaaagtgtacctgcccaaaatattacctgcaacttagtacctcccttcatcagcatggccccaactttatcccccactcctcctcctcaagtgcttaacaaagctggtatcttccctactccccactaagtctcgcttatgtacacttccatgctttgttcatgctagcttctcaaccataaatattccctctctcttttatttatcaaaattacatccattactatattcagtataaatcccacctgctttgtgaagtctcccataacagcccatactcatcattgcttttctctgaatttctagagcaaataatgtttcatgtgtgtatgtcttgtttccaatgaaactgtaagttccttgagagcagagactgtcttaaacttctttgatacctgctatcaacactgtagatatgttcaacgaatagtgaatggatgaactttaaagacagattttaaaatgctttacaaatattaaactgttgttcattaattttgttaaaattaaagaataattaacatataatagcggcaaattacttcaatatgaacaatgggacttattatttgcccaaattttatgaaatagttactgaggccagatatctgacagcaactggtttattttcagggggtgaggaaggcaaggaaaaaaactgtaaatccacccccaaaagcatggtgatccatgttcccagagcttcttttggtataagggctgagaagaaaggaatttgcaacctggttcatttcaaagcaatctggaaaaaaaaaatccaaatgcagattgggtagtgtctgaaaaattattttatctccttatttaaaatattgtaggtaacaagagcttttattttagcccaagctttatcactattctggctttatgaccttatacaaagctcttgacctatttcttaatttaaagccggacctatttcttaatttaaaaaataaacattaacttagaaaatctctaaggtcctttccagttacaaaattcaggtttgtttttaaagaagctggctttaggattctgctcataacgtatgagattgcataaaaacataagaaaaactagaatttagatgggtattaatattggctttcctaagatagcttaccaaataaaaccaatctatagaattctatagaatccagaaagtaaaatcctgaataaaaagtctctcaggttatcaagacatgaagtccaacttctcaatgttttaacactttcacagaaagaatctgaccagaggatagggaagctagtcaggcatggaagtacagaggctaacactggctatgaactcccaaaccctgcccaagccttccaaacagagacatctgaactatgtggcaggtacctccctaatgttggaaacaagatgtatcaatcttctcttatcaaattattaactacttttgctctgattttagacttatccagaagctttatcataatttggtttttcatgtcgcctacctatagggaaagagataatggataaagtaattcaaatggtgtgcctaataaattagatttctcattgaaaaagagtaaatcaacact

SEQ ID NO: 61450 - DNA, 744 bp, Bovine  19866880967779
  misc_feature (1)..(1): n is a, c, g, or t
naaatctaaaggcaaaatttctctttgtcattttcgttttttcattcatttgacaattcccgcccccccaatcttatttacattgcttatcatctatataacacagaatcatttaagagttttctctcttcaaatatatttgcaatgttcttgtgattagcagtaatgaaaagtttatagcgcattaaaaatgagcacagaggttctgttagtattaaaatgaaggtacttgaatgcaagaaaaatgtaacccacattatactctgtaattactctgctaaagactttgctgtttgtgagccatccagtttgtgtagacatgagaagaatgtggttacgggtgactgaaggtccaatctctagtcaccggtgttggtatctcggtcactctggtgcctgagttgggatgtgttattaactcggtacaaacaaggaactaagagggatctgaaattcagttccacagaagtttactatttatttaccaagtgcaaggcagagtagccacaataggaaccccaaagtgaatgactcaatgccagccttccaccccttgaggagcggctgtcttcccagagggtatatcgagggcgttagtgagaaatgaaattgggaagttccactgggccctgtttgtggggagggtttcgacaaaacaaacactttcaaaagggagtgaatgatcagggctggatttgaagataatgaatatgggtgcagggcacagactgcgtggaactagag

SEQ ID NO: 61451 - DNA, 1311 bp, Bovine  19866881050965
  misc_feature (1)..(1): n is a, c, g, or t
nacagtggtaaagaatccatctgccaattcgggagacacaggagacgcagttttaatccctgggtggggaagatcccctggaagaggaaatggcaacctgctccagtattcttgtctggaaaatctcatggacagaggaagcctggtgggctacagtgcatggggtggcaaacagtcagatactactgagcacctgagtgcaaggaacacccacgaactccttttagtctaaggcccttgcactgatcacaatctacacagcacaggaggcagtcctgaagcgcaacctctggtggggagtctggaatcgcgagacttggagtcggatctcgcctgccactagttcgccttcagactcagctctgagcaggattttgctctacggttgagggtaactggatgacccagttctggggaagtctgaggacttctagggagaatttcctgccctcaccactctcacctaactttggtagttgtcatatggggatgtgatctatagagttgtagcagccatcttgagactatgaggaaataaagttataaaaacaataaggggacatccctggcagtccagtggttaagactttgcatttccactgcaacaggcatgggtttgatccctggttgaggagctaagactctgtatactgaaagacactgccaaaaaataaaaacaataggaaagctaatagaaagccctgactttactgagaagctaaactaattctgcttctggacttcttgttatttgagagaataaatgtccattggttaagccatttttgttgagtgttctattaacggctaatgaaaatgtctgataaggaaactatggcttgccaagcactgtactaggccttcataatattcataacaagttaagcggtatggactgctcttttcgttctttttgaatttgaattccagaacacaatgtgtttgcccaacaacattggatttctgttgccccttagtcgatggtattttgttatggcagcttcagctaagacatttatttatttactcctttcggccatgatgagtggcttgcaggatcttggttcctggaccagggacagaacccgggcttcatcagagaaagctcccagttccaaccactggaccaccagggaattccccaagacacctattttaaggcctttgataccaactgccaaattatcctccagaaacattgtagtagtaggcacccccatcagtagcatataaaaatatacattccttgttcttataccaatagacatagccatacgtgcatgtttgctgctggctgctgctaagtcgctt

SEQ ID NO: 61452 - DNA, 1602 bp, Bovine  19866881300728
  misc_feature (1)..(1): n is a, c, g, or t
nccctttgcaaggtgctctgccacctctcgctccacgctgctcagatcacttgcagcaaggccactctccttcctggggccggagtctgatttcacatctggactctcaccgaaagccttctcttctcgcacatcggaacccgacgaaggcttttccgttaacactgtcgtgttctgcgtgccagcaaaattcaagtcaccgtactggtcgtacgtgtgtaagacagacagagagtagaacctgtgggggtctgcagaattgggggggcaggggagttgtttctgtttttccagatgagccctgggaagcgagatctttcttcttggcttcttcatgttccatcgctgactttctttcttcacattttaaaatcacctgcaagtctgcacagtcctggattcctcctagacactcattttccgacggctcgtgaggctgaacagaagcagcctgaatgtctttgacgctggactccacagttcggactctgtcagttccaaacgctttctggaattttcggtatttggggcataaagacggcagagccagggcagcatccttttctaagcacatggattcacatgtttggctggcactgtcctgcagaggaggagtcgcttttgcactgccttgatacctacgcagtttacagtgaggggtttggacatttttgttgtccagaaattcctcctcctcatcaatttctaaatccttctggtccaaaagagaaaacttaaaatctggtttctggcaaggcgaggagaagcatttttttctggggcattcctgctggtctgcagtggagtccagaaacttgtatttgagaaactgaaagcaggattcctcaatatcaggtacacctaaaaattccacacacttgtacacctcatccacattgtccttactgagtatcagtttagcagtgtaggcaaactgaattaaaggttcaaatcctttaactgtcacctgttaatatacaaaacaaaaacaaacacatcacataaaaagctgtctagcagataaggacgagagaagtagcagggtggcaagatgaaaacctcttagtgatacttataaaacagggattttaatttggtgagaaaaaaatattcctctcagaaatgtaaagctaagggaatctagcaaagcttgcttctcacatcctgttcactgggaccacaccctccactttatagatatccactcatgatgatccgtggagtatgatttactcatatgagataaagatataaacattaccacaactttctgcattagtggaaagaaggcatctatggaataaagcaacatggataaacgttcaacaccctgtttcgagtgctggggtctgctgccatcctagatctgcgtggttaccatattccaaacaactcctcaaccgtgataaactcctaaagtggaatattcaatgctggagaacagtatagctaaagcaatgaaagtattcctaaccacggtggacagtaaatggctacctatcaattatcttagagtttctaataaaatttttaaagattcagatttacaaagtgatcctacgtgaagacctaaaacttgtgcctagtacagtctcagcaaag

SEQ ID NO: 61453 - DNA, 771 bp, Bovine  19866881389605
  misc_feature (1)..(1): n is a, c, g, or t
ntggatactgcaataccttacctgttgacttgactgctttcatttctcctaccaggtggtaacttctttgagggcagtcacctgtctttaaattcccggtatctctcatgatgcctggaagaagtgggtatttcataaatatagatgagtgaataaataaaaggaggagacaacacagaaattcatctgaggctcttttcccctttattcatgtgacttgataagaatctaatattgtcagtggcaggagacacagaaagggggtggattcaagaaacatttaagtaagaacaatgacaagtcttggagttagagatttaattggaagcaagaagagcttgtctagaatgacctttagatttagaattcggttaactcagtggatgatggtaatattcactgagtgaacatccaggagtaggttagaagcagaagataaagaatttacattcagatggatcaaatttaaggatcctgtggatcaaatgaagggatctctaggaggcaggtggatggagcgattttggtgtcttttaagtcagaacccactgcaccttcctctatggaatgctttaaaaaaaagccaaaccaaccaactactaactagaatgtcagctaccagctattagaatgttaacacaatttatatatatatttgacgttttagtggttataaagtcaattcttgaccatttgtctgaaatgttcataaacccatctttgtttcgggaaatgatactcatccatgagggcccaggttgaacagcagcc

SEQ ID NO: 61454 - DNA, 904 bp, Bovine  19866881475620
  misc_feature (1)..(1): n is a, c, g, or t
naccaagatggaggtggagaatgggataaaaatattacagagataagagaattctcccagaggcagaataagatgagagttaacaaagatttaggcaaagagaaaggtgtgtgtgtgtgtgtgtgtgttttcttttcttatgagttttgatgaggcagaaattccctcctctattcttttgttcagcatccttctggggatgatcagagcattctacttcatttctctatgtcatcaaagagcagatttaaattttatctttgggagagacagctattggttatataactggctatgcattgtaactttaacctcataatattcttatttttcctactactgaaaagggttactggaaaggtattattgcacacacccagccaaacaaaaagcagtggtaaaagaactaagttgtcacactgctttccaaccttgcacttccccatatgctgtccccctgctcagaatatttttttcctcatcaacacttctcatatagatttaaactctctctctctgtatacatataattattttcttttactctggggaaattctggaccttcttacaccttgtcagtttctcccattaaatgatctcataaaccatgaccctctccttcataatttttccactttacaattaaatatttacttctgtgatcagtgtatttgtgtccatatgccttttctacactgcaagccccatgaagactgatcgtctattgtagtcattaatgtctatacccagtggtctgccttggagagtcactgagtcgggggaacaatggagattgagatgatcagatggtgtcactgaatctttggacatgaatttgagcaaactctgggagacagtgaaggacagggaagcctggtgggttgcagtccatgggggttgcgg

SEQ ID NO: 61455 - DNA, 725 bp, Bovine  19866881604132
  misc_feature (1)..(1): n is a, c, g, or t
naaatctttactgccttaaataccttttctttagtctcttttgttggaaagatggaaaatagtcaccttctgctctctaaatgatagcatttatgatttcagtgactagagaaattttggccaattttgtcttattgtacacaaagcaaaaatagtggacatgtgggaaaaacattttgatttattggctgttggatctcaacttatatagtaaggatcatctttactttctatcagcaactgtttgcatggacatcttaagtgaagtagctcagtcgtgtccgactctttgcaaccctatggactgtagcctaccaggctcctccgtccatgggattttccaggcaagagtactggagtgggttgctatttccttctccaggggatcctcctgacccaggaatcgaacctgggtctctcctaattaggactgggttaggcaaatttcctccaagggtaaggttgtatcaatgaacctctttgcagggcagcagtgggaatgcagacataaacagacttgtggacacagtgaaggaaggagcgggtggggcgaattgagaaagtagcattgaaacatatccattaccatgtataaaatagacagccagtgagaatttgctgtatgatgcagggagctcagacttggtgctctgtaataacctagagtggatgggatggcgtgggaggtgggaagaaggttcaagagggaggggacatatgtatac

SEQ ID NO: 61456 - DNA, 864 bp, Bovine  19866881956440
  misc_feature (1)..(1): n is a, c, g, or t
ngtacagttttgtcatatcctcgtaagcatttggtattatcactattttttatttgagtacttctgttaaaggtatagtggcatctcatcatggtcttataaatattcttttaaaatatgatttttagtagttggggttgtcttcctgcagcatatatttgagatcttaatagatgattgtttttctatatcatcgtaaccaataacaattattgtctattcaatgatatttcctcaaaaattctattctcactgttttattgagctattacctggccagataaaacaggttgtctctttctttagatcaaatatttatacattgcctttgtgttaactactgtctcataggcttgcagggagagagagagagagagaaagaaagacagagaaagagagaggcagagaatcaatgtatctgatttaaaatgaatacatttgatgctgtggcttgaacccaggttgtgagttgtgttgatttttggcctggtgtatatcatcaggaggcatttgaagtccctgttatctgatcaacataaaccttcctcactgccttgcgcaatgaatttctgtaatcaccagaacttggctgaggagttgcctttgtccttcaagaggccacagtttcttgtctgaacttccttttgttgccaattggggagggcttcagagaggaggaacatgaaggcaggggtgcatgaggaggtgggtttatgtgggtgatgaatgcagtttcataaaatgagttttgctaggagaacaaagtgctcctgcctttgtgggaagacaagattgaagaagaagctctccttaatgcattaggcaagagcaggtcgatggatgtacctgccaaactcctttcct

SEQ ID NO: 61457 - DNA, 1504 bp, Bovine  19866880166042
  misc_feature (1)..(1): n is a, c, g, or t
nacccttgcctggaaaatcccatggatggaggagcctggtaggctgcagtccatggtgttgctaagagtcagacatgactgagtgacttcactttcacttttcactttcatgcattggagaaggaaatggcaacccactccagtgttcttgcctggagaatcccagggatgggggagcctagtgggctgctgtctatggggtcacacagagtcggatacgactgaagcgacttagagcagcagcagcagcagtcagttgattaaaatagattattatcatggtgatagtatctataattaggtataatcagaatccctgtagtcaagtgagatattttctatagagatgcaacaaatccaaaattttctccttggtcaaaagtttcattatcctatctgaaactaatataaatcccagagttgtgacttaattcaacagatattccctgggcacctactctgggccagacacagcaggggtgcagcaatgagcaagaccctcctcccctgactccagctctcagggagcttgtgactagtacatcctgggtgaacccacagcagatgacatgggacacttcattgttccatcactcagggtcctaccatgcccacggtgaaaaatgtaaggccagtgacacatggtacttttattagaaaagaaatagatggcaagattatttatttgcactcaagggagaattttcatgaagaattcatggtaagagatgaaagaggtaagatttaaatagaagaaatgactaaggcgcttagagaagaaggagattagagggaaaaaaggcagagcaagaattaggtacttatattttttcctccttgtcatacaggagagtatctgggagccacacttttaaaagttttcatttgaaaaatgggagggaggatcagaataaagcagatggggaggtttccagagaaatgaggtcaaggataaaagttgaaataagacattaaatgtctaaagctaatgtgggagtaaaaaaatagatcatctatattcccatgtacctagaatgcaggtatagacagctgtcaatactcatgtttctttatgattcttttccactttttctaaacaaattttcttcttaacttcatcagtgggccacagcacatttaaacagttcttcatgacttttcccctattgtttcccaagacagcagtgaacaaaacagtattgtaatatggcctcaaaacttcctcagatcaacatctaccaacctaatgcaagcattccatctcagatagctccttagtttcctgaactgcattatgtagcttggctttcatttcatttcattggcacagaatgctgtgtaagatcaattctgtaattaacatacggtagtaactctaagaataataatcgtcagaagaacactgacatgtgtcacagttttcagatgggaaggcttgagatactttttgagactccaggttcctgctgttagcctgaatttattcatgaggaggcttaataga

SEQ ID NO: 61458 - DNA, 1083 bp, Bovine  19866880452704
  misc_feature (1)..(1): n is a, c, g, or t
ntaatttaaattctattatgtataataatatatgaactttaagttcaaaaatattttaatttgttttattcaagctcctaatccataagccacaacagcttcctcaacatacagtttgaagagttttaccaaagattgcatttgatcactgagacccatttactcttccttcaactgtcttttcaggaaaaaaaaaaaaagtacatcaagtactaggaaatcttaggaatttgctaagatctaagttgcttccagagatttccaacagaaatgagccactaaagcataatagttaacagattcctactcttttcggggaatggggatggggaaaagaggcataggattaaaatcacattttaattaaatcatttgatttcatttcctgttaacaaccaaaaaagaaatacttattgcatgtttatctctgtgctagaagccacggagataaaatgaaaagtacagttctcttttgcaaggtatttatagtccagagagaggaacgtgcaccctacttaacaaaaggactaacaatcttaatacatctgtgagactttctctgattaacctattttattttagcgctgattttattcattctacaaactccacaaactccctggggctcctaatgaagcaatgtaagtctaaataagtagactactgtgctcaaataggatgggagatgctctgaatcttgccagagcccaagtactcactgcagagcggagtatgaccagaaagaggtctgaacataatcccttctagatctgttgtcttctgggactactgtgtcttctaagagctgttgaagtcaagaggttaaacattttattctctaatttgcactgaggaagcaaaatcctgagcacaccttagtttcttatttacaggtatcagaaggtaggggaaaaacttctctggtgtccagtggcttagactctcagcttccactgcagggggcacagggtccatccctgttcaggggattaaagtcccacaaggaagcacacagccaaaaaaaaattagataagaaggaaagggaaatgcagcattagactgtcagaatttctagcaataca

SEQ ID NO: 61459 - DNA, 1109 bp, Bovine  19866880484070
  misc_feature (1)..(1): n is a, c, g, or t
nccccccacccccaccctgttattcttttgggcacagaccggccactccagatggtgtgttagttaatgctggacatagctttggagaaacttccaacagacgaagccggtgatgtcaggattttgctgtgcgtcgtcccccttcccccctgcggttcccagggtaggaaggtgctgagatggaagccgagggacgcccggcccacctgccaccacctgttccctccttcagccttctgctataaattctcctccttcaaagattgatccagcactctcccacagctactgcggaagaagcgctcctttcctatctgagcttcggaaaagattttgtcttccagaagtctccggttttcccagagacctttctcgaaccagccacaccaattctgctgcaggaaagttcccttctcttttgcaacttaacactgggaaaatgactttctcttttacctctcaatttcctctaaattttggcaagtgaagagacatctatctggttatccaataggacacaaggcggaaccccggactccccactgcaaacttccattccacgtagttgctttgtgtatgacttatttgctaggaagagccaaactgcagagcgggttcatacagcagccacgcacaactcgtgaaaggacccgagagctcggcgcctccctcctgccggcggggaatgaagtcctgcaagccctgcaacacggcggcgggagcgcgtgccgcgcccccttgcgcgggtggagccgagtgcgcgggcacgtgctccggggccgggcgactggagagcgcggcgcgcaggcgcctagcggcaaacgcgcgcgagcgccgccgcatgcaggggctcaacacggccttcgaccgcttgcgcagggtggtgccccagtggggccaggataaaaagttgtccaagtacgagaccctgcagatggcgctaagctacatcatggctctgacccgcatcctggccgaggctgaacgattcggctcggagcgggactgggtcaatctccactgtgagcacttcggccgagaccactaccttccgtttgcgggcgcgaagctgccggcagagaccgagccctacgtgccaaaggctcttc

SEQ ID NO: 61460 - DNA, 1872 bp, Bovine  19866880891956
  misc_feature (1)..(1): n is a, c, g, or t
ncgcagattctttgctcagcgctcaacttttgcacacaagatgccctacataagtgcttgatgactcctggtgtatggttgtcattccaatcactctgattcctaggcctttgtaccctgaccagggcttttcatgagtgacttaggggtgaattaattttacaggccatcccagggactaatgaagaaaaatacaaagtcttcccacccagtgagtgatgattacatccgtgaaaccaagaatgcggtgattctagacttgggaaaaaagatgaatttcagtgatgtcagatcaaaccagcaggtaagactgttgggttcagatgatttattggaatttcattgtaaggaatgtaagtttgcttaattcagtccttaggtcacctgacctcagtgaaactgacactgcagctttggaaggcagagtccagactgaccatggtttgtgcaggaaacttgtccacatggacccacagttcttgattagcccaatagctaattcagtttacttgtttacatgcgtttacctagaatagagtcggttgagagggactagatagtctgctttccattccagcaatcctctgctcagtattggcaaacaccatcacatctttgagacatttcaatatctgagccttgaggtgatctggacttgaaggaactctggagttccaagctgtctcttatctgattccttcaaccctaatgtgcctggggattgctcaccagttcctctcaatctttacattaggttaaagtttgtgtgaaacagccattagccaatatcctgtggttcaacctgtacaaccccctgctttctagtttacactgaaggagaaaaaggaaagtcatatgcaagcattataggaaagaaacactattttatttgaactagtttttctttttcgtctgtgccacatagcatgcaggatcttagttccctgatcgaggatcaaacccatgccccctacagtggaagcatggagtttaaaccactagatcaccagggaagtcctgagccatttacctttgctttctgtacggtggttattttttaaatgcagatatatattttaataatttaactcttggtttatttcctcaggtaggaactgattaaaattgattttcaaatagaacataaaattttagtgaaaactgtatgtcaaatattgtgcagtctgtgatataagtgaccctggaaacaagatctgacactcccctgaccatatgctgctttccttcatgtttttaaatcttacttccagtggagccactgatatacagtattttactagtgtgttatatgttgggaaattcttactgagtggattcttttgaatatagtgtctacagtactcaaaattggaacttccctggtggtccaatggttaagactttgccttccaatgcagggggtgtgagttcaatccctggtaggggagattcacatgcctcagggccaagaaaccaaaacatgaaacaggcaatattgcaacaaattcaataaagactttaaaaatggttcacatcaagtaataccttttttaaaatgctcaaaataatgctttaaaatgttttttaaaattgactttaaattattgacttgaagcaattggaaatattgaagcttgccataatcaagtacacttttcatatatcatttcatcaaattcatacatatctgggaggcaaataccaaggcaactatgcttcttttccatcttctagatagagaaactgaggcccagttgtcaacctgtcaggtcagtggtagaacaggaaccagaggcctggtttccaagacattcacacattttccctgaacctctgcagtcttctgcagtttacaacaattacctccaaacc

SEQ ID NO: 61461 - DNA, 767 bp, Bovine  19866880917222
  misc_feature (1)..(1): n is a, c, g, or t
naaaaatagataatgtaaaaatgaattccagcacagaaaatgggaacttacagaaaatatgatgagtgatagataaatactataattgggaataattcacatgacataaagtaaatcactgatctagttctttgtgaaacaacaacacagaaaatcttggcctcctccaggattctgttgtctgtctttgaccagttcaacaactctgtacttcacctatgatcaaagaacactgttgcccaccgagtcctattttggtatctctaatctttcctttttggctctgctcttatccagtctttaaatgtcacttgggaatactctttccttattgttcttccacctggttttacaaatttcctaggacaggctcctccctttattccaacaaggtaggaggtaaggagaaaaaaaaaaaacagcaacaaggttagaaaaaaaacagcacctacataccccagaaagccctaattcaacaaggtaaaaaggggtggttcagatgaacagcttggatgaggatggatacaagaataggtttatcgctctcttaatcgttagattcctggaggtatctctttactaggtgatattaaatcattcaatttctgcccattcccttaagaaatcacttgctttacctcccaaagtgagttctgaagaagcaccttacctggcacaaactgtcgtggatctctacaggctaaagagggttccactggggctcctggtccttcacctcacttgttgagtgcagggaaatctgctgt

SEQ ID NO: 61462 - DNA, 1239 bp, Bovine  19866881054524
  misc_feature (1)..(1): n is a, c, g, or t
nccccctgcagtggaagcgcagagtcttaaccgttggaacaccagggaatctgatttgtgaagttttaaaaaataattcctaatggaagactttttcccccacctcaaaagttgtaagtatctcatactacttccctgtttcagttgtatcaattgtcctcagaaacaataatgaaacatgatttccactcttgctaatgaggagctgatttgtagagaaattgctaacttgattctcttatctcagcttctttctagctcttaaggaagagtcaagtggcaaataaaccagtttcaaatagattcaagccagaatcatttctgaattctttaggaagaccaagtatgttctttctccttttgagatatggattatgttggcattattctcatttatttttgtttaatcaaattattaacaagttcccacaaatcaggagtcttttaactgtgtcttctcttaccattgcttgagactaaaacccctttgtgactgccctgactccaagtcctgtcttcccataaatagttgattaatccccagctgaagcaatgacaatgaaatgaagctgagtaacatgaagacaatagaattcaattgaacattaatgatctgcaacatgacagatgttgaacacagacttttccatggagccactcagctctattactctgattcttaacagtcttggtcaggaatagcactcctatgacaggaaagactgtgtttagtcatcaaaatgtcgaatacaattctcggagttttcatggaaatcagcctgactaatgctattatttctcatgttcatttatctcatccttcccccaaggagcctcctctatgctactcttaggaacttttcccttaaaaaacactgttttggacactactgaccaaaacgttaatgagatgtatgattttgcaggccatgtattcagggttggtgatataattgcctgtgcaccaagagaattgtaaacacaatttgaagagaaaaaggaagtctggcagcatgcacacagctcagctatgctggaatataaactaacagatacgtgacgtgaaattgatccaataacagcattgctgcaacaaagggcagtaggaagtatacagtcatttatttctcaaatgtattttgaaggacaatttattagtactacaaagatgcttctggggaaaaaattctgctgtcagtaaatttgggaaacacatttgccataacctacttagagagt

SEQ ID NO: 61463 - DNA, 1467 bp, Bovine  19866881134243
  misc_feature (1)..(1): n is a, c, g, or t
naaccaaaaatttaaagtactaaacaagtccatctgcacgcaaaattttcaagaaggaagtaatactcaattcttccaggaacacagatgttaaaagaaagtgaccaatataaagccagaaggaacttttttgcaaacccaatctctaaagtggctatatttaatattttaagaactgcatattcttatatgtatatttttatatatttaaaatatataacaaatttaaatgagatctcctaaaatatccactattatagaaattccagacatttaaacttctgtatataaaccattcagtaaatgatatttaatgaaatatttatttaaataaaaacttctaaagtacaggttcctctaccaaggagttgagagattttgtctttgtgtagacaaaacatttttcttacttggctatctctacaggaaatcttccagaggggtagctgagccatttttgaattaaagcttcattcacagtccagatctgcttcgaaggatcaggatatctaaagtcatctggtggcccacagttctaaagtttaaaataagtagatgagtttgagggaagaggattatatacaaagcattctgcatctggaagttaatctctactaaacacctgaaaacaaaactggaaaaacaaactgaaaacaaaaacctgtcaaatagatccgaaaatatttgtagacttgaagaacaaaattaaggccatactttgtaacatataaagaatactaatatgaaattatctgatcttattaattattcatatgatttctattacctggggattagaataatgtgaaaagctttgatctccacctgagaaaattcttttcacgcagaaatattcttcagaatctgtaattaaaataaaatatttaaaaattcaagatttatatatatatattttttatagcatcaaatatgctactggactttctcttaatctctaacttaatgagacctcccaatcctgggctcaatgacacaaaatgactcagaatgttgaccaaccaagttaatggaacattaaatgatcccacaagcacttccagcatttgctaagctttttggttgcttttttacgtttctaagttttgttttggtttgttttttcaattggaggataaattgctttataatgttttattggtttttgttgtacagtcttctttttgatctgcatgtcaaacaacgacattttttaatctagatctttattatctcaatatattttaaactgatgatggtgtaaaaactgaatcaaaggtataaaagatagctcagaagaaaataaaaagtaagaatattcattttggggaattccctggtgtggtcaggactcagcattctcattgctgtggcccagagttcaatccctggttgggtaactaagatcctgcaagctgtgtgggacgtggccaaaaaaaaaaaaaggaacattcattttaaaaagaatga

SEQ ID NO: 61464 - DNA, 730 bp, Bovine  19866881202805
  misc_feature (1)..(1): n is a, c, g, or t
nacctttctgttcctctagggatatctgaccggttatagcatatgtggtaattttttcaatttgaataatttatgacttccctggtggctcagacagtaaagcatctgcctgcaatgtgggagactggtgttcaattcctgggttgagaagatcccctggagaaggaaatggcaatccactccagcactcttgcctggaaaatcccatggacagaggatcctgataggctatagtccatggggtcgcaaagaatttgaataatttatacaattgaataacttttaaaaatcacttttaagtattgaatatttgtatattaaaaaatcagcttaatcattaaaaaacaattgataaacctggaaactagcactgttttctgcattttaaagaaaaatgtttatgtatttcaaccttcaaatatttattgtcaaataatgttgaaatattttaatttttattagtaggggaacattttctactcacttgtatgttaaatcttctagcaaattagcgaatatgcctctacagtacagccattttctttatgcttactctcagcatttatggcacaattctcagaggattgaaaagtgagttctttctctatttcttgcaatttcaaggctattgtgtttgaagtggccattatttacatattaacaaaaaaacatcatgtttatggttttacaacaccaagtatgctaacctaatataattagacagaaaaaa

SEQ ID NO: 61465 - DNA, 1523 bp, Bovine  19866881580729
  misc_feature (1)..(1): n is a, c, g, or t
nattgggaacactaatcttttaagcaacaacaagcaaagaaatagctttttacccaaagtcactcattttttttttctgatgtcataccctgcagccccactcttcaagttctactaaacaattagcagttttctcaggacctgaggatgctaaataagatagaaaattggaattaccgattcatttcgtccttgttagggtccccttctgagtctgaagaagaaacccctggaaaaataaaaacaagtcatgtaattgtaaagataatttcttaaaccagcttctaggcatttgaagatttatggaagtttagacctagaaataaactcagtgattccctgaactaacacccattttacagataagaaactataccctaagtagttgaagtgcttgctcaggtcacatgcctagttagtgacagaattcaaattaactggtccagggatttccctggcaatctagtggttaagatgctgtgattccattgcagttaggcaccagttcaatccctggtcagggaactaagatcccacatgccatgaggtgtggccaaaaaataaaagaaaaacaaattaactggcccaaattctgtgggttcttttatataaaacacctgctgacacctttagcttaacagagcagtgtttgcagacattctgtattgtccataaatcctcttgctcttggcctacacagattaaataaaagaagggattacattagattccaaacattgtaggtgtaggtggatgcccttccgtccagtactaatattaacaagtcactcttcatcttgggagatgggagtatttgaagctctgctgccaaaaatttttaaaaatcagcaatcgaatctcagcactgctagcagagctttgatccctgatttgtttcttaatatagtgaattctaggaagatatcacaaaactaaatctggaggtatttatgtactccaaaaatttgaggatgaaaaaatataacatctatttatgtattattcatttttagtatcattattcatatatctattcaataagtgaagtgaggtgaagtgaagtcgctcagtcgtgtctgactctttgtgaccccatggactgtagcctaccaggctccatccatgagattttccaggcaagaatactggaatgggttgccatttccttctccaatctattcaataaaagtttattaaataaccactatgtacctggtactacataagatattagagatataaagaagaatgagacagttctaaccttaatatcataagaatacaatatttaagtgctaaaagcaaggcatgcataaggtataatagatgataaaagtactgaagagtggctcccaggaaaaacacagaagatgagaggaaacaggatcaaaaacttaggttgatatataaggtacataaattgattcctccctaaaattagtcatataagtttggtactgatattaatgcctttccaaggctccgagatggtcttcctgcttctatgtttgactccttttggt

SEQ ID NO: 61466 - DNA, 1315 bp, Bovine  19866882018878
  misc_feature (1)..(1): n is a, c, g, or t
naatgcaggggacatgggctcaatccctggtcggggaactaagatcccccatgccacagaacaactaagcccgagtgcctcaactagagagtctgtgtgctgcaaaccaaagagcccacatgctctggagcctgcgtaccacaaataaagggaagcccatgtgtcacagtgaagagcctgggtactgtaactaagactcgactcagccaaaaataaatattttaaaatatcccaggatttaaagaattatttaaaagaaaaaaaaaaaaagaactaccttggctctttaatgtatcctgctgtctactctctaaacctttatacttattgctttttctgcctggaacattcctgaggcctgcttacctccctgccctgcttttgattggctgggtcgtgctcccaagtcaggtctcagcttggccatcacttcctctgggattcatgtgtgctccagctacccagagccccctatacatatgtcaggtggccgactgtatattatattgttagcttgttaactgtttgcttattagttatactggaggctctgtgaagctggtcttgcttatctcattcaaaatggtatgccttgcacccaaaatagtatgaacagcacctgccatggaggacagctactttgtgcacaaactttcttgaatgagtggaagaatgaattcatgaacatttctgtaggagacatatattagttacccttctagaattaatattaagataggtatcctagcataaaactgtaaaaatttgataaacacttaaaaaaatcaccactacagattattctttaactgggttctctcccagtgaagcatggcgttgagttgtttttctgtcacggcaaatgatttccattaaggatacatgatgaatcattgtgcagtcattgccattctagttgccatagtgatgggagttttcatgtacgggtgtctgaaggtttcttgttcagagaaacactggactgtgtaaatactgtttaaaatgaaaagatacacagacattaatatcttcctttgtcaggcttgcaatagatagatgattcaacctttggatagaaattgttttcaaacatgttcaagcatctgtttacttaatttggatgaacatgacttcctgaaaatttaagttgttctttacatacttgcagaagggttaaggttactgataaaaatactttaaaatgtgaaacaaaaattcaccctgatgctggttttagcttgactgaaatccagaatatattggacagattttgaaacacatttcattaaggtaaaaagctaagcctgtagagcaa

SEQ ID NO: 61467 - DNA, 777 bp, Bovine  19866880803308
  misc_feature (1)..(1): n is a, c, g, or t
ncgattgctttttgttcaaggttagtcttctgtttcctctgggtgctgtttgttccaatgcaaaagtggagggcagaaaataaccaagtctgtttttatctgtaagtgtattattccctggaaatataattattttgttcatttaaaattgcttttgatcaaacaggttggtataaaccagatttttttggttgcctgcagatggcagtgattattaacttgtcattctaaataaaaggtgttggttttacttagcagttctaaagtgctatattaatggcagtttattgtgttctaataaaaattagtaagatttacatgctgcctttgaagaagagagttgatttatatatttaacgtgatgtcatttaaaatattaggtgactagacacgaaacacaaagacattaaattaacatacttcactggattatgcaaaacattgaacagtgacaaaagcgtttcagagcaggatttgattattgtggccaaatccagtaatgtatcctggaaaatttgattccaaagatatgcaaaacatgataaactttgcactctgttttatctccagaacaagatatagcagtaacagttgattgtaccttgacgatattggcaagtcacattctggaatgcagacagcagtgctgtccaaatagaaggaattaccaaaaggcaatggaaaaaaatctgaacatataatcttcctcttacataatcttttggataatatatgcaattctaaggtcatgaggaggacacaaggagctgcagaagt

SEQ ID NO: 61468 - DNA, 945 bp, Bovine  19866882019056
  misc_feature (1)..(1): n is a, c, g, or t
nggaagctcaatcaagggagtgagtatccataaaatatttataccatgtatgatagcactcttgagtaaaacaagttatgtggctatgagaaatagtaactccttattttatggaatgtcaatttcaactgtaaaaacaactgacaaacactagttttttaggcttggttatttctaagacaggttcttgaaaatgaatgaagtgttctttgtaacacgaaggaaatgaactgaaaatacatgttgtaaatggtaaaatttgagctttaagttttcggagaacttgtatctaccatcttgacagcttccaaatacttaacaaattttctcaaaaagattagtgatgacattaacaaatatacatttttatattttatagtgaaatatgtcagccctaaataaactaaggttttccaatctcagcactgtagacttttggagctctataatcctttgctgtgcactgtaaaatgtttcacggtatctctagcttctatccagtagatgtcagtagcagccccaaagtttgacaaccgaatctctaaacattgccaaatatttcctggaggataaaatcatacccagctaggatctactgagttaggtaactcagtaaatagttattttccaaatggccaatgtgtgacattacaaagtcatacatgagttcaagatccattgggggaataagacagacaaatagattttggtggctcagaccgtaaagaatctgcctgcgattaatcagacctgggtttgatccctgggttgaaatgatcccctggagaagggaatggcctttggtagagtatcaaagaaaaatagtcacaattatgtgagaagacttattaaaggattcttttttccaactaagtatctatatgaagccagattttctttagaaacatcaaccaaaacaacatatttcagaagattcaatgtaga

SEQ ID NO: 61469 - DNA, 1306 bp, Bovine  19866880196511
  misc_feature (1)..(1): n is a, c, g, or t
nctaattttattaaagagatgtctagtctttctcattctgttgttttcctctatctctttgcactgatggctgaggaaggctttcttatctccccttgctattctttggaactctgcattcagatgcttatatctttccttttctcctttgctttttgcttctcttcttttcacagctatttgtaaggcctccccagacagccattttgcttttttgcatttcttttccatgaggatggtcttgatccctgtctcctatacaatgtcacgaacctcagtccatagttcatcaggcactctatctatcagatctagtcccttaaatctatttctcacttccactgtataatcataagggatttgatttaggtcatacctgaatgatctagtggttttccctactttcttcaatttaaatctgaatttggcaataaggagttcatgatcttagccacagtcagctcctggtcttgtttttgttgactgtatagagcttctccatctttgggcatgtaagaagtcagaattgaagtagtcacatgttaaaaattttaagtttagaatttgtgtttatattatacgtttatatcttacatgtttgggcttctctttcagagacatgggaacaacacaagtgtcacttacaacaattgaaagcattctcatgatgacccttgaattggaaaaactgtaagttgatttttattatatttattttcactctattgtgtatttttaggtttattttattattttttaaagtttattgatgtatcattttcatttaataaaatccacggtttaaaaatatagtttgatgtgttttgacagacttatagttctgtagccaccattacatttgagatatagaaaacttctggcacccccctcaaagacccctcatgtccctttgtagtcagtctcctcctcccactaccagcccctggcaaccaccaatctgatttttgtctttataattttgccttttccgtagtatcttgtacatgcagtcatgtggtatgtggcctttttgtttttgactcctttcactcagccagtctccttggagatttattgatgcagttgcacctattggtagttcatccctcagcaataatgctgagtggtattctcgttgtgtgggtatatagtttgtttatgcatttatcagttgatgaacatcagctgagttgttttgttttttggctattatgaacaaaacctctaaaaatattcacatgcatgtgtgagcatatgttttgtgcaaatgtatattttcatttctttgggataaaatacctaaggg

SEQ ID NO: 61470 - DNA, 1264 bp, Bovine  19866881036729
  misc_feature (1)..(1): n is a, c, g, or t
naccagtttttgaaagcatcaactcttcggcattcagccttctttcaggtcaactctccacacctgtacatgactactggaaaaactatagctttgactattaggatccttttatactcttacaaattattgcaggcccaaagacctttgtgtgtgtgtgttgtatcaatatttaccatattagaaattagaactaatattaaaaaattatgatttaatttacaaataataggcctgctattttggaattttttatgaaaaaatatttcctaagacaaatttaatgagtggcattatttgtacatttttgccaatgtctttaatgtttggcttaggagacaactggattcttatatacaaattatgtattcatcttcatattattatagatgaaacacattattcataaattcttatttctgaattaaaatacctgagaaaaattcagtctcatacagacctgtagttggagaagggactatattaatacctttttgcttgaaagcctagattcattttgttgcaacaattactgatttgttttccttgaagtgataagttcattttattttcaaggaaatgacagtcacacaccaatgtctgtagaaccatgggttatctgagcctctcaagtaaaaatgatgttctgtgaaaaaagtggtttgttaaacaatcacacgagtgattctccaagagaaaaccactgtatttctgtgtgcagtgaaagtactttatgcatatttcctatataatcacccagatttttgaagagatgtattcgtgggtcaaaatttaatgaaatccacttttactgcctcatcaagggcactctgaaccataactggctttttttccctttttttcttcttctgtgagtttatgacaatgaagaatacaatgactcctgggacagtttggtaccactgccttgattcatgctaaggcaccagctgtttcacccgtcattgcttttgtatcatcagtgcaaatgtcaaagagtgggtaaaagcaacatcttagtgatattataaaatagctttaaccttgcagattcttgaatgagtcctgggaagcacacttaaagtactgctgtcttaataatgagagaggacctgtttaataagaaccttttcatgtctagaaggaagcatagctgaagaacattcagaataaaggttaagtgtgtcctttgaaagtaaagaggaattatgaaagaaaaagaagatatctgtaatttccaaacaagcacagctggaaagggaat

SEQ ID NO: 61471 - DNA, 1133 bp, Bovine  19866881144219
  misc_feature (1)..(1): n is a, c, g, or t
ntacaatttaacattctcaagtcttcattgatacagattagaagtattaattcttccctcttaactttttgtatgttttcttcttggtgaaaattcttatttataggcatacctccattaatgccaggtgttcctcctctgatgccaggaatgccaccagttatgccaggaatgccacctgggtaagaaaactcttttaattgacttgtgagctggtgcctagtagtgatctttctcagcttgggtgtttacatcaattaaatgttattttgtggggtttttttgtgttttttgcttctaaaaggtatgggctctattaattattaaacttatctaataaagaaatctactaataaatttaaggaatataaatttgcctctggagagaatagatttttgggttttaggataaatgtaggcagccatctgcttcaattgcatctgatgtaattaaagtagctggttgtagatttgagtttttgagattcagaactgtccatgacactttgtagttgtgacagaagcaaattctgtaaatgatttgtcaaatcttcaagaactaaaatgaatttgaggtgcccgtgctcatcacttgacttaaaaatattgttggatgtgaaaggtatacaatacactttcccactgtattttgaaaatcacagttagattttgattttgtcatacattttcacagattgcatcatcagagaaaatacacccagtcattttgcggtgaaaacatgtaagcatctcattcataatgtaattcaggaggtataatcataatgtcatttttttgtgtgtttaatggtatctattcagttgacttcaaaacttttctaaccttcctcactaaaacttctaaaatttgcaaactgacacagatctcttaaaggagggaactaaaaaacatctgaggaaatagtaatagacccacataaatccttttctaactgtgcagctgttttccccaaactgctaaaagttatgagacttagtagaaggggttgatatttaagaaagagtatattcttaggtgaaattacatgctctattatgggaaagtaattgaattttctttaataaaacctgattttagaagttattctggtttgagtcctaaatcaaaaatt

SEQ ID NO: 61472 - DNA, 1209 bp, Bovine  19866881427224
  misc_feature (1)..(1): n is a, c, g, or t
ncaaagctgttttatatatagaggtaggcagttaatgcatttgcaataaacagagtgacagtatgagcttcaaaaaaactttaattctatattaataaatctaattaaccagttttttcttccacctaaacctaaggtgttctgcactatggtatttcaaaactgatacccttaaactgagaattatgacgcattacttcaattttctcagtaacaatatttgccaaaagtttaataacatctctcaaaaaaaagagatcacccccaacctcaaaaacataaggtaatatgccttaaaaagcacttaaaaagtgccttttaactacaaataggaaagagttgaaaaaagaaaacatctaatggatcattttaaggtgaacaataaagaacatacatcctgatcttttgaattctgaatgaattaaacacacctgcctaattcacaatgaaactgggttaccaaccattacatacatactacatataaaataatcttttgcttctgagttctggtgaggggtaaaaaaagacgaataggaaataccagtataactaggtcaaaatccattaaatgatgcccttcctacaacagtgcaacattgtttaacaattctagattaaagtaagaatcccaaaataatttgctataggattttacatttttgtctttggtttcattctacccagagatcattatgtaaaagaggaacatttttatttaagctctcagaaattaaatttccatttctaataaagtgaagagtaaccagcattaattactatgaaaaaacaacatacaacactattctctggtttcagttaatcttttttgagtagaggaaatcaatgtgtgcaaacatgggagagaataggccactctttagtatagttaataaattatattaaaaagattaggaaatacttaaataacctatgacaaactgaaggatttcagtaaactgcactttacctttaaatattaatgcactcctttttcaagagtttcaccttacctgtcccgcactggggaaaagaggcttagtaactggaggctgcggagccggaactgttgctgttggtgcaggtggtctgttaagaatacctggagctgaaacagcctgtgcttgagtcattggaggaattccaggacgtggaacagggagggggcatactgcagagaattaaaaaaacttgtagccaattaaatta

SEQ ID NO: 61473 - DNA, 1593 bp, Bovine  19866882076389
  misc_feature (1)..(1): n is a, c, g, or t
ncagggaagaccctcacttagctttttgtgaggaaggacatgctgatcattgaggaataatggggaagagggaggcgaagggcagagagctgaatgtggcaggatttctgtctttgggacagcgtccctccattccatttggtccactgaagcttccatagacattgctgtccgtgccagtgttcaggagccccatcagatttcatgcatgggtccccctatttcagaggagttcaagatgtgcccttgagctgggcctgggccagggagcaaaggcagggggaggtgggtgggaggaaaaccaaagccggggcatccccacttgcctcctcccccaagactgatgttttccagggagaattccgggctcctttctgcttctgggtaaatggaagggagctttgaaagcactgcaggagtggccctcaaaggagccctgtggcgaagtcttttgtaaagtgaacagtccttttgtaaggtgaataattgtgctctgattatctgctttggaggttcagagtgttcagagattctcaggggaaagagggatttgtctgaaggccatctggcccaccccgcttccaatgcttgattctctcaagcacccgctctgagtgatgcgaagcccccatgtggacccctctgtgatgggaaactcaccatcccatggatcattccatctttggacagctcagctgattagaaatggaagcgtatcctgagcttaaaaagaaaagtctgtctctgaagttttatccattgtctctgcttacaggttacactaaatataccttttgcttatgttgactcacttgatagctgaccacagtgaacttgacctcccccagatcttctcttcatttgtttctcgaatgcaggattttgagttctcctatcgtcctgatggttctgttttgacttggcttgctttgctggcctgcatcgctttgtaaccatgagacctagcagctggggcaacattcagattatctatctgtgtcgtggagacagggactcgtgtctcccaggatctagattctcttcctatgttggtgcagctccagagcttttatgacagtaccaacccctaaaatctccaggctgtgctggtgcgatctgggactgcgccacaatcacttcattcaggatttaatagagatgatttctttttaaactccatctttatttttattgtactccaactcttttagcctttcctttgtttacaaattttctttttttaatttttaaaactatttatttttacatttatttgactgtgccaggtcttagttgaagcatacaggatctttaattgtggcatgcagactcttagttgtaccatgcgggatctagttccctgagcagggggtgaacgctggccccctgcattgagagcatggagtcttaaccactgggccaccaggaaaaccccactaattttatttttaaatttatttttggcctcactctacagcttgtgggatcttagtttcccgatcagggaacaaacccaagcccttggctggtgaaagtgcggaatcctaaccactgaaccaccagggaattcccagagatgacttttttaaatgt

SEQ ID NO: 61474 - DNA, 6424 bp, Bovine  19866880480839
  misc_feature (1)..(1): n is a, c, g, or t
ntttcacaggcacctattgtgaggtggaccatggatgagtgtcagagcagcccgtgtgttaacggtggggtctgcaaggacagagtcaatggcttcagctgcacgtgcccctcgggtgaggactctgggctagggagcctgagaaagaccttttggggcaaagactccaggatgggagcgtataacatcgtgttagtggcttcctatatagcagataccaccttatgaaaaacactgaagttaattttaaaagtaaatgggctttccacccaaaccaggcagcacgggtgaggggtgactgctcttgaccctacttgggtctctgtttatctcacactccccgctccaggcttcagtggcgccatgtgccagctggatgtggatgagtgcgccagcacaccctgccggaatggagccaagtgcgtggaccagccagatggctacgagtgccgctgcgcagagggtgagggcgggccagtgacaagactgcaggaatctggaggcagggctagtgggggaaaagggccaataatgcgcttgggggaacgttgcgggcagagctgccacaaggcaggcccggagcaggaccaatgaaagagccaggaggaggagccaatcctggacataagcagaggtaaggctatgcggtgggcccaaaggatctggcaggatagatgcgcactggattggagggaccccgtctgaccccctccacccccaggaacctcccgtactgtcctgctctgtcacttcagttgtgtccactctttgcaagccaatggactgtagcccacaaggctcctctgtccatgggattctacaggcaagaatactggaatgggttgtcatgctctcctccaggggaccttccccacccagggatcgaactcatctctcctgcattgcaggcggattctttacccactgaaccacctgggaagcccaggaacctcccatgtgtccgcatctccagtggagggagaggcaaatcagggctgacggtgtaaggattggaagcacggtctcgctagggttgtgatttaacttgtagggtcctggccagggacaagtctcggaggtggccgctggatggcctctggaggccagccaggggcggagcctgaaatgagcccgcctcctattggctcaatgggccaggcctgagggagaactgagttaagattgggcagaggccatggctgtgggcaggaccttggccattgggtggagcctgaccctctgtcccccgcaggcttcgagggcacagtgtgtgagcgcaacgtggatgactgctcgcctgacccttgccaccacgggcgctgtgtggacggcatcgccagtttctcgtgtgcctgtgccccgggctatacaggcatgcgctgtgagagccaggtggatgaatgccgaagccagccctgccgacatgggggcaaatgcctagacctggtggacaaatacctctgccgctgccctcctggcaccacaggtagggccaggagctgggctgggacaggaatagtacatctgatgggacacagagggttcaggaatggtgtttctggcaggtcacggtggtggcaatcccagtcatgttccccttccgcaggtgtgaactgcgaggtgaacactgatgattgtgccagcaacccctgcacctttggagtctgccgggacggcatcaaccgctatgactgtgtctgccagcctggattcacaggtgggcaagtggctgccatggaaacggggtctttatagcgtgagggtgaaatcatctatctttcctggccgggttttgcccctctctttgcacgtgcttgtccttagggattgtccatgctttgccctgagatttttgctttctctcattggcatgtatccccatgttggctcaagattattctggtatgtccatgaaggtattcagactcagagattgaggtgtttctgagtggggccaaggcaatccttggcggaaattaaagtgacttcatataagtttgggggcaagggtgatctggggcgaggtatctctgggttgcggaggtggctgtcctaatatgcacaagagctgatgtgttatgaagcaaatgagatgctccttgctcaagggtgtgactgtgctaaatggggcaaagttgcccttccctggttggctccgctatccttgtcccgggatgaggttgcctgcctgctccccagggcccctctgcaacgtggagatcaacgaatgtgcgtccaacccctgcggcgagggagcctcctgcgtggatggtgaaaatggcttccgatgcctctgcccacctggctccctgcccccactctgccttcccccaagccatccttgtgcccaggaaccctgcagtcatggcgtctgccacgatgcgcctggaggggtgaggtctctccccagatccctgacccccacagcttccctaccctcctgccagccctgactgcctccctcaccaggttccgctgtgtgtgtgagcctggctggagtggccctcagtgcagtcagagcctcactcgagatgcctgtgaatcccatccctgccgggcaggcggcacctgcaccagtgatggaatgggcttccgctgcacctgtccccctggtgtccagggtgcgtgtctccaccttccctccccagggcctcttccttccttcttccttcttatttcctttctgcttcattctctcttccttctctgtgtttacccttttttttcttttcctttcccactcttacacaggagcttgggaggtgggtatcaaggtggggaccttgcggggagatgggaacaaggaatctctcaagactatctcactctgcctgcccactacaggccatcagtgtgagctgctgtccccctgcaccccgaatccctgtgagcatgggggctactgtgagtctgctcctggccagatggctgtctgctcctgcacccctggttggcaaggtacaccagttgcttcttctcttcctcacctcctctgcaacttgctctatactgggtgatgctggggacccagagaaggagtccccccaccaccggctctgccttaaaaaaatttttttttttagtaaattatttattatttatttggctgtactgggtcttagttgcagcatgtgggatctagtttcctgatcagggattgaacccaggcctccggcattggaagcacagagtcttagccactacaccagcagggaagtcccctggttctgccttttaagggagcttcctctgggaaggaacagagctagacacagacacttgcagcctgtgtagtcagttcaggagaagaggaagagatatgggctgtgttgttcattgtttagttgctaagtcatgtctgactcttttgaccccatggagggcagcatgccaggcttccctgtccttcaccatctcccggagtttgctcaaattcccgtcgactgagtcagtgatgccatacaacttcccatctcaccctctgttgtccccttctccgtctgccctcaatccttcccagcatcagggtcttttccagtgagttggctcttagcatcaggtggccaaagtgttggaggttcggcttcagcttcagtccttgcagtgaatattcagggttgatttcctttatgagtgactggttttggtttgataagggcttaagaatctagaattcaggctgagagtttggggagagcctggaggagcagacctcaatcacagaatcacattcttcatccactgaaataaggagaggggtgttctggaacagtatgtgcaaaacgcccagaggcaaattgttcttgccttcatccatctcagtcttaagagtcctcctgagcaccaggtactcccggaccctaccctgcatctgctaatcctggatgttatttccctccccacccccaggctcacgatgtcagcaggatgtggatgagtgtgccagcccctcaccctgtggtccccatggtacctgcaccaacctggcagggagtttcagctgtacctgccacgagggctacagtggcccttcctgtgatcaggacatcgatgactgtgaccccagtgagttcaagggagctcttggggggaggattttgacctagggaacatgtttatcaagttgctacagtatgcctagcactgtgctttcatttcatcttcacagttgtcttactttccgcatttgttcatgaaaactgaggccccacagaggttaagtgacttgcccaaggtaatgcagtgagtagagagatgagctaggttaggagcacaggtctgtttgactctgaaggctgtaaactgcctctggcagcaagcaagttaaaattgtatgtaaactatgagataataggccccttagtgagtcaccaggagcactgttcaataggcaaataatgcaagtcacatatgaattaaaattttttagttgatttttaaaaaatctttttttgtttatttttgaattaatttttaaaaaatttatttcattgcactgcatcttagttgcagcatgggggatcttgttcccttaccagggatcaaacctaggccccctgcactgggagcaggtagtctcaacctctggaccaccagggaagtccttgaattaattattttctaatagctgtattaaaaagcaaacaaaatgataacaggtgatattaaatttaataatatattttatttaacctaatacataaaaatattatcatttcagcatgtaatcaatataaaatgattgaggtattttacattatttttttcttttttcatatggaatcttcacgatctgctctctggtgtctgttttatgctgacagtacatctcaaattggaccaaccacatgtcaagtgctcaagagccacatgtggtcagtggccaccctactggctagcccaggcctggaggagacctcctgtgctgagctcaggaattaagcagatacaactagtacttggggtttcccaggtggtgctagtggtaaagaacccacctgcccatgcaggagacataagagatgagggttcgatccctgggtgggggtgatcctctgaaggagggcatgacaacccactcaagtattcttgcccagagaatcccatggacagaggagcctggtgggctatagtccatagagtcaaacagatttggatatgtctgaagcgacatagcacgcacgcaggcaactagcacttgggagctcaaagggaccttttgggaacttctcaaacctttcctcccttacatatagatgaggtttccatcagataagggagggaatgaggccacagagagaacagggtttggttcccctggctaagtgtgcccctcccaatgaagcttggctttctccccatttccctctatgcaaggcatggccaggtcagggggtgaggtgcgtgaccagacctcctcccttctgaccgtagacccctgcctgaatggtggctcatgtcaggatggggtgggctccttttcctgctcctgcctccctggctttgctggtcctcgctgtgcccgagacgtggacgagtgtctgagcagcccctgcggctcaggcacctgcacagaccacgtggcctccttcacctgcacctgcccaccgggttatggcggcttccactgcgagcaggacctccccgactgcagtcccaggtgggtggggcctctcctgggagtcaaggaccctggcatcggatggggcgtgggacccgaggagccggggacaaggagtcctctgctagacacccacttcaggactctgatgcccgatgggaacgtgtccgggaaggggtaggacatctgttgggaggtcaccttaggtaccctggtccctgtgggagcaaggccaggccacggggacgggggcctccacgtggcttccacatagccctgaagcatctggtatactggggttaagggacatgacagggcagggcctttgggggacctcagcttctccttggggtaggggtcttgtcacttccgctaggaggggcccaggagggggggcagggcctctgaagggtggggccagacgcgcccctcctttccctccagctcctgctttaatggagggacctgcgtggatggtgtgaactcattcacctgcctgtgccgcccgggctacactggcacacactgccaacatgaagcggacccttgcctctcgcggccctgcatgcacgggggcgtctgcactgccgcccaccctggcttccactgcgcctgcccagacggcttcaccggcgctcagtgccaggtgggcggggtcactggagccttggggaggagtctagagggatgttctgggggaggggccttttgggtaccctggttggttgagaaggcagcctggatcctggggaggagttggcagagggattgtggtgaggggccggcagggatcctagggagaaa

SEQ ID NO: 61475 - DNA, 3322 bp, Bovine  19866880527707
  misc_feature (1)..(1): n is a, c, g, or t
ntgtctgcggccttaacattctgccaatccggagtcagttcacatcagggaggtgtgggcctcggtcacccccagtacacagccgggggtttcctgtgtggccttatcagcagttaccagtggacataaataatgccctggctttgagtttgcacttgaaaaatgctgatgggtttcagttacaaggaaacattttggcccacaacctgctcttttttttttttgagtacttgggcccccatggaccagacgtggtttattcagtgtgtgagacaggaagctgcaatactttggccacctgatgcaaaagagccaattcactggaaaagaccctgatgctgggaaagactgaaggcaaaaggaggaggaggcagaagaggatgaggtggttagatagcatcaccgacttaatggacacgaatttgagcagactctgggagatagtggatggatggaggagcctggcgtgctgcagtccatgaagtcacgaagagacggacacgacgtagtgactgaacaacaagtgagcaggggaaaggacacagttgagctcacaaataggcccaaggactccccagggctgtcagagcctgtcttagctctgactccttccaacccctccctgtcctcagggaagactgcagggtcactgggcctcacggcttaggcccagggcaggcaaggatgaaactccaagccagctaggcacagtccaggggtgggaagagagccaagagcactgacccacgaggccctacatggcaatggagccgtcccggaagtccatcctcccgacgaggatgctgaccacagccggggggccgtcttggcaccgctgctggtcgtcacgcaccctgacctcctgatcctcactctcgcatgagagcagcaagccctgggtccccagtccctgggctgccttgtgataatcagtgtaagccaggccacaggccacattgctgcccagagagggcacgtgctccctggaaatctgggttcagccagcatcatttcctatcaaggccatcactgggatcttgtgtctgacgaaggtgtcaaattcgaagagactatagccaaacgctccatccccaaacaggcaccagacctcagcatccagccgacacagtttggccccaagtgcaaatccggcgccaacccccagagtcccgaaggccccaggatcaagccaacacaagggcccacggggctgcaccaggtaggcagctgtgcccacaaagttcccgccatcgacccaggatggggttgtcaggcagagtgtcctccaccagctgcaggacccgcaccgggttaagatgctgggctacgggcatcagtgccttctcccgaaaggtctgctccttctgttggtcagcttgccgaagctcctctgcccagtctgaggcccacatctgaccccggaggccctccaccagcttcaccacaaggagcccacatctccctgcacagcctcttggggcttccagaaaatgtctgagttgatcaggacaacaatgattttgctgctgcagctgaggacacacccataggacaggcggaagtgacacactgctcctgccaggacaaccacgtctgccttcttcagggcggccctgcggttctgctggaagtggaggggggtggttgcggcccagcagtccccgtgccatccccgccaggaagcaagggatgcccaggttctccacggcaacccaaagcttgcctgcggatgttggaggcagcagggcctggctcctaattagcatgaggggccttttggcccaactctagatctccacacatcactgaacctgctggggggaggcctggggaatgtccaggggcagaggcccctcaggctcaagctcccaagctcctgcaaaggggttggccaggggatttgctaagtaccagtggaccgctggactcatgacgaccttgggcggcttacctggcaccatctccttctgaaccatgaagtaggggtacagcacgtccagaggcagttccataatcaccaggccaggggtgcctgactgtgcagcagccatcgcggccctcagggtggggatgatatcccgtactctccgcacagaagcacaaaacttgcagagtggcctgaacagggctatctgatcaactgcctggagtgcaccccgattctgcagcagggtgttggcagccccacccaggagcaggactggggactgggctatctgggcattcttcaccgcagtcactgcgttggtgaggccggggccggccgtcactgctgccacgcccatcgtcccagtcaggcgggccacagcatcagtggcaaacacagctgtgacttcgtggtgggtgtccaccacgcagatgtccggcttctcacaggccaccagcagtggcgaaatgtgcctgccgaccagcgtgaaaaggaagcgcacaccgtgggccttcagcacggctgccacattctccccaccatgccggatgcttgccgtgtccaccttgtgcatcaactgatagaagagccccaggcggtgagcggcgcccagcaaggcggccactagcgtcctgaaggccagcagcaggaaagaggagaagaagccccaagctggggcggcagccgccgtggtctccatgagctgacacctgcttctcaatgggtcggcgggaagccccgcctctctttgatatcaaggacccgaatcttcgtcctagtggtgagcccaccgcacgactacacccccacccccaagtcagcgtgcatgaccctctcctgaagctgaacccctccgctccagcgagcgcctggactccaatctgagtcccgactccaggccgtgagtcaaggtcagatcgtttcaggatgctcctcctaccccagtggcactttagccttcatccataggaaatggcgctggctccagaggaattcccaaggtgctcttatccctttcctgggaaccctggccgctaacgccgccgccagccatcggagggacagagcagtgggggatgggcagaagaggcactcctgcagaaggcaggcctgggccgcctgcctccaggacctttccccaccatttccatcctgtctgctgtccaaggggtctctgacatgacacccctcctggaccttcatgtgtgaaactgacttcgggggccgtcttctggatcaaggtgtcagatcctaatttgacaatgagggccccttttgtgggtggctggggaagcaatttttaagctgagttcctctgggcccatggtgcctgccggacgatggaggggcaagtggatcacctgtggtcacagccagtcagccaggctcagcctc

SEQ ID NO: 61476 - DNA, 1368 bp, Bovine  19866880528769
  misc_feature (1)..(1): n is a, c, g, or t
ncatattgttcttaattaattaagcatatgcttaatgcttatgctagaagctgggtttggggtgaaggataagcctgggagaggcctgggagggcagacaatccagagaagaagtcacaggaatggagagctaaactgtgactcataaggagaggggacttttgggagtggcaaagatcagagatgtttggaagggggacttggagcagagggcagcgtatgtcaggcagagggtactgcaggggcaaagacttaatgctaggaccctcttagaatcatgaaaagagtcagcagattttaaaaacaatatgtggatatttccaacttattttcaaatggttcagaaaaaataaagttacaatagttgaatctaggtggtgggtatatgaataaacttttctgtatgcttaaattttaaataaatgattgggggagaatagctactaaatatgggtgtgcatgctaagttgcttatgaactgcagccctgccaggctcctctgtccatgagattctccaggagagaatactggagtgggttgccatgccctcctccaggggatcttcccaacctagggattgaacctgcatctcttatgtctcctgcattggcaggcagattctttaccactagcgccacttgggaagcccactaaatacactgctggttaataaaaataaacaaaaaaacccaaaacactacaatgttcagggatgtgggacctttgggcagagctgggggatggtcttcccttgacttctacttactctttcccaggacttttgtgtcatctggacgatgcttgtgtcagcaacccctgtcacgaggatgctatctgtgacactaacccagtgaatggccgggccatctgcacctgtccaccgggtttcacaggtggagcttgcgaccaggacgtggacgagtgttccattggtgagggggcgcagtctgagggtagggaaggaggggagaggctgctcctcggccacccacacccacactgactgttactccaccttgcaggtgccaatccttgtgagcacctgggccggtgtgtgaacacacagggctcattcctgtgccagtgcggccgtggctacaccggtccgcgctgtgagaccgacgtaaatgaatgcctctccggaccctgccgcaaccaggccacgtgtctggaccgcataggccagtttacctgcatctgcatggcaggtgtgtggtgggcgtggctggggcggggcctgaggctgggaggcagggcgagaaaagccttcaggcagaggggcccagagcagatagaactggaagggtgagagactaaagcctgggatgaggtggaggcggagccagagcagagtctgggggcatggt

SEQ ID NO: 61477 - DNA, 1683 bp, Bovine  19866880669422
  misc_feature (1)..(1): n is a, c, g, or t
ncatcaacctgtcaggcacattagtctgagtcaccttcagcccaagttcagccttcagatgtctaaggtcccaactaacatccaaaatgtaaccttatgagaaatcccaagccagagccatccagcgtaaaccacctgtgcattcctaacacagagaaaatatatgacatgatgaatgttcctataaaaagactggtagcatttcagacctttgtttaaagatctgattctggattttttgtcctgtttttccactgctcctatcttcctccccttggtggtagagacagaaccttctttttcaagtatacataataaaattagattaaaaaattagataagttatcaaaaagatacattttaaatcaccttctacccttactaataatgctaacatttgctttaaggcctccagaaattcctcttaaaggcaacgagttgtctaaaatgtgacataaaatgcctgacattcattcattcattcatttatttatgacagcacttcctgacatgtggggtcttagttcccccaccaggaactgaaccagtggccctgcagtggaatcttaaccattggattgccagggaagtcctcacatgcctctgactttagtggtctgcttcttaaaagggaaagtcacacgttataaagcaactgtggttttcagttggtcaagatcaggggaaaactaatcataacctcattagcttggctacctcactgccaactcaaacacagaattacagcctacaagatatggagctgaaattcaaacttgaccatctgtgacctctatacatcagcttccttgtctatgaaattaaatggatcattattaagctatccaccagcacccaaccagtcttcccctggtttcttcagcagtcctgtccctaagaaccacaaaactgtcttccagttcttgataagatctggtgaataggatcagttttcaatttcagttatgttagtatcaacccgactgacttccctggtgaaccagaaaaggtacacaaaggctagggcagggttgctcaaccttggcactattgatgtttgaagccagaaaattctttagggtggggccaccctttgcactatagcatgttttagcagcattcctggtctctacccactagatgcacatgtagcaacttccaccccaagaagtgacaaccgaataccacgctacaaactttgtcaatgtcccctggagggcaaacttgcccttggttgagaaccactgggctaagggatggttgcttaaaaaaactggagttcttgccaagctcctgacctggaggagggacagctaacactaccttctcatctaaggccaacatacagctgtctatggagcagccccagaggctcagattccattctcagtcctaaacattccaagtagaatgcagcttacccagcaaccacacaagctcaagccctattaacaagggaagctcttggctgaaaagcctcatcagttattctgaaagcagtcccaggccagcctttgaattcattcagggatgatttgtaatcacccaggcatatcctatggctccctctctaatctcatcatcccctccctccccttagctcaagacccactgatcaccttgggctgatcctttaacacgccaggcagctcctgtcactaggtctttggagggcccccttgg

SEQ ID NO: 61478 - DNA, 1456 bp, Bovine  19866880773589
  misc_feature (1)..(1): n is a, c, g, or t
nctttttgttacattttgtcctcaatcttgagtgctttttactagttaacaccctgctctgccaatcttgggagcatcaggtctgctatgacttccccccaccatttatccatccactcacacatctgtccatcccatccaaccaaccagccattcatccatctgttcattcatttatccatccctccacggatccatccattcatcagtccatccaacacctgcccattcattcgttcatccactcatctatccatccatctacttctccatccaatcacccatatgtctatctatccagcaaatattttctgggtgtctattatgtgctgggcactgggaatacactgtataagacagacatgatccctgccataaggtagctctagtctatgatagaaactggagccagtgctgtgaggaaaaaggaattcaacactttgagaaagaaagcggaaggaagcttaacctagaattaagtcctgccttggccccttcccagctgtgtgaccttgagcatcccactctcctctctgagacagttttcctgtctgaaaaggacctagaaacaatagatgctttatagcaatggcactgtaaagtgggttttaggatccctgttgacccattggaaattgcctctccttcctctgggctcccacagctctgccagtctatacttatgttacaacttttgattcttattctagtgactgaacgagcagctccattttcagaactgatagcctgacttctttgtctctgtctccatcagggtcaccagtgtgggaatgggcacagagctggtgtcagggagaatttgttgagtaaacaaataaatgaacaaatgaaagaaagaatgatggatgtgtaactggatggacatttcttctgttctgcccaaactggactgagcatccattcgtacagggagagggaaaagagagaggagaaagtaggggactaaaggggagaggggagagagacagagagctgtagacagacaaacacacactcacatacatacacacagagagacagagagagacagacagacacgcatctacacatacagagagacagagacagacacacacacacatacatacacagagagacagagacagacacagacagacagacagacagacacagacatttaatatcacttactgactttggaagtaacttcccaaaatcaggctctctcaccacgctcctagctgccgacacgtcagggcactgaggaggggtcaggctgcacgtgctgaccttggagaaagggctgccagcctgggatcttctcaggtgtctcttgagaggcccgtctatgaactgggcaacacagctgtctgggcctttattgctggcaagctttctgttgctcaagaaaccttatgacaggagggacacacccttgacacaaactcggtgaggaaacagaaccaaacgccca

SEQ ID NO: 61479 - DNA, 989 bp, Bovine  19866880865176
  misc_feature (1)..(1): n is a, c, g, or t
naccctccctacccgctacctccagtaagctccctcggaggcctgcccccagcactcccccatatctcagatccagtctgctgagccttcaggacaactgtgagcacaccaaggatgggagatgggggtccctgcaccccagcccctctaggtagctggtcagaggcctacttacccacccacagacccctagaagggcttaccttgccagctggccacaccagttccatatgtaccttaaattagaagaaacaaaaacatacaagatgtcggtttacaaaacgaaggcatgtaagacctagttccacaccccaaccccagccccagcccagacactgaaggacggctgtcaccttactccaccatccacagggccagagccgggggtggctaggtcagtgctgcaaggaggcccccttggttgcccactgaggtcaggaaaggtgcggtccactagctgtaaaactcacttcctacagaaatgctcagctaagcataaccagggcatctctcctaagtaagctgtcctttagggcaacagaaaggacactacagtcttttcccaggaagcttgtccagcgtgggccagcagcgaagaggctgccaggccaggtccccaggcagagctgttctaaagtgccagttttcacccggcgccagatctaaggcaccgccaacagcatggagtgcactggtggagaatcatgtccccagctcaactgagcagggacattgtgtgcctgagcaacacagaaggcctcctgctgggaaactaggtgataggtggaaaagcgactcaaaagcgaccctgctgccagtggggcaagggccaagtcccaggctcagaaaacaaaggaaaccttcaaccaatcccctggaacaaatgctggcaaaaagcagaaaacctggcccaccagagagcacattctagttcttcaaacacactaagtaccatgatgaggactcctgagcagcgtccatggacgggc

SEQ ID NO: 61480 - DNA, 866 bp, Bovine  19866880906736
  misc_feature (1)..(1): n is a, c, g, or t
ncacccctgaagtgtgtctggctacacattttctgtgtgtctagagcctggtgcggtgtccctctctaggcatgtctgggtttttgcttttgtgactctgggtgtatctttgtgggtgtcactctgggtagatctcagggtgtctctggctctacctctgtctttcgttatttcttggacatgtgtgtctctgtgcatagtgtctctatgggtatgaatggcacacatgtgccagtgcctgagtgtgcatctctggctgtgtgtgtcttgggtgtatctgggtatttctcctgtgtacatttgtatgtatgtgcctgtacatttgtatgtatgtgtgtttctttgcactgagtgtatctgtagccctctgtgtctgggtgtttccatgtactgggtgtgtgtttttgctcactgagcatatctctgtgcatgggatgactgtgtgtgtccctttgccctgggattctctgtatcttcatggggagcatctgtgtccctctgggctgaggaggtccctgtctcgcccccactgcagtgtccagctggctacactggtgacaactgtgaggatgatgtagacgagtgtgcctcccagccctgccagcatgggggcatctgcattgacctcgtggcccactatctctgctcctgtcctccagggacactgggtaggccaggaccagggtttggggacaggtggggaggctgggtttctgagccctcctgatgttccccatcccccatccccctaggcgtgctctgcgagattaatgaggatgactgtggcccaggcccagccctggacctggggccccggtgcctgcacaatggtacctgcgtggatactggtgggggtttccgctgca

SEQ ID NO: 61481 - DNA, 4196 bp, Bovine  19866880919394
  misc_feature (1)..(1): n is a, c, g, or t
ntattcttgggagctgatgctcagactggcccagaggagaggctgagaagaagcctggtgactaggctcctctgaggtggagctgacttctgtgtctgggtgaatagggttgttggtgggcaggcaggtgtcttcatcggctgagtcggcagtctgcagaccgcccacgagcctgccttgggccggtccctccaggcaggctgcagtgtgcacctcacagtgggcagcaaggctcctggcgtattcttccgtatgcctaatcctgtctctggtactttactgtaactggagggaaatgacaagctccacttagttcacatagatagataatgtgatccggtggtgccgaggaggtatgaggattatttgcagtagttgaagagtggtgctgctctgaggtgtgtgggtcttgtggggcaggggtcccctggaccttgtcactgttcctttccccttgtaaggactctaggtttcccaggggaggggggaggggagccttctctaggacaccagtgctctggactacctcctttcagtgggcccaagtgatgtgaaatccattgaggatattctgtatttattgagctcctgttgtatgcagagactgctgtgggtagtttgctggtcatgtctgtatcctttaccctttttcctttcttcctaaccagctccctcttccagtgtgtttttaaaatctgctggccagtagggggagccacaccccgtgcttgctgaggcagagtggggccttgggtcagggcccagtgcactggccagggtgaatggctgtattcttgggcctaattagcattccaggtggctgctgacctctcactctcagttccagccaaacctcaggtttgcctttgcttctggggttttgtacctccctgtgttttctagcaggcttctcctactaggggttttgcagccttttcccctaaggatctgagcaaccagagaaaacccccagagattcaaattggcagaggaccctgagggctaaaacccgcgcgaccaggccccacccagcgtggcgccttacggcatcgtgaccatcacaccctggtgtcccagtcctgagttcggactgtggcctttgtccctgactcctgagcttctgagtgccctgcaccccgcctgatgccgcctcctgtggagtaaccatgacggcatttccagcagctctctgctgctgccgagattttttttttttccttcacatttttccctcctttaaagaaagtggaaagattgtgcaacaagtaatctgagagtcctgggaacagctgtcctggcgggaaagagggcaagatttacagtcttggagccgccagcctgcaggctcccaggctccagcagtccagccctggcggctccctcggctgcctcagctccttcttctccccaggcgccctccccaccttgagttttgcgaggccgttctttgtctttgtggttctgccttttcctttgccatctgtgtgctccggggaccgactgagagcttctgctctcgggagggaccaaccctgtaggtttgtgccctgcacctcaggtgttccaggctccaagtgggagcccgtgtcctggttccaggggatgggctgtctgccaccaccctcccgcacaggaaactgcttacttgctgggtggttcctcgtgtggggtccatggagctgggtagattgctgtgactaggtacaggtggttctgccttggcagggaggggtgtgggggcctggtggggggcactggggggatttctcttggtctctgggggcttaactgtttcgcccttcttgttcttgtgtttccatttggattagagccgaaattcctgaagggcctgtatttgtcagttctgccaacacagccccaggactcaaatcaccaaaagaaactgaccagaggcactaaattggggctagggcagtggtacgtggtctcatctctggccactgtccatagacaaggatgctgccaactgctcaggacaggggggctggctgttgggacagggctactgttcagggatgcagtgcatccacagactggggtcagaaggaggggggtctttgcgccccaggcaccatgtgctcctcctcccgtgagcagcaggcagcactgttggccagacccaccacatctttagaacccaactgttacctgagtcatagtcttccattgagctttgattgtgcttaaactctgaatttgcttgagaggtttagtattgggacaaagacagtggtacaagggccaccctcccactacccctgagccagcgtaaactttcaccccatcccattgctgattgatgtctggctcctccccagtgctacccacaggttttatgggcacacagggctggacaccacctcctgtccctctcaggagcatccctagcctaggctaggataggagttcagagcattctcctggacttggttttggtcttctagttgcagagagagcatgcaccagctattttagtctcctggtttccttttcccaggattggagcatgtgggtgtttcttaatagctccagggggaaaaggaatgctttatgttttggaaagatttgagctggaaagtgcagacagaggccgtggggcattcttcctagacaaccaacctcaacttccgcgaccctgggtcttggaatgactcggttcctgtcccgtcttgaggcctgctgctgcccactccaagggtgtgatgcttgctcttggggaagggctgagtccctggcgggggtgggggtaggaagagatctggaggatggggctatagccaatctgcctgcagtgccaggcgacccctcacacccacacacatgcagggagggatgcaagggcttcccgggcgagggcgcgccttgtggaatgtgccttgaatgagagagcagccggtgggcgggtttttcccacacacacacacacacacacttggggaccatgggagtgcagtgttggttgcatccgtgattctaacagaagcatctgctctgctctgtgggtgggaaagagccccagcccctctccccagtcaaaggaagctgcattcgatgcctgggaaaaaagaaaggacaactttcttcctcaacttgtttttatttttaatttgttctcttccttaacagtgtatgtcactggctcctcttttttatagttttgcttgtttcttggagttcagaggaatgcagaggctgttagctagaggtcctgcactccagagctcctttcttaggggcattccctccttccagctgagccccaaggcagggtcagcattaccttgctgagatagggtgcagaaaagtggaccctggagggtaaggacagaatccgtgggtgcccagtgggtgtggcacaccacgcgggacttcagaagtgaggcaaggagaggacaggcggggtaatctctcagccgcagagcccagcaaaggagaccccagcacgcagtgcacacacatggagctcgttactggaagccattctgtctagaggcatgagcgggctcaggcggttctggagatatctgtgcgtgcctgatctgaggcccttttcaggggaaggtgggcctgtccccacccgcagctggccaggcaggggtggaactcccaagttgcggctctgtcttctcgtgccctgacagcaggcggggcaccggaaggctggcttggtctgcagttcttctgttctttatgacttgaacggtacattccacaccatttctctcacactggtttctctctccctctacgtaggtcctgcctaatcattggacacggactcttaataaaacggtcttcagttccagattccttcccagcaagctatagcttaagtccattttcttccgtgaaagggacaggactccatcaagttatggaattcctcagagccctgggcctgtcccccggggtggattagtcatgtccagcagctcacacctagtcccgcctccgggaaggctgcctgcctggctgcccgcccgcccgggcctcctgtgtaaagactgcctggctgttctgcccagcctccctggtcgtctggggtcctctgagtgggtggcatctcccagagggtgatgacaatccccctgcacacacattcatgcggtgctgctccgtgtgcaaggccccgcccgtcacagatgcgttttctgtctccacccctccctcttttg

SEQ ID NO: 61482 - DNA, 879 bp, Bovine  19866880980307
  misc_feature (1)..(1): n is a, c, g, or t
ngctgccggcagccgctgatcgaggctgggtttccttttagaacatggcccagtgaggcctctgtgcaaggcctgctgggaggccgtgaggcgccagctctatgccggcctggtacagggccttgtcatttacagctgtttggagcaactgcacaggctttaacactgacagtctgaaattgtgtcttaggaaggagaagacgaagagggaaaagaggaggggaaggaaggtggcaaagaggatgcagagaagggtgagtcttctgagtggccgggcactggggacttttccagatggcttgtggcgggagggggccagccaagggcagggtcttggcagaaatatgcccaacttggatcgtcccggtgtggctgactatgtactggtagggagtaacctttcttcctctgcctggttcctactctggccctgatctcgagacagtacactggttttgccttcaggtgggcggggcaagcaaaagtgtgggggaaccccaggctcaacccctgccctcaggcccttagtaacatgcagttccaagtcctcagtggctggtgtccaagctgggaccctcgggtgcagtttttacggctctggtttgcatgtcctttcccttagcacctctacagcccctgttgggagtccgtgtctccctattcgagtgatgagcgccagcaggtacctaacctaaatccagcctcagcctactgttgccgcggtacccagtgtgggtgggcagggccatgtgagctttggggcctttacccttgggggctgcactcaggccccacctgaggccttcctgcattctgccacctgggtcctctgaacttttgccagtgtccccactgagacagcctctctttaccttccag

SEQ ID NO: 61483 - DNA, 1033 bp, Bovine  19866881000723
  misc_feature (1)..(1): n is a, c, g, or t
ntggggcagggaaagcctctcaggtctagacttcaggcaagttcttgtcctttttttggaaaatacatgcataaggggtatggattttatggatgagtggacagacagtggctaaccctttgtctagggtgtaagggacttcaaatgaataagactgtagacgaggaggttatttttacataagtgtaaagaagaagtatgtgggtgtttctatgaaaaaggctcttaagggtcaggtagagaagaaactgttttgcaaatattatttagcctctttcttctgacccctcagtgcttgcttgcttgcttggtggagcaaagattaataaaatgacaaattgcagggcttaggggttatatttttgtattgttagagtagtttaggcagtggtaaaaaaaaaaaaatctccaaatttataatggtccaaacataatgaaattgtatttatcatggtcatcaccatccagggtgcattattttggtaggtaggtggctcagtcccacgaaaagacttccatgtttattggaatgtatgctaactttttctagtgaatatgtaagagaatatggtcagggcagtctatttaaacagcaacagaatgctatagttaccaagcaaatagagaatcaaataattccgagagtcctgcgtgggtgagtgctaagtcgctttagtgaatccaactcttagtgacgcaatgaaccgtagcctgccaggctcctctgtccacaagattctctaggcaagaatactggagtgagttgccatgccctcctccccagagagcatcaaggcccccgcccacttgccccagcggcctaagatgaagcctggtggatgtcgggaggcctgtcatttggtcccctaagcagaaagcaccccaacccgggggccccagacaaggacaaacagaaacaggagccgaagacgccagttgcacccaaaaaggacctaaaaatcaagaacatgggctcctgggctagcctgctgcagaagcatcccacccatccggtcctacacaggcaagtccg

SEQ ID NO: 61484 - DNA, 881 bp, Bovine  19866881056388
  misc_feature (1)..(1): n is a, c, g, or t
nctgtggtccctgaaagagccccacatacccactctagacacgtccatacacattactcctcacacacaggcacacacgcagggaggcaataaatatgttccgtaccaaaagtgcccccagcctgacacttcaggtggggcccctccaaaagggaggtcttataagtgcttaatttcttcaggaatggggaggaagaattggggaggggaagggccagactcttgctatctacttttgctggtttgaggcaattatgaggttttccctggaaaagagggtggcgaaaccacttgttttcctataagccccaggctgctcctatctatccagagcccaggagaggggctcccccgacaccctgcctcaaacagcacttcttcatagtccttgggcccactgagggagaagcagagtgcagtgctcaaagctaatactgatttggttggcagcagcaaggactgactgggagggtgtctcaccatctcagggtgatgctcacagtaactggtgtttccctggctaaagatggcggccctgcaagcagaactgccttttggtagccaggagagaagcccttggtactcaagaaaagatggccacaatagctggtccctaaagtcccccatgcccggccgtcgcaaccagtgtccaaatactgagtactggaaatagggaatgattctcagcaaaggatcggctggtcgctaggcaattccccagtaaccaggagttaggcctgagctacaggtctggtcctccctaggtcgttagggcaccgccttagcaaccaggagcctggccttagtaattggggtccagccccgcccggctcagagacacacgttgatctgcttggagagctctctctccaggtccagga

SEQ ID NO: 61485 - DNA, 913 bp, Bovine  19866881601170
  misc_feature (1)..(1): n is a, c, g, or t
nctatgcatataaggaaacagtattcctctaaaagaaatgaagtactgattcctgctgcaccatgtaaaaccttgaaaacattacaccaagtaacagaagccagacacaaaaggttgtatatattgtacaatttctggaatatccagaataggcaaatttatagacacacagagtacattagtagttgccatggattgaagggatggagagtgcctgctaatgaatagggatctctttttggagggatgaaaatgttctaaaattggttgtggtggtggctgcaccattctgaatatactaaaaaaccactgaattgtacactgtaaattggtgaactatcatttgtgaattatatctcaataaagctattacaaaatgactaaaaacaaaacaggaagattttacaatagtataatgctcaaaatatacataatttatattcaataaatgtttgggggtagatacattaaaattatataagccataaaaaaatcatcgtacaaatatctttttgtcttcctttatacatagtagaagctcaaaaaatcattgatgaaatagattggtcaatcacatgaaatcagggctcgatgttttttttaaatttttttactgacaaaatgagattcacattaagaaatgctacccatacttaacattacccacttcatctccctcttaaaatacttttcccaggtcaggactgaaccacaacccaaacccactcaccacatttcaaagtgcaaagcgggaaatgtaccgtagacagggcacagaggcaactgcatgccatgctgctttgactattaataagtttaccataattagagaccttaacgttaccttagttaaaattcacattccctgaaagtcactactaattatgcccactgttaatattttattgattta

SEQ ID NO: 61486 - DNA, 818 bp, Bovine  19866881918774
  misc_feature (1)..(1): n is a, c, g, or t
ncccattctcttttccccccttttcttgccttctctggcccccctctgtcactcctcctgctctgacacaagtggattattattatttttttttacattttgtatagaaacaaattcatttaaacaaacttattattattattattttttacaaaatatatatatggagatgctctctgcccccctgcaaacccccccagtgcccccgtggggctgagtctgtgggcccattcggccaagctggattctgtgtaccaagtacacaggcatgaccgggctcctgtgtaccaagtacacaaccctggtgtgtaccaagtaggcacccttgggcgcaccctccggggctaggggtcgggtgagacttgggagcctcctccctgctccacctccctcacgtcactgcattccagatggaacttattctagagctttgccctctggcccaagagagcccgcccacagtccccccacccccatcctagggtgtgggccttctccctttgggagctgggagggtggggtggctggtgggactatgaggaccaagggagacgtgtgcattctactttgtctccctgtaaacaatgggcctgcaggaagagaatgagctgcctgcctggcacctcttcttcctggtactcccctggcccagcctcagggcaaaatagaagtatttgtaggctatttttgtaatatagcttctggtcacaatccctgtgtagctaagtccccaggccttgcattgtacagccccctgttccgtcaccacctaataaaggaatagttaacactcggtgtcattgttgtgtgtctaggtg

SEQ ID NO: 61487 - DNA, 1549 bp, Bovine  19866880354323
  misc_feature (1)..(1): n is a, c, g, or t
ntacttaataaaaactaatttagagaaaaaagaagggacacaaagaccctcagaagccaataaggcttccaggggaacccagaagcttggcccaactgtaaaaccccagcactgcgctctcagcgagtagcaggagatttggtgacaatggaagcttccaaacctacacggcattggtgataaaaattaaggtcatttagaaacccagaaactaaagccggtcggcctctgaagggaattttaatttgttaatggattttccagctgatggctggggagaaagatagcaattcacaatgggtctgatgccaaaaatagggccacacaagccagcaagtctcagagagttctttcgtctttcttcaattgcatcaagaacacgctgtccggggacgcagatttctgcactcccccaccccacccccattttaatcagctaatagcagatgaacacctagtgatgctgccaaggatctcttaatcccatcagtcacggggaatgagggtacagagggcaggtgcctctggtacctctgccagggggatgcaggatttggcagaaaccccaggggacagtttcctcactcgtcaccagcggtttggagggagccaggaaagagaagcaggtgcagctctcttccttgtgcttgctctggggaggacattagcagcagaagtatgttcacttatcccacatatgattacggactacactacaatgactcagatggacccagtccccaagctcgtggagctgatggtccagcaatgaaaatgaatctgactgagcaaagcaaggaggggatgccacagaaccacattaacagagccctgcattcagtgctgcaaagagaggactggggcttgtggggaaacacccagagggagtccccaagtgggtcaagagaagagtttcagactttcctggtgggacagcggacaggagtctgctggccaatgcagaggacataggttcaatccctgctccaggaaaaccctataatctgcggagcaactgagccagtgcaccacagctactgaagccgcgagctctagagcccatgctccacaacgagagaagctatcacaatgagaagcccacagaaggcagagaagagtagcccctgccctctgcaactagagaaagcccatgcagccacgaagaaccagcacagccaaaaacagaataaaacttctcttaaaaaaagagagagagagaagagcttcacccagaaatgtaaaccaaaggccacccaccttatcctgagtgcccagagctgccgagagactcggccaccacctgaggcctctagacctgaccctccttgggaacaatgcccgtgctcacaagggtgcctctgtggtgaggacagaagagaaaaacccaatttctgaatcttatttttagctgcaagccaagcagaagagtagaaagaagccacttgactagaatcctgaccacacagaacgagtcatttaatcctttttaaaagcctgtccatgggatctgccatctagctggcatctaacttgggaaactctcatctca

SEQ ID NO: 61488 - DNA, 1728 bp, Bovine  19866880357007
  misc_feature (1)..(1): n is a, c, g, or t
ngtgcaatagcaaacaccccagactgatggcctagagaacagacatttattttctcacagtcctggggggtagaaatctgagatcaaggtgctggcagcgttgatttcttttgaggcctctctccttgtcttgtgagtgaccatcttctgcctgtcttcacagggtcttccctctgtgtgtctgtatccttatctcctcttcttgtaaggatgccaatcagattggctcaagattgaccctggtgaccttgttttaaccacttacctcttcaaaaactgtgtctccaaataccgtcatattttgaggtactagggggttagaacttcagcatagatttgaggggaagattcaggccctaacacttctcatattggtgtgtctgattttacaccttctatccatttgtattcagccctatctttatgggggtcttggtgaatgatcagcagagatcccaaaatggaatgaatgtcccaggggtgttggagagggggaagcagaggggcctacccatgaccaccctgacctttgccccatggtggacctgcttagtgaggatgggaggacccagtctgctcagaatgcacgtgtttggggccggcaagggagctggtagtccttctagggagcgtggttgattaatataatcatattaactggccctcaaacagacatatttatagccatggtgacacattattaaggatctaatttggatcaggactctgggaatcttatttttaggtccagaggagagccctgcagtcaggtgaccaggaggtctccccggagtgttgtgtttattctgtccagttggaaactctcagggttggaagaaatttacaaggtcccatcaacccacccttccacatgatgcctgtatcactgcatgtgtccccactgagggaccatccaacctcctctaaatgccacccatattctatcccagaggcccatcttgacctaggaaagtgggaaggaacttctttctacatcttctgttcagctgtctgggtccacacagctggagagaacacgtccccctatttggcagctcttcagagtcactggagtcagggctaaagctctgctggctgtcactgctccaggctgagggccccacttcaccgtcagcagctcctctcagaatatagctccgcctcgactttttgaaaaatgtaaataaatgttcagtcctgggctctaggaccttcctgagtgcctgccttatggtactgctccagttctgggtccagatgaaacttggccaattgtagtcagctggcctttgttgaggaattctggggaaaacaggcttcttctaaagagaaatcactccacaggcacctgtgctcttggtttggtgaggagaaagatggaggctgagtattgatagtgggagtctgacccaggtgaggggcagcaccgtgcccctgggtcaggccatagcacagagggggttggccagagcaccctgacgtgcgatccttctgggaaatgagcacctgggcagctctggtttgcatgttccactctgccagccccaagaatgatggagtcccttcagccacacttgtaggtgaccctgatggtgggagcctggagtgcgtcttatgcaaggctgtgtcccctggctcacagcagacacctgcagtgtcacacacttgagacccagctctgctgctgaccaacccttccggagaccttgtgtgagcatcctcacttca

SEQ ID NO: 61489 - DNA, 938 bp, Bovine  19866880460058
  misc_feature (1)..(1): n is a, c, g, or t
natgaagaacgtgagttgcagagtgaaggaacgcctcctcaaaggccgattcaattttaggaatcttatgaaaagccatcctggtttagaagcagcctcaagaaatttggcactgaattttagctttgctcagagagagcaagaaggaaggagaggctgctttttctggaattctaggaccttcctttgcaaggtcagcagtgcagagatataccctaatgatccatgattgcctatatttggaacggaagtatttaatttggtctaattgtggctatttctaggagtcattgggaaattcagcagctaatgaacgtgcccctgttctgtcagatccctattggaatattcagtgttctctttttcatacttaccagctaagggaattactgaaatacatttctggagtctactgtggtaaaagcagggatatgaaagccttctttcccatcactgagtcccaatatcgcaggtgaatgtcacacttgtgttaaaaacaggccattgattcccagcaggctctggccagagcctctgcctcccaggactgtgccagactgacctccttttcctgctgccactccttttgggggcctctatgggtcttcattcagtgtggggctcgtgggtatccaggcctgcaggcagacacacttctacagagctggatcagaggacagaagacagaggatgaaggacactggcctattcatttctccttttctctcttttggcattatgctcagttttgctaacaactgatgggagctgttctatctagagtaaatgacccagatgcatatttctaaaattatattttggggcattctaatccccctccaattctggggaggctgcgtactctatctccctcttgatgattttgcatgcacatttacatcttgaagaccatgcaagtcttgtagtaaagtgacctg

SEQ ID NO: 61490 - DNA, 1892 bp, Bovine  19866880519522
  misc_feature (1)..(1): n is a, c, g, or t
ncacacccagtcccaggcctgccgtgagttcaccacccacctttgttcacgatggtccctcaggctgcaggacccatccccccttctccatttagaaaagacgccacccgagcttaagttctagcttgaatgccatgcttcctggggagacctccctacctgcccccagttccctgcacacccccacgggtttactgtccatgcatctccctcccaccattgccctgtcccatgacactgctcggccccctcacaggcatcacacgtgcccaggagcctcaaaggctatttctctcccagggtctccttaaagctcaagggaccattggttgtcaggaaccaatgaatactggctgtaagaatgcagttctgtgatacaaatgaatttacttaccaaatagaaagagagagaaacttacagagttacagaatgaacctatggttgctgggtggggaggggaaggatgagcggaagggaaagttagagagtttgggatggacatgtacacaacgccagtatttaaaatggataaccatcagggactgactgtgtggcacagggagctgtgctcagtgtgctgtgccagcctggatgggaggggagtctgggggagagtggaggcgtgtgtatggacggctgagtcccttcgctgttcacctgaaactaccaccacgttgtttgttaagcagctacaccccaacacaaaatacaaagtttaaaagaaaagaatgcatttctgaaacgtcagttgcaccagaagccccctaagcctggccttgtgccacttcatgagggtctatgctctggacacagcaggcacttggacctctagggtgaagggaaataggaagttgagatgcaatggaaaattccaaattttcactatgaggcgagactggggcatcacctagagtgagaacgacgacccaggtcactcccaccagacctgaaagtaagtggtaaagactctgaccctcccacagacccactgtgtcatggggagacccaagcctgtgggggccccagcgcccataccggatgctgtcgcgctcagccacgatcttgtcccgctcctggaatgcccagtcccgccggcacttggccacgtccgcctcttggagggcttccttcagctcctggcacagagccttgcactgctttcgaaggatttcagcctccttgttggctctcccggcgtccatcgtcactgtgtctttgatctgcaggaggacaacaagcgagcagagggggaagttactgggccttctggtccggaagtgccctccaactggtgcaggagctggggctgcactctccggagctggatggagggaagtgctgagatcccaggaagagcccattctgacacaccccaaaccatgacaacatgctccacagccatgctcagacccctagtgacgctgtatttgtgttcacccaaactcgctcagcccctcacagagccaggactggaagcccggccgctcctctgtcctggtctcaggggcccaggggaaatgacccccagagggctcctcctaaaccccacctgccgtttacgggatgtgtgtcttgcagagagccctctgcatctctctagagagtgcttgtgacaaatcgtgacacgaggccccactgcagtgaaggctgcagcactggtcatgacgcttccccacccgctgtgtctgcaacacagctgatatactctggcatgcagttaccgctaaatctgaaaatttactggctgctgtttgctggggaagtcctgggtgtctcagctcctttaaaaagctgaaatctaaaggatctgcttctagacctctttccaaagcacgacatgctccgttaaaatctcaaatcaaactctttgaagcactcatacagaaagctc

SEQ ID NO: 61491 - DNA, 2621 bp, Bovine  19866880612241
  misc_feature (1)..(1): n is a, c, g, or t
ngggtggagggttggcagcgggctaggtgggtggatgacagggtgggtgactgagtgggtgaataggtggggagctgggagggttagctgagacacagaaagcactcagcaaagcgccagaacctgtaacaccgaatgggggctgactgtagtggcgggagatctttgctgccccccgacacctgacccaaaaccttacgacgccttccgtccccttctccgtgtcttgtagttgcagactctgcagccttcagaataaacagcagcacttccctagcacaaggttaacactcaataaaagtctgaaccaattaagcaagaggctgggacttattcatccaataagtcacccatcactgagtgtttttttgaaaaaggtgttttctacaacccactccagggccagtggccagtaaaatttgttgcattaatttcactcatttgacatctctggacacaggacaatgcaccccaccacctaggatggaagagaggggacagattccaccatggcttcctcaagacgattgtaagttaccactggtgacagagctggcctcgctaagcctgctgatccttgcctacacagccttcccagggagaaacaagtgtcttggtaaatggctcatgcccctgaagataacgaggcaccctgtgatgagaagaagcacaggattgatggggtaggaggcaggcaggaagtgtatttccaccttgagttggactgctcatgtggcccggtggtggcagggactccttagaggatgtgtgtctctgaagcccagaaaaggaagagatactaccaacagtctaccttgagccacaaccggctgatctccctgaagttgtacagggaagcattcacttctttgaaaggctaattagtcaagacggcaccatgcttcagacacaattgcactggtcccatttgggtctctatgggtcagctgtgatgaaatttccattacctattgtgttttggttactggaggacaatgtgtgtttggaaaagtgggtgtggtcaagaggaaccacaaaaagccagaatatcttgagtatctgtaaaacccatttctgattttaaaacttcacaaagatgatgaatctctgggagctgaagagtcttcttggaatctcagcactgtctgtgggaacggctcctggcaggcagtgtgggctttgaaattcaagtctctccggcaacagagcagagtgagctcccccaacttggccactgagagtggaaataagacccaggaaagggagactttgtgttctgctcacctggccaccagccctcatgctcccagagatgcagaccacggttatggatatacgggtacatggcttgtgagccaggaatgttcaagtatcaacaaggataaagcagaatgacctcatctctcctgccttccagagagcaatgacgtgaaagggccagacatcaccctgggtaaacaggtgcaccaagttacggggtgtcaccaaaaggcccactcccccaaaagttagagctgggagggggaaggctactttagggaccatctcacccagggtttctcaacctcggcactaatgatattttggcaagataaacttgatgtgggcatctgtcctgtacgtcttggaatgtttaacagcatctctggccttcagcactcttccactctcctaggttgtgacaattaaaatgtctccaaacattgtcaaaagtcccctagggggcaaaaatcatcatagattgaggaccacttatctagactagtggttcccaaagtagatgcgaaggaacatcagttagtaggctcctctacaacccaagtattccatgatcaactaagtttgtgaatcactgcccaccgtaccccactgcagtaatttactgtattattggattggccaaaaggcgcattcagtcttttccataacatcttatggaaaacaacgctctttttggccaacctcttagtgtcattatattaaggaccctgaaaagtaccacagtaagtagaaacttgtttaataactttaactgttttgtgatctttcccaaataagatgcttttattattggtttatatctttcagagctaaagaatatcttgtaagatttttatatgtacatgtgtatgcaggcacaatacaccaggcaacctttctcccactgactagatgaagggaagccataagccagtcttgttcctaagtcccattaacagatgtggggcagagctacgcctagcagcctggagccctgaatcccagtccacctccttctgcacaaacggtttggacgctatccacaacagaagtccatcttctcacaaccatgccacaatatggttctaccaacaccgctgagaacatccacctggggagctcaagctagtgaatgtcagcacagtactccccggagaacaaaccaagcaggcacttgctgcaggtgaagtcgaggaggacctcacgaaggtgatggccacgaccatggaggatacaggcaggagctcaacatcatatccacacgtgcctccccagcccatccaagtgcaatccccaccagacacttaacctaactcatctctgtcttaatacaggcaccttcatatcggggcggctcagag

SEQ ID NO: 61492 - DNA, 1786 bp, Bovine  19866880652382
  misc_feature (1)..(1): n is a, c, g, or t
naagctctccccagaccacgatcaggacccatctctccccactctagcagcagttcccaaaggagggagcatcacgagcccctcacgcccatcagataaaagcctttttgccaaggaccaagggccatatctccacttccaaaagagtctttcctatttgcactcctcccacatcaaagtcgatgcttcctacacagcggaaacttctcagaatggaagcgtgccatccttgactgaggagggtgtacctagacacagggaccccgtacctcactggtacacagtaaatcagtacttgccattcttgtgtggcctcagatctcatgaagaaagctgcatgcctcctagaaaatgcctgatgcctgtgccccaccccctactctgcccttttcatgtattccttcagggcactccagatgctgcgacacccaacacacactgcagaggggtgtgcagactgagtcaggggagacccggagaggggcacaggccacaggaaaacggggctcagcggcctcaaacttccccaggcccaaaaccctaaagagaaagcctgtctcacccgaggagctttcaagggtttttctaagtaagcttagaatttggggcccaagtaataatgctcatagtcccatccctcaagggcaagaaacacagggacgttcacagggaacagcctccatcaaaagcccctccccaagccccaagttcctggcagccctggccactgatacctgatgtagaaactgtcgccaggcaggcccttaatcttggagaactcctcagggcggtactgcaccttcaggcggacgctgtccttgggcttcagcatctccacgtagacctcctccactgtcttgctacgtacatccagaccgccatactacccagagatggagacgggggtcagagggcagaagcagggaggcctgggcacccgtgaggggccagtagtgggataaggagaagattcagcatccccatcactgggcatccatctgccccacgtctacagaggctgaggcctctaccaagtgcctgctctgccctcaactgctcccagcagagaccctgttctagcctcccagccagtgaggcctactggaaacacggcacttccccttgctaaagctccttgtagctttcagtacctacaacctgcctgccccatccaaagggagacccagtgagagggagatggtgctcaccatcagactcgagtcctggtcctactgctgccaggagcagagcatctgccctcccgatgccagtgcccaagctgggtcctaacatgcctaatatgcctgcttccctaatatttacccagagtgggtctgggtagcgttcaacacccaagggggatgccaggctgtgctcccccgcctccatgtcacctgagacggcaggaagcccgacatgggcagagggcagcctggctgctgctcggcagctcagaacttacctcaaggatgaggtccccgggcacgaggccgtcggggcccctggcaggactgtcgtcctccacctcggccacaaacaccccgtgcaggttccctccacataagtgcacgccaagctccaactgcgacttcttgatgaagacgactcggggctctggggtcttcttggtggcatctcccaccatcctttcaggaaggaaaacgaagctcttcaattgtgcacaggaagggaggcaggcgcgaacaaagacgaaacggtggtgacaccctgaccattttctgctcccctctcaggtctcatgaggccccagaaccaggagccagga

SEQ ID NO: 61493 - DNA, 984 bp, Bovine  19866880675134
  misc_feature (1)..(1): n is a, c, g, or t
natgttgtgatctatctaggagatggccaggtccctgcttttaccggtcatttgttccgtggaagaggcagattatctaaaaagcaaataaacggatagatttgaagatagtgaaaagtgctttaaggaaacaagagactactgggaagtgagtgattagaagtgaggatcaccaacataggacaaggggagatggaaagacccacacaaagatcattctgttgaaaaccatgaaataagcaagcttttggaatttctctctctctctctctctctctctcacacacacacactcacacacacacacacacacacacacacacacgagggagggagaaagccctccctgagtttccaagagaggcaagcaggatgagcagcccaaaataaatacagttaaataaagattgattctgaggccaaacaagcttcaagataattatttctcccggtagtgaatcattatggctcacaaatgaattcatcttttcatgttttcagttccaaaggtcccagatagatggattaatcctctttttctcctggcttccttcacctgatcccctcacctccttgaattagaatgaagggccattcattcggagaaatctattaactcacagctcctagactgctggctttccactccgcctggcttgggttctgcctctcatggcgagagccctcacgcgtctctgttgtatcccttcatgtcccctttgggcctgtggctgaggcaggaaagctcaccagttgctacagtggctcctgtgtctttcccagagcccacaattaggagggatgtgggaacctaggagctgggcatcacttccaggaggcaggggatacccatgtggtccagtgcgaggtggcagagcttccatcagcctgggccccacagtgggagtatggagtggaccccaatccccttgtcttcattgatctataacttccggcttctctgggcctcaaggacatgttact

SEQ ID NO: 61494 - DNA, 887 bp, Bovine  19866880678374
  misc_feature (1)..(1): n is a, c, g, or t
ngaagccacaaattcagagaaggcaaaatgtaaatgatgcaaaaagagatcaagatccatgaatattcatcttccttccccttatgatggaaaccaggtttgagaaggatcatcgagctccatttcctctgaattcctcagaggaattcacggtcggcttctcttctttctacctgaacacagaacatgaggaagcgttctcgcttccaggaactggtggttacacaggtatgtatatacgcgactgaaaattcacccacctcggtatttaagatccgtgcgttccctgtgtgtatttagacctcaattttaaaagtgaaagtcaaaagactggcagactgattctcatccttcacagcatgtttcaaacgtgacattctagtggggagagccttcctctctcaccactgagaataagtccctgcctcttcaccttgccctgcacacatctctgacatagctcctggccccaaacaaaacaatgaaagtgaagagtcctctagaggctgtttgctcccagtaagacaaacctggggctgattcatttctggatctgcttcatgaggcaaaggcttatagtaattgtttattgtgggaataatttcgaatggtctagaactctgtcccacacaacaggactggaagctctcaaggtctgtgtcttccagctccagggacatctgtgtgaccccagaggggtgaattaacctctctgagtctcagctcctgaacagcacctgcccttcaaggatgctgtgagaattttatcagctaagatgtagtagccatgtatggatgtgagagttgggacataaaggctgagcaccaaagaattgatgctttagtactatcatgctggagaagactcttgcgagttccttggacag

SEQ ID NO: 61495 - DNA, 4061 bp, Bovine  19866880770857
  misc_feature (1)..(1): n is a, c, g, or t
ntggaggggggtggggaaggcacctttatctccctggctctcctgtgatccaaaccccaccaagcatcacataatcctacaatgactttgatcccggaaagccccagcccctcagtcctggaagtcaagaacgccccaggcttctgagaagggggaggagatcacaaaagtatttcaaatgcacaaatgtgggttacctttcacacacaaaggcaatcctcaagagacaaagttgatcatgataacaaaagaaggtatttcacttttcttgtgcaaggagaaggaaaaaaaaaaatccacatccacaaccgcagagtgtagcaaatgaaaccaaagcacaccagtccccagagacctcagggtcctcccagctcctggcacactggccacctgcagggaaccctgacggcacacgcactcagggtccttgagtcaatgggaatccccgtgctagcgtcactgtgctgtgcctgccatgcccggccctagcacaaggccaatgcttagttaaagcttgaagagtaacagctggatccttgttctcagttgcacttcagcctcctcagagcttacggggcccctatgccacccagccttgaccttctacagatgtccagaggagacacacggagccaggtgacgtggcgagctggagacagtgccaaggccagcttcagggtccctcatcactacagaaccacacataatagaaataatctgcaaagggctgaattgtgttccctctgaaattcaaatgtcaaagtcctaactccccagaatcgcagcatgtgactctgtttagagatggggtcttcaaagaggaaatccaattaacaccaggtcagtagggtgggccctaatctttctaagaagaggaaatttggacatagacaagtgcacacacacagaagaaagacccttgaggatacagagagaagatggctgtctataagccaatgcaagagacaggtctcacaagaaaccagccctgctgacaccctgatcagggacttgcagtcgccaggactgtgagacaatagacgcccatcgactgagcccccaagtctgtggtactttgttacagcagcccttccacactcatccagttgctaccgtgccaggctttgcacagccctatctaacacagacattgtccacagtgaaagccatggaaaactgtcaaatgaatcctttatcctgggtttccctggtggtcgagcagttaagaatccacctgccaatgcacaggacacgggatcagtccttggttggggaaagtcccacatgccaaggagcaaacaagcccaggaaccacaaccgctgaagcttgagagactggagtgtgtactccacaagagaagccatcacaagaagtccatgcaccagaacgaagagtagttcccctgccgcaactagagcaagcccacacgcggcaatgaagactcagcacagccaaaaataaataaatcttctttataaaaatgctatcctacttaaaactcacacactccagaaaagggatactgctattagcctcaatttatagacaaggttcctgtagctcagaaagatgaaggagccagacatagattattcagctagacttggaacaaatgtccccagttctgggccctgcacctttacccctgagctgcctctaagccaaaccctgctccctctgcctgtcccccacccactcagcagctctagtattatcccagaatggccctgcccacccggaccaccgatgaccaccatctgagaccactgccttcctcgtcaccctcaggcctcccaacagccacttaaggaaactctgttgtctaccatgaatagttctggtgtctttttttcttttttaaatgaatactgttttcatcatcaggaaaaaaaatattcaaaaagttaactctgttaatgaattctatagactcttcagcctgtgtgcaaataaataaatgatcaaaaggaatatctttggaaacacaattaagaataaaaagggggaaaaaaataaaagcaacctttgccagtgtcccatcagccaagatgagataagggactcacggggcaaaaagaagaccgtcacggccaataaccctagtcagcccatctcccgaaaacatctatttttaaaagcatgttccatttcatcacatttcagaagaacaaagaagagaccttgaggggcagacaggcaggctccaaagcgaaatgcagcacgctcacagctcacagcagcggtgtggtcgcccgtggccagacagtgattttcatctgaaaaatgcgaatctccagtgacagatggagctcagatacagagctaccatcagcatgcagcccaacaaagcgccaattttcatatctcctagggcctgctgggcccccaacttcttagtttaaatggaaactgtcagaccagattttgtgcaaacatgcgctttccttgggggcaaacattctgagtctacaacctgttctttcattttcccagctttctgtccatggcaacaacatcaaagatgagagaggcgggtggggagggctgtcaggagcaccagagaacagagcaaacacgaagtgcagaagagctggctgaataaccaggaggcgacaagcagcaggcgcctctctacgctgcccctcgctgtcaatcacaggcagacagggcggggccgcatgggaagagagtgccccttcttctgcagctcctgcgaggatgtaccagtctgtgttagcacagcttccctcctgataagctccaaggtcctggagagggaaatgacacaacaaaatacgcgcacaagcaaacacacacacacacagacccacacatacagaactgctggggcggggagaggcgaccatgcagacagtgaaagcagaattcccattggaacaggattaggtgacggggttaaacgtatgactaatattcacaggaaaagctgctggacactgtttcagctgctgataccaattcttctgaaccactttaaaacgccagtcactttttcattctaagcttattcattagagcctctttaaaccgtctcaaaagacagacaggcttctgcccaaacccaccttcatgccatcagcatgcttcaggcagatggaaggaattctgaggcagggacatctgtaaggaccattccagcccctgttactaaatgcatcttcctctaaagtttcatgcactaaaaacctcgttaagccaagtcacctactacagaccgcattcctctgaggtgtgtggtcttcaggagcctgcatggtgtgtctggggtttgtgtttggtgcggagtgatggagagactccctcaagataactgaagaagatttgccaaaactgaaacacttcaatcttccagagtctcatttccccagtgtgtctgcatctcaagcagacatgtcaaaacctggccgtgaggaaggctcacagcccacaggcaacctcccagacctgggcctgtgccaggagagtaaccagtgaggtttctcgatacgggcatgataaaaacactaggaaacatcatttttaatagcaaccaaaaagagagagcagcaatccccaaaactctgcgtaccccagaaaaacaaagagaccttgagaggcagacaacaaaaatggagtctggggtgggtctcccagctcagagcctgctgcccggggccccacccagcctggaagcctgtgtgcagtcacctctcccatgctgacggccactctgtccactggctcaccacaaaggccacttgtttcccatgagtgcccagaacagcggctcaaccagttggcccggtcggggactgtggtcctggtggatgggtggtgacagggctgctgtgacctcaacagacaattagcaaggtagtgttgagtttccaagctctggcaggtcacctaccaggctgggagagcatataggagtcagcttgcagacccaggaaggggtcaggcagggtcagctgcaggctatttcaactccatgcctgtccctccacactaagcactgcttcctctgacccggctgggggcaggggggtgtgcaggagaa

SEQ ID NO: 61496 - DNA, 1770 bp, Bovine  19866880791416
  misc_feature (1)..(1): n is a, c, g, or t
nattggagtgtgaaagacattttgatggtgatgcggaggcgaggtgatgatttatttataatcgacaaggttgtatccatccagctactggaataattatatactttagaagcgcacactcactgtgatacaaaaagcccctccatgcattgaagatgggggccatcaaggggaagtcctgccagggaaggtgctgtgatgccaccatcctatgacagtgacattgctacaagagctatcggccaccggccgccactaaccccaactatatattagggactgaatgatctctcagttcccttctaaaaatgaggccttttcccggagtaagtgtttagtctccatctgcttctggggatgttttctcatctcaatgcagggataaagaaggattcttcatcttgtatctgatcttttgtttctgttttgcttatttgggttgaaggtccagctcctggattctccctaactaagatgctaatgaagatgtggggcaataatgacatctcattgaagggctggcagaaccgagttcaaacctgagatttgggaaacatcctttatcacctgcaacgtcctcatctggaaaacagggatgctggcacctgtctcactgggctgccataaagacaaaacctggcacaagagaaatcctggtatgtactaaaaattcacggctgtgacttcaggtgaaagaggacctacatgttgacactggctccttaataactggtgggtccggcttgttctgtttgtttggagaccaggttggcgcctgtgaccactgcttgcatctccaaaggctcacaagcactcagcttaacaatccaatcaaaaatttattcccagggataagccacaacatcattagaatagaaattccaaaattcaacttctaacacccactagaaatacgagctagaatgaaaagttccagaacactagaggtattccccacaatccaaagactccccagaggaagtaacagggggtgtatttacctcacaaaaatcaggtgtgctatttgaaacaagagtttgcagacactggagctcagacagggcaggacagtgacccctgtgaaacaaacaaggtgaatccatgaccaccccagccttcagcctggggggtatctgggccacagctcagagcaaagggcccaggcagagcccaggggtcttgctgagttgaagaatcagagctgggattctagggaagcccaggcacctagagttcacaggacagagcaccagagaggagaaagctgcccagacaacactctgaggatcagcagagagaccttcttgagtgttcagttaagtactgaatacttagtacccaaggtgggggacagaaacaccctgaaggagcacagagaacagcccctggaactcacgtggggccgggaataggtcatgtcccaccagccagagcaggaaagttcaaaaatcaaaatactgttatgagctgaattgggttccctcaaaaatccctatgttgaaatccttaaccctacccccttaccccatgcatctgaacacagctctatttggtcattagggtagaccctaatggaatatggctgatgccctttttatatttatttatttatgtttttatgactgtgctgggtcttcgctgctgtgcaggctactctcttgctgcagtgcacaggcttctcattgcagtggcctcgcttgtggagaacaggttccagggcgtgtgagccgcaggagctgcggtgtgtgggctcagcagctgcagctctgg

SEQ ID NO: 61497 - DNA, 2028 bp, Bovine  19866880795563
  misc_feature (1)..(1): n is a, c, g, or t
ncgcaacaacacattttcactttcaacacctgggatgatttcactttgcagactttgctggaagaacccctatgtgtccagtgccttgaagagcgtctgacactctcaggtactccaggaatacttgaaggaatgggtgaatgacttggaggagagtccgggcatatacagtagaacctgtgtccttctcttctggtgacttaacacaccttcttccatcttcccaacagatttggggttgctgcctgtcaatggatggtaaagacacctccctatgtcagaaggtactggcatgccttctgaaaccagccctgtgttcatcagcctcacccacatccagggaggactggatatggggaccacagtgagcacacttgtccctctttcctcaagattcatctgtcagcctgccagggtttcctgtgacacacgtgcctacaatgtacagttcccagggagagcccagccagccctccggcccccagccggctcaggatggctgtatgaagtgagaatttcctggctgacttgacagtgatgagtcaggctggcatgagccagcttcagaaatgacagggcctgaattgtgtgcatggaccaaatatcatcggctggctggacccaaacctgggtcctggaatactcagaccccatttagatggccatgcccagaggtggctcagcactcttaaatgatgtctgagtttggcagtgtctgagggctcctccattcctgtcacaggagaggatttatcctccactccctgtccctgtgtgtctccacaccatcatgtttcctccatgttatggtgaccaggctcccttaatactaacaaaaataataatagcaaatgcttattagcactaaccacataacgggcactattctaaacattttacatatgttgatgcatcaaatcctcctaacaacatgaaaaggcagatgtgcactgctatatttaaatgaataagcaacaaggaccttactgtatagcacatggaattctgctcaatgttatgtggcagcctggatgggaggggggtctgggggagaatggagaatgtgcacagatctacctcattctttttagtggcaacatgacattttatcatatggttgtatcctattttgtattaccaatatttgctgcatgaatattgttatttatgtttcttgtatgagaatatcatacagtaaattccaagtagacaatttattgtgtgtttccattttgaattttgagagatattgcctcctgcaaggttgctccaacaaaacccccaccagaagtgaacagtgtggaacactggttcccgtacctatattactgcagtggtgcatttccatatttgcccatttggaagataaagcagggtatgatattattgttttgatttgcaattctttaactacaagaggagctgagtccattttcatgtccttactggacattcagattgtgtcttgggtatctgcatgtccatgtgctttgctcatttttctagggagttattcatcttggtctttttcattctaagcattccttataaaagaacacaattatccctttgttatatgtctcccatgttattattaggaatattttcccagaattccatgtgcacagggatttaatgcatgtgtgtgctaactcacttcagttgtgtccgactctgcgcatccctatgaactgtagcctgccagcctcctctgcccataggattctccaggaaagaatactggaatggttgccatgccctcctccaagggatctttgtaacccagggatctaactcacatctcttacatctcctgaattgataggcagattcgttaccactatcgacacctaggatttcacaattcttattaaattgtaggtattcttgtagtggtttgctctgactagtgagtttttccccactacaatatattttttaacacaaacatatttctagcacttttttggctcacattttagataggaatatttatttaatttacaattcatttttgtttgagaagta

SEQ ID NO: 61498 - DNA, 3377 bp, Bovine  19866880865030
  misc_feature (1)..(1): n is a, c, g, or t
nttgagtcgtggagggaagtggacaggacacttacttctctgtctttcttaaggaaattagggcacttgaaagctcaattaaatgtacccaggcctcttaagcactggggctgtcctttttgctcatctaattaactgtagttcacaaaattggccccgtgctgacatggaaggctctacgaaactgaggagccagggacctgtttgagtggaagctcgcttcctgcttcacaagcctccggggacacagatcttacctgaggacatccaggttacctgtgaacttgcctcctccctgggcaagcagacctctgggccttccttgtttgctggaggtgagttaatccagaaagtaaatggactgggcattctggtttcttgtagctatggaaaagccaggatccagcacattacgctgaaaggttgaaaaactttcaccttcccagactgcttttagtgaagaggctgaattttgatcttttccccatttccccatttttctcttttcagcaatttttttttcctcttcatttcatggtggctgttgaggaagcaactgtccccagggaaacagggagcaagcagctcacggaaaaggagagaggaagacaaggctccactcccacatcactctccctcaaatattggctttgcttatactaaaaatagcttgcaacgaaagctgaatgacagaaaagtagcatttcacagggcagaagctaccggctccctgacctccacagggacctgctgattctgttagcctgtgggcttcaacttgcccaggaaggggtggggtgcagaatccctctgggaggggacaacctgtttccttctgtgtcatgctggatctctctggagttagttctgtcagtcaggcattcacagagccttctgccagggcttgtgccccaggagtgacagataacttcctgcaatggagagtggctggtttcaggggctgcttgttcccacaggcccctgtgtgtgggctcctggagaagctgccatgaggttactgtctcccccaagccatgaggtgggcagtatggcttctcaaccactttcaacctctccaggaagaaagcttacatcctcaggaaggaggaaatgagtttactgacctagcttcatgcaatgtatccgtctgggccttggggattggtgatggtgttttaagatcaatttgggatatgagagcagaggttaccatcacttcctttcatctgaagaatggtgaacagcggaacactgtgttcttaatccgggctctgccataatctctctggtgaccttggataagtccattccttttcaaggtcttggtgtatccatggataaaataagggggactgtgaagaaagctgagtgccaaagaattgatgtttttgaactgtggtgttggagaaaactcttgagagtcccttggaccgcaagaagatccaaccagtccattctaaaggagatcggtcctgggtgttcattggaaggactgatgctgaagctgaaactccaaaactttggccacctcacgcaaagagttgattcactggaaaagaccctgatgctgggagagattgggggcaggaggagaaggggacgacagaggatgagatggctggatggcatcactgactcaatggacatgagtttgggtaaactccaggagttggtgatggacagggaggcctggcgtgctgtgattcatggggttgcaaagagttggacatgactgagcaactgaactgaactgaatagtctgttccctggcagttcaaattttgttatgttttctcacttcctctactgtcctttattcagcaaaggcagcaagtggtgcatttggcaatgagctcagcacttggggaactggaaaaggagaaagaatagtcctttatcagcttccagagaaactggagggatgcagaaaatagtcaaggacccagtctcctggccctgccctggcttggcacttcatttaagacaaaaacaaaaactctccctgtgtcatcaggcctctgcctccctctcatctcttaggattattttcctcctggactcctttccaggcgtatcaccatatacagagagagaagcaggtggcaggaggagcagggcctgtgaccgtggagttgggtaggaggaaggatgcggtgggaggaggggtcacatcccaagggaccagttgctcttggaagaagtgtcttcctgtaaaccacttccatcttggatatccctcctctagttgtctcccaagagtcggaaacccccgaggggatcacgttctgatttagtaaccccactggcagcaaagttgaactgaagagccttctttcccatggagcagccttttggagaccctcggggaggtctgggttctgccctttgctgtttgcattgctttgacagatgtcagtgagagtcccagagttcctggaagtctgttcctcttctgggcagagggcagagggcagaggcagctccatctcttgatatctgtaaatgtttcataagaggcacatttatttaaagtcatgaccgacagagacacccaagaggtgctgaggagcgaggagacatgaccgtggcaagagtcattttttgtttggggagcaaggtagctgatatacctgtatacctaatatacctagggggttgacaggagctgccaggcatttagcctccaaattacagcaaaggtgtgaatactgaggttcttagtgggtttgatgttgcagagtttcccctaaatgaagctttattttcagtaaccttctttgatgaacttgaaaaaataaccaccacagaccctcaactggccgtctattttgatgtttgcaatttagttcaagaaaagaccgtccatgtccttgggagtaaggactgagcccttccttggatgctaaataacaaaacatcattgttcctctgatttgtgcaaactttgcaaacaagtagaattttctggtagcttttcctaggaagttacattgctgaagcagattttcgtagcttcctggaccaggaggagttgttgtgttgggggctcagggctctctccaacaaatcaacctcatagagacgatgcagcaaaatacccttccagcctccaaagatgcagttcctcttccccaggttatggtggagagatccagatagaatagaaataaataagtaacttgattctctttcatttaactctcagacacagcctctggggctaattatttctgctgtggattttgtcagaccttgaatcgcaatccttttgccataggtggtatattttagaaatgcaaaatgacatgaaaaacaatcccctttcctgaaagacaattttgtgtacattaaacagacacattaagccattttacaag

SEQ ID NO: 61499 - DNA, 1370 bp, Bovine  19866880919556
  misc_feature (1)..(1): n is a, c, g, or t
ncggggtgggtcgtgtgacccagacctgccccatgcagtgagcaaactatcccccttcccatgagctgaaacggacaggaccaggggcagtgacccagctctgactctgcagatgacaaccccacccccaggaaatgatagagggacacgagacaaaagggacttggctccctgatggtccccagaacagagctgcctccaagggactacctaccaacccagacttttatgtggcagagaagcttcttatcatgcttcagccattgttatttggtctcagttacagcactcaaaccaatatcctagttgatacatgtagttaagtctccccttccacaaaatgaataaaaaatgctcacagaaagagatagcctaaaaccagcatgcagatatcttcctgacacctcccaggtaccaatcactgtgctggcaactcagaaacacttttaaaaacttttaaaagaatagcacagacccagggcaaagaacttcctccaagaggagataataacatccccccttttaaagctttgaccatgacaggtaagctaggcatcctctccaaccccctttctccagtcttggtccctggcagcttcctctcaactagcatcattgctggttatgaggattcaaagtatatcccatggacagaggagagtggcgggctacagtccgtagggtcacaaagagtcggacacgactataaagtgtatccttttattgctcataaagcctggaaaatacgtatgtccaacaaaaaacgacagaccataaatattctgtaagtccctcttcactcagtcttgcgtttctgttgaaagcatccctgttgactcacactgacccccttttatcctttgtaacatcctaaaacgtgaatgcgctgcacctaccatttctctgtgtatggacattaagaccatgtcttcagctcaacagaatcgtcttctcccgtagtgactattaacattccacactgaggggcaccaatttagaagttttctgatcctctcagaataatctgctttgtcagaagtcctcataataacagaaccacagggctccaaagcctctcacaagcacaatatccaaccagagtcagaggcccagagaaaataaactccctgggaagggtaaataaaccaacatataatctggaagcaacctaatggaggtatgtagactccttttaaaactggtacggatattaaaatcaaaagcataaaagtaattatgtacctaatattcagataatataacaggaggtaatcagtgtcatccataacataaaggggtggaggggaacacagagatgtagcttttatataagattgaagctatcatcagtttaaaatgaattgctataa

SEQ ID NO: 61500 - DNA, 845 bp, Bovine  19866881012402
  misc_feature (1)..(1): n is a, c, g, or t
nagcatgtttttttttaagtcaaaaagaaacaggtgaaattaattttaataagagtttatttagcctagattaggttctggtgagactgtcctaaatactaccctttcaagatacaatcaatataaaaattattattatcaataatattttggagtcttcctttcatgttaaaattttgtactcaatttgtactcaaagcatatctcgatttggactggccacatttcaaatgctcactagccacctagggttagtggttcccatgttggacagccatatccagttcttctggtccatgcacactcagccagaccaaggccatcccaggggagaacaacaagccatctgtttacctacgcacatcacccaccacctctctagggcagtctgtgattcactgccagaccctacatggtgtctgactctattagtcctagatcagcatctctaagctcccttacccccaattgccatcatcatgatgacgtcagcacaagatctaggccctgaaggagagcatttcctggtggggcaaactttgtgcctctggtcaattcacctgtgggttcgtgtccaaactgtgagggtgacctcagcagtgcaggtggagacagcacctacgtagccacttgagcacccccgggctaagccagtaataaacaaacacaggcctgcctggaaagaaggaagtgtgcgagcagaattgaggcaagcgatggttgccatggaaaccagccagcctcactccagactttcccctgatgtcttgatcattattccgtggctgatgaagcccagtagatacgaagcactgtccctgtacccacggaaaccttccaaaggt

SEQ ID NO: 61501 - DNA, 1175 bp, Bovine  19866881079984
  misc_feature (1)..(1): n is a, c, g, or t
natgtaagactggaacaggagggagaacggaacacaagggagagtctgcggttaccagcatggctttcctatggcttttggagtccagggaaagatttagtatgggttattaaaggagtattgacttggatgtgctgagcagttggaacgtttttgtttcctagacaagaaagcacactcagctttgtatgactggactttaaattgctcagtgaagcatcacttggtgttggcctgagtctgtaaagacccgcaatttgggaagaacaactgttgtagtattctcatgttccagggatggttgtggagaatagcaagttctatcagtcaatgaaagcacattttctccggatatccctactctgccttctttgactcagggtcctgtaaacattcctgtggggaatgggagtacatacccaagggtagtcagtacatgaatgtgaccaagatttgagtccgtggggatggagacaggtacaactgtgcagccatgggggtgagggatgagggcagagccaaggcagaaagggagtgcctccctcattcattgatccagccagcactgactgagcacccactgtgtgccaagtgttggcacattcattgatccagccagcattgactgagtgcccactgtgtgccgagtgttgttccaggcatggacataaagcttgatggaagagaatgatgactggtgatggatgtgtcaagcaggaccactcatcacccctcatagagtcagccatgggggctgcaagacagaggggagggctcgcttccttgggagttgaagacctgtgttgtatgataatgcttccttaataactctactctcagagccaatttagttggaaaagcactttactttcttccttcgttccctcccgtcctagcctctagcaactggtatttattttgcctctgttccccagcctgaagggtggacacaggcatgaaacctataacttcatctctttggattcagtttctgaacagagagagaagggggtcttccagatccatagtcagccacgttcttctccggggaggcgcatccccctgaagccttggtttttctttctgaacgaactaagtccatgatttcagatcagggcagtatcacctggtaatggggagccaggaaacctatgcggagaataggtacagttcta

SEQ ID NO: 61502 - DNA, 831 bp, Bovine  19866881139627
  misc_feature (1)..(1): n is a, c, g, or t
ntactgaaggcgctgggtccctagcaggtaggggcttatctgctttccatggccttcacacatgtgccaagttcatgtcaggttgctaagaaatggtttgggtcttactggcatgtggtggacaccagggtttaagtggcctgtctggtgtattgggggtgttgggacctggtggaggaggaggtggtaccttggtgggagttggaggctggctgggctcacagtgttgggggcatttcagcacactccacagccggctcctgagcgaccagacccagctgaaggatgacgtggatatgctgaggcgggagaatggacagctgctgcgggaacgcaacctgctccagcagtcatgggaggacatgaagcggctccatgaggaggaccagaaggaaattggcgacctccgggcccagcagcagcaggtacaaccgggctgggcggcgggagcagaccaaggtcaggcatccacctgctcacagtctgttaccagcccccctccacctactcatctgcccacctacccacctacttgtcttacccacccacccactcaccatccatccattcatctacctacccacccacctatcacccgccatctatctatgcgtctgtccacttaccacctacttatccaccacccacgcatccgtgtgattacttagcaagtatttctggtgtctgctttttgtgaggaattgggctatctgtgagcaaacactcaacccttgtggtcctggactctgcagtctgatggaggatacacatgttaatcaaataaccacacgcactctgcatcattatgaatgttgccagggctaacaaggg

SEQ ID NO: 61503 - DNA, 1565 bp, Bovine  19866881207226
  misc_feature (1)..(1): n is a, c, g, or t
nttggactctctcatcaaggctacaattgctggtggtggtatgtaaatattaacttataaatttctctagagaaaagaatttgcttttaaatttccctctagtaattttcagtctaaaagaggacacagtatattttcattgatctgtagtatggttgcatcatgaaatttgatttctctatgtatttctgaatttttactctgcacttagcctcacattgaaagacatcttcaaagttgaacattaaacttggttttaaagtgctgtgttattttatccctcttctaggtgtcattccacacatccacaaatctctgattggaaagaaaggacaacagaagactgtctaaaggatgcctggattccttattatctcaggactctaaatactctaacagctgtccagtgttggtgattccagtggactgtatctctgtgaaaaacacaattttgcctttttgtaattctatttgagaaagttggaagtttaattagctttccaaccaaccaaatttctgcatttgagtcttaaccatatttaagtgttactgtggcttcaaagaagctattgattctgaagtagtgggttttgattgagttgactgtttttaaaaaactgtttggattttaattgtgatgcagaagttatagtaacaaacatttggttttgtacagacattatttccactctggtggataagctcaataaaggtcatatcccaaactagttgtgtataaaatttgcttgattatagtaggaacagctttgttgaataggtatcttacctagcaataacttaagcacatttcttccctttaaattactgttaattctgtctgtagatcaacaaagttaaaaggcccgagtatttttttttaaatactgtgtaatgaactattaaaagattttaaaacttcagcacaagttgatgttttttaggctcagtttaaccatctcagttcattagctttgattgctgtttgtgatagcggcactacaccagagcactggggggcttgggtggggttgggagcagagaccagttaggaaggtcctgtatgtagctacctacacagaagggacttttcagtttagactgataattgtagtgtgctacacgctgttttgaaggttacttgcgttaaattgttcagtatatggtaacatctttggggaacatactattcacatttaacagagaagaatcaagatttctttgaaagtcctgagttactatatttgctgctatagcagacaatatctttactgaacaatgtgtgaaaatagttactttgtaattaggttaagtggatcattttgacacttagtttctggcaagttcttaataccaagcaaaaagtgggccctttgcctccactgaggataccaacctggcaagtatttcacaaaggtgatgattaaaatgggagaagggagaaaacccaagtttacctatatgaggtaatacattgccaaagaactgattcctgtcctttctggtcatggctactagtgtttttattttcaccagaataagtgcaaactacaaattaagtgtttgta

SEQ ID NO: 61504 - DNA, 990 bp, Bovine  19866881260969
  misc_feature (1)..(1): n is a, c, g, or t
ncctttctttcccccttccgccccctcttagctcaagttgattctgccacagtccctgagttaagcaaatagtttgttctctggcaacttgtcctctatggggctgggctctgaagaggatccaagggtatcccttgtggtggtgcttccttgggggaacccaccgtagatttggggctgagtgagagacagacatgggtgctctttcctccgcttatgcggtgagatggggagggccggggatttgggccccaggacctgggcgcagctcttgccttccccgctgatgcgctgtgtggtcctgggcaagttgctttctctaaaccttagcttccttggttgtaagatgaagaccatggagaaagttctacccagcatgtgacaactagtcaggtgctagtggccaccacgtttagtgtggatccaggtggaatggtgtcatttagccgaagcggatacattcaagcccaccgtcaagtcaccctacacaaagtgctgagttaggtccaggatggagaccagccctggagaattacacattgcttcacttgtccggctctctggctagattgtaagctcctaactctcgatcactcaggatttggcaggtgctgggctgtgaacttcacttccctctgtatccccagaaccaagcacgaaacctgatacaaagtgggcacttggtggaatttggcgaatgaatgaacacaggggcattcaatagactcttgctgatgaattgactaatagtccccactggttacatttatattttgggcactgaatctctttgttgtctgcggcttcttgagcactgagggtatttaattatcccttgaagctgaggttgaacctttcaggacaccttcaccaggacgagacccggcgcgcgtccaggccccaggcggcggcagcatgtgggtgcaaaggaagcctctccccaccctgctttccggtggcttggcctggggtcctgaagtgtctcacgcc

SEQ ID NO: 61505 - DNA, 1410 bp, Bovine  19866881328738
  misc_feature (1)..(1): n is a, c, g, or t
nttttcataaaaaaaaattctgtgtagtccttgacactgtagttaattttgaagggtattatggttagagttttatttaagagactctgtttttgcagctccatatgattaaggtatgaagaaactgttttatgtattttgattttactgtttctgacaacatcttcccgaggaagtatacttttgtgcaacagactgcctcggatgctaattctaaatttagaagccgccttcaatgggtgctgaaatcagtcacacaaaatccaggtgcttacttagaaatctgaatactcgggaggctggccaggtctctggtggagatttgggcagttgacctcttttaggaccccaggactgttaggatgtggcattatcagctgtggactaggctctagacaaccacatcaacacgtattaattttgcagggacaatggacacaccctcaaaaccccaatccgggcccttggattttcatttcatttctgtcacttattggccgtgtgaccttgactgtgatgattcacgtggcagctttggtttcctcatcagtaaaatgagcgcgctgaattgcatatgctctagggtcctttccagacctccaaccctgtataaaacaaattcaaagattcaagtaagagcattagctcttttttacctgggctgtttgtagtggtcaaaaatgataacatttattattatcattgttgtctgtactgtaccgcatgtgggatcttagttgtctgactaggaactgaacctgggccccctacattggaagtgcagagtcttaatcactggacccctgggaagtgcgatagcattttaaaaaatgcccctgctggttaaaatagccatttccctaagctctgtgaatgccttcctccctctggctccttccctgatagcatctggacctccccacaaggcagctcctaaaggcacaaggcttggcactgcagagggtcttcagtccaggcgcctgaccacctggtggagggagcaagtcacatagccttgcttacctcaatccattgcctgcaacatggggattataactgtcatttagtcgcacggtcatgtcttgactctttgtgaccccatggattgtagccccttgggctcctctgtgcatggaattttccaggcaagaatactggaatggtttcccatttccttctccaggggatcttcctgacctggggatgggaaccctcatttcctgcattggcaggtagattctttaccactgaaccaccagggaaggcctggggattatgatagcatttactttattgagctgagggtgagattgaataatatattaatatatgaaatgcttaaaataggataaacgtaaaagacgcttgctccttggaagaaaaactatgaccaacctagatagcatattg

SEQ ID NO: 61506 - DNA, 2458 bp, Bovine  19866881336723
  misc_feature (1)..(1): n is a, c, g, or t
nagtcagtcctaaggagacagtgcgtgatgtgaataaaaatggacacatacagaccttggcgtagcctaaaacagagaaaaactgaagctaactcaggaccaaccatagggagacggttacacaggttagccatctgttcaagtagattgccatgcatctacttgaaaaatgaatatgcatcacttaaaagcatattttcaaagaactatcaatgagatgggaaaggatctctctatgcgtctaaattcatagagaaaagactgatatgaaacacatccaaatattagcagcaatcgcctctgggatataatagttcctttcatctttatgctttaaaaattgtgatcaaatacaaataccataaaatgtaccattttaaagatctttaagcggacagtcttctggcattaagtatatccacactgttgtgccaacaccagcactaaccatctcaagaactttttcatcttccccgactgacaagctggacccattaaacaactctattaattcttccccaccccatcctcactccagtcaactacctttctacctcttctctctatgaatgtgaaaactctagatatttcatataagtagaatcacacaaatgtcagtgcttttgtaactggcttattatacctggcatcatatcttcaaggttcatccatgttacagcatgtgtcaaaacctttttcttttaaagctaatattttgttaatccattcttctatcaacagacacttccacttttcagctatggtgaataaagctgctgtgaacataggcatacaagttatctgtttcagtcttggtctgcatttctttggggtatacaccgaatagtggaattgcgggatcatatggtcattttatgcttcattttttaagcaaccgccaccgcagctgcaccactttccattcccaccagcaatgcacagagtttccaatttctctacatcctcaactcacggtttttaatttttttttttaaagaaaagtcatcttaattgggaatgcatttttatggtttttttgtattttcagagttttctaccaggagcatgtgttatatttaagacagaaaaataattaatgctgtttttttttaaactgtgctgaagaatggctcatcaaatgctgcccaccccatctattatcaatgctgcagggctcaaagcctcctccagcctcctccttcacagcgtcaactcacagccatcacttgaggttctggttttctgctctgaaagtggctcctgccttcaccctctgcgagcttcatgaggtcatacagataaagaaagggatacgatttggggtccacacagtcttggagtgaaatcccaacttcactacctaccagctatcagacaagcaattacacctctctgtgcttcattttcctcattaggtaactgagacagatggggtcaatgccttaaggctgtagggccttgcactctgcctgccacagaggaggtgtttgattaaaaaaaaaaaaaaatgatcccccttcatttctggaatcattcgtagcttctaccgcaggaaggaacacagcatacctacgagtaaacaccacttaattgactgatggaaactcatcagtgtgaagatttcaattcaaacacttatagctcccccagaagcctccagagagtgcaatgtttaacaaacatcagtcctgggatttgcttgcacaaaaaggattccacagtgaaataagtgtggggaacataaacattagtatctccaaaaagagcaaaagagcaatcaacagttttgttgttgtttagtcactaagtcatgtctgactcttttgtgaccccatggaccatagcccaccaggcccctctgtccatgggatttcccaggcaagaatactagagtgggttgccatttccttctccagaggatcttcccaatccaggaatcaaacctgcatctcctgcactggcagacggattctttaccactgagctgcctgggaagcccagtcaacagttaaaggtctgcaataaggaaacccacggttctcaaacatagtgactacagacatctggcctaacatccgctaacatcacatagaactaactttggaagatgatgctctggtcctccttccacctgaaacatccagccttggatttccaaaagcaaactccggctagtatgttgggatcaatgtggactggtggtctccaaactgagaaagcataagactcacttggaggatttgttgaaacacagagggctggatagattccagcctcagattctgactcagcagacccagggtcaggtctgagaatttgcatttctaatacattctcaactgatgctgatctgctcctccagggaccccattttgagaaacactgacaggttaaaaaaaaaaaaaaaaaagcctcatatacaagttaaacagcagacatagatgaaactgtctactct

SEQ ID NO: 61507 - DNA, 666 bp, Bovine  19866881701350
  misc_feature (1)..(1): n is a, c, g, or t
ntctcctgcatggtaggctgattctttatagtctgagcctggggaagcccttgtgtgtgcacaggtggccaaaaatgcaagctgtcacatacagaacacccacaggccgatacagctcttttactataggtgtttagagcatggaactctgtgtggctggattaggagaggtggggtgaagtgttccaagttgagggtgtccgtttgggcaaacgtaaggggaggtaggaaagcagagagccagaagggtgccaggagcagttgtgtgggaatgctgggtgtgggaagctaggttggggactttggctgtgaattatgacctgtgagctgtggggaggctctgaggggtgccatgctcgtgggggatcatttcagactctgctggcccattagcagttgagctgtcgtggatgggggcgacttctcattcattcaaatctgcgcccatttctgatgaacagagcggtattcacagagggagggaccagcagggcatgtgggatgctcgcccagtccctccatctgctatcccaagaggctggcccccaggccctggacgtgtccaaggctataagcttattgcctttcagctgctgtttgtgtcacacatgcctgtcccacaaggggcattaaaaatatcccagtggctaatagcatttctcaaaa

SEQ ID NO: 61508 - DNA, 778 bp, Bovine  19866881947151
  misc_feature (1)..(1): n is a, c, g, or t
ngaagcacacagacaacctcaaggatgtggaaacagacctggatagttgaaccaagcctgactcttaccactaaatcattgtgttcctttatagggcatctccctggtaatgaatccgcctgaaatgcaggagatccaggttcgatccccaggtcagaaagatccactggagaagaggacaacaacccactccagaattcttgcctggagaattccacagacagaggagcctggagggctacagtccatggggttgcaaagagtcagacatgactgaacgactaacattttcgtttttcatagggcacccactgtatgtgcctaccaacccccattcagtcctccagcgaccatgaagatggtgtcaccatcctctgtgcaggtgagcccggagaggttaaggatcttgcccaaggccgttacttgcagtgtccagtggtcagttcatcaatctagtcctagaaaccacaccaaacgtttcccctaatgagtgcccgtaactccacaaagaaatccagcccagcctggataatccatcagagccaaggaagaaaactcctctgtcaaaatgaaagatgctaatagcaagggtgtttagcagcaagcattcaaatttccattaaaaaactccctgtacaaagatgaagctgaaaaaaatcatactgaatctgcctcttagaagccagtacctcccggaatcaggacatctactaaagagccctcctgctttcccaccgacctgccatccccaccctgacttattaaggaatcatgaggg

SEQ ID NO: 61509 - DNA, 995 bp, Bovine  19866880357435
  misc_feature (1)..(1): n is a, c, g, or t
ncggatgcgcgaaagccgcagcgaggacgtgatgcgcatcaccgtgggcgtggacggctccgtgtacaagctgcaccctaggtgagcccgcgcggccttctgccggtccaaccctggtccagcctgccccttgtgagtttgcatccttaggggagaacccgggcgttggtctccatctatgatactcagagagggaagctctccgaggtcccgagaactcttaaactctccgaactcccttggcccccagacacaggaggagggttcccttgttttaccccctgccgtgcattcagcgcggtaccggcagccaagcttcccctctacgcagcttcaaggagcggttccacgccatcgtgcgcaggctgacgcccagctgtgaaatcaccttcattgagtcggaggagggcagcggccggggcgcggccttgatctccgcggtggcctgtaagaaggcctgcatgctgggccagtaagaagaaaggctgcaaggcaggaaggaagctgtggccggctactggacctgggctccaggggacactctccttacaagtccccccaacctggcccaatcgagaggcttctccttctgaggaccttggatgcctcccatcccagctgtcacctccagaagatgggggaaagcctctggagaggttgccgagggcccaggcaggctttttctctcagggtcagttggtgagatagccctagggccctgactgggtcgggagcagaaatgaacaggaatgcagaaccctcaaagtacctcgccttttttgctggaatcaaggacccagaagggagttattcactcaggattttgttgcatttctgcactgcttgtctcttggagctttcagcctggctcaaccctggctctgagaagggggtgccctctggaccctactatggcctggcttccccatgagctcagcctgcatggggaggcagccctcatcaccggccagacctagaccggattccacaggggc

SEQ ID NO: 61510 - DNA, 865 bp, Bovine  19866880368288
  misc_feature (1)..(1): n is a, c, g, or t
ncttcctatgccagcggtcacctgctgcaacgggggaagtccctgctcatctgtccataggccctctttttaaagactaatcttggcatctctcattatttccggttcacagaggggcacacgtgtctgagctgaagaaagaaacgagccagcttatgaagagattgtcagtttgcttttccccagaactgtttaaaaacaagcccattatctgcgggccggccccatctgccgcatggtcgggggaggggcggtccttacagctgctggccggggttcagggagttctcatccaccacacggtcgtactccagcaggaactcgtccagctcgcctgagtccccgaaggcgccccactcggtgttgacacacatgcggccctcgtccccttccaccagctccacgttctgcatctcctccatgtagcaagcgttgcagcccgtgcctatgggaagtggcatcgtcggatcccacctgggatgccagctgtcctgggtgcatcgcccctgcaggaagccctgtgtggccctgtcttcccagcttctttgagccctcaaccctcaccactccctccatctccctgcagcaaaggaaaaccagctctcccaggagctggaaggtctgggtttgctgtgtgacctcaggtagataaacccacctccctgggtggttcttcttccccaaaaggggttggtaacacctactccccctgttacctggagttgagagaagtgagggaaagaatatatgttaaagtgctttgccaattacagatgggtgtggaatgttatgattttgtcttgtctgtgcatccctcttgttttctggcactttctaaacatttatttgaactctggctcagctt

SEQ ID NO: 61511 - DNA, 1096 bp, Bovine  19866880786782
  misc_feature (1)..(1): n is a, c, g, or t
nacctcaggtctgagtccctctcctctgtctgggtgaagggcagagagagcaagttcttgtctatactcagtgtctcgccaccagttttctaccaagcttcgttacacaacttacactgactcaggtagccttgcgaaaggaaaagggtgttcctcgaggaaacgcgcttcatctcaacatgaactaccatatccctggaagaaagaagcgtactgactacagtagggtactgcaagctagtctgcccattaagggtgttgcccccaaagagttcacagggaggatgggtactctgggtactaagcatggagggatcctgagtatttgggcactgagcgcgcatgcagcagagaaacctgtccattaagagtgtcaccctgaagagcacagagaatagaaacgatgagtgctgagtacagtaaaggtactgaggatagtggaggtactaagtgctggagggtaattcactcagggttcacccccgaagagcgcagggaggatgggtatgggggtactgaatacacaggatactgtgggctaagccgctcctcaagggcgtcaccccaaggaacacaggaaggatgagtacgacagaggagtactgcaagacagaggggtactgcacagtaatctgttcctcaaagggtcgtcccaggggcgaagggtcagtccggacagaagccgaccagcgtcttcgcgctctgggaaaaacgaatgcccacaattcacagctggttcttcaagggcgcgccacccttccagccgtccaggctgggagaggacacagcctgacgactcccacgtgacgcctcctcgaccttgggggtcacccctgccgctgcgcccgttccctcacatccgccgcgcagcccacccctctgcccatcacagccaatggcttgccgctccgcgccccgcgcgacctctgcgctcgcccgcacccgccaatctccgcccgccaggaggcgccccctgcaccattggctgccacgtccgtctgtcaggctccgtcccacccacctacccccgtcagccccgctccagccagctccactccctgtcaccggggcggcggcgacgacgagggtgcggcgg

SEQ ID NO: 61512 - DNA, 1306 bp, Bovine  19866880911809
  misc_feature (1)..(1): n is a, c, g, or t
ntgtgatgtggcgagcaggtgagttatccaggcaggacacattggacagcgaagccaggcttccggacagctccgggttcttcccgcactcatcgtagaaggcacagtagccaggttggtgtatgggtgtgtagacctcactctgggcctgtggaacagggcagtgtcaccacgggccccagcgctggccagcacctctgggtagctgatggggcagtgggcagccagggagggcgtggggaatgatgccaaacagggcaggtgaggggtggatgtcgggcagctccaggatgccagggggtccaggggagcactggaggagatgggatgcccaagtagcacatgggactctcggcggtgtctaaggattgtgagcggatgggtgaaggcctggttgaccctgagtgacagggtcactgaagaaagaggtgacctgacatatctgggagagaacagggtcacccagaagacccctggacccctgtgtggtcctcctgagaaaaagtggcccctggacaagtcgagggactgactcccaggagccatgtggatgcaggccctgtgtgcctcgggcatcattgccatagcagtcagccaccaccatgaccaaactgcagaccacacccagaggccgggacccctcttggagaatctgagcagagcttcccctgccttcatctgccgggagctgaaaaccttcacccacctcctcagacgtggaaatgagcaggaaacttgagaggtaagaacctcggacctcctccctggatgccaaatcctctgtgggtgattctccccttgaatccacctcatcagcaccccaggactggatcttcctttaacctcccacgagccaccttaggccaggacacccacagcagaccagggatgggaagaacttggtcacacccaagccacctgtcccattccccatgcttgtgtccatctgaccccatcatctggagacttgagcagcctaagactcccaacctgcacctcttatctagggtgcctggcatccctcatctatgtagaaattgcccccatctgcagacccctggccctctctcacatttgccaagcagcccttgcccagagaggacacagggattgggactcaccgagtgcaggagcagggcccagagcaaccagcccttcaggccagtctccaccatcctggcactgggcaggggtcagagggtaagtgaggccaggccttggggacagccaagggccggctcctgacaatgccagagcccacttcagccgtacatatactgaaactgggggacggactacagggcag

SEQ ID NO: 61513 - DNA, 915 bp, Bovine  19866880998503
  misc_feature (1)..(1): n is a, c, g, or t
ngagagacacggcacatcacagcccacgtgaccgagaggcagagcacctcaacctacaagatgtgtacccggcctgggccccacgaggcccacgctgaccccagaacctggtcctgggaggactcacttggcgcagtagaggaagtggtccctccagtccacctgggcggtctgccctgacagcgtctggttggctgtgagcagcagctgagtgcggttgttctggaagtactgcaggaggctgttgacgcagcagtcggacagactggcgttatgtgggttgaggggggcgtagcaggtgtcccgcagggagacgttccgctgctcctctggcgaccacacctgcagatgccgcagcctctcctgcaattccagcacctccagcagcagatccgaggacaagatcccgctgaagttcttgggccccagcagcagggagtcatacctatagctgggccggtgaggtgctgtcatgaacacctggctggttcggaagaaggggccgaaatacttgtcgtggaacgccttctcacgtcgggctaggctgttgggggctgaccacaactccacggggtccgtggtcagttctataaaagccaggccccctgccagggccaccaccacaatcacagataccgccaggatggtcagtggccatgaggccacccaagtgccccagcactggaagcagcggctgaggagggtgtgggtggagaggctaagcctgtgggccaggttgatgcttgccttgggcttgggcgtcttgcgcttgcccctgcaccactcggccaggcgggaccgcaggaggaaggccgtgagcaagacaaagagagaacagaggatgataatgaggaccaggctcccttccatcctgcccaggcggaaggtggggtccagggcccggggctgggcaat

SEQ ID NO: 61514 - DNA, 1265 bp, Bovine  19866881052769
  misc_feature (1)..(1): n is a, c, g, or t
ncctgcgcttccacagccgaggggcacccacgcccgcccgagcgcacggagaacagcaagcagagagcacaggagcagagcagcgagtgcagggagggagggagcggcgagcggcgcctgcagggcccagagctgtgcccgctgggacagcccctgctccccacacccctcggcaaggccgcacagccccgccctgctctcaaacagtcaggagacgcagggccaggggtggaggccggttcacccttgagagaaaggatggcagaggtgaactagtacagcgagtccccggcaggagggagctgaggggcgcggccgaggccccgcttccctgccggcgagggcgtcctctcctccggtcattaaaactgcacagcccccggggagatgttgaacatggcggggtcgaatcgctggcctcggaagggagagccttcagcgtcccaccccttcttcagcatctcatggactttctacaaacagaaaacagagaggttacttgtagtcaccaggcctgcacgtcccagagcagagctctgctctgcttcctctggaaaaggacctgcctgggctgacagcagaccctctgcaagcccctgctccccacattcgggttccaccccatcctgtccccagagcaacaccggccaccttcctggtttggatgctgtccctgctcaccaggagtatctgtccaagctccagagggcctgagggccacagcccacagagccgactgagctctagagagggtctctactcccctttcatagggacaaggtgggtagtctccaggcctgtgctctcagatagtctaggaatgtgactcaaaggaagagacctcaggatgtctgactgtgtacccaccaatcaccgatcccacagcccctgggggcaggggccaaagctgttatcaaaggtgggctcaatcatcccagtctggaccaccagcctttggggtggcagcaggaagctgctccctgtcccctcccacatctgccctccatgtcctccctgcaaacacactgggctggaaaccctctccccttccttctgaccaggagaaatgaagagacgcacggccacagggccagaaagccctgcccacctcttaacctccaggccgacagagtgagctgaggggaaagctcctggtgtctgacaagactgcagggctcctgacggggcctcctctgccccgttactccacctaagtggtgcagcagcgaacacgtcagacacgcagtacatactgcgctcggctc

SEQ ID NO: 61515 - DNA, 494 bp, Bovine  19866881029850
  misc_feature (1)..(1): n is a, c, g, or t
nattgaaccctggtctcctgcattgcaggtagattctataccactgagcaacctggatgggtaggggctgactctccagtttcctaacggttgatcttctagggtcaccttatttctctgcatacccaaattccatgtataagctgagagactcttgcatctggagaactcattcattcattctctctacaaacaagttgcacacctcctctgtgcccagcatgagccaggttctggcatccggatatgacctcatctctagccttaaagagttaacaattcagaggaagggacagacacatttatagttactacctcatgtgatccaagctgtgacagagagattgtggaagcccagaggaggccctggactggcccgagaatcagggaaggcttcctggatgaagggtatattcaggatgggtcctgaattactcagcggggaagggggatggaatgtacgccaacattccatgaagagatcactcatgaaa

SEQ ID NO: 61516 - DNA, 1786 bp, Bovine  19866881064982
  misc_feature (1)..(1): n is a, c, g, or t
ncaatttcttctgaggaaaatctgttgactatgaattctcttagtattctttatactaagaatatcttaaaatccttcagaagatgatgtatttgttggatatagaattctggttctgacaattctttttttctccatattttaagaataatgatcaacttacttctggttttctgatgagaaatcccacaatcattcaaattcttattccactataagcaacacatgtttctctctagttgctttcatgactttttttcatttttagcaatgtgattatgtatgagcatggacttctttgggtttatcctgtttaagatttgctgagcttttaaaatctgtaagtttctgtcttttgccaaatctggaaagtttttagccattattttcttcaaataatttttctgtcctacactctttctcttctccttttaagactctcatggtcccagtgttagatcttttataattgtcccaggttcctgggacaaaaatattttttctctctgttgttcagatagaataatttctattgatctatttcaagtacttaatatttcctctgttttctctattctgctatggattcatccagtgaagttattttgattattgtatttttcatttctaaaattcccatttggttattctttgtatcttgtttccgagctgagatcttttatcattccatttgtttcaagactatttgcccttacttctctgagcatttttctaacagctgctttatctgtcagctaattattccaacatttgtgtcatcttggaatacttgattctttgcagtcccaaaaatttttaatattttgttatgcggtttcaggagaatcctgatattgttgtcttagcagacaaccaacccagctgggtctgggattcaagctcaggtttcaatgtcagttctgtttgcaaagcctttgtagcgctatctagttctgtaccacatatgtgctatccagtggtcagtctgagacctggcagtgggcgatactacagttctgttcccaaagtttttggtgtgctatttagaatcacatccacttatgtacattgtgcagataaggcctggagtccacaaactttacagagttgctttctgcactcctttctatgatctatcaccttggtggagaaggaaatggcaacccactccaatattcttgcttggagaattccatggacagaggagtccatggggtcacaaagagtcggacacgaatgagcaactaacgtatctccttggtaccttctgggtcctggggcttttccttttggtcctctggccagaaagctggggcactgcttaccttgctctgccatgtacctcccctgacagtgcctacgtccacacgctgtatcaagtggagggagaacaataaaagcagcagtggttcacttcatactcttcaaacaagtcttcttggaaaggaagagtcttttccctcagttttaagtgttttgggactgtcacatgttgggaattttcggagaaaaggaagaaaatacataggagattttcttcccaccctctctaagcactagaccccattctcagtactttagccagaatggaggactctcctggagtgctctctttccataccaagatccaattgttcgttttgggcttccttgagttcataccagaggccagtttattgatatttcagcctttggtcttctctcccaatgtacctgctatttttcagcatcctcaattaactgctccatgcattctgtatagctgcaatcaatgggaaagtcagga

SEQ ID NO: 61517 - DNA, 1294 bp, Bovine  19866881180297
  misc_feature (1)..(1): n is a, c, g, or t
nttattttctgcatgaggaaactgagattcagagagaaaaactgattgtccaaggtggcccagcaggttagtagcaaagcaggcttgaatcccagctggtctgacatgatgctgagaagatgtctcctgagctctgttggtcttcccttctcagagcctcaatttccccatctgaagaggagctggtttagaagagctttaagctgcttctaagttctcaaacacatgccacacagaatcaagaagaagaaaacgtctggtccctcttccatccccagttgctcagtgaggaggtcgggcacggctgcaccttacacggccacagtttggtgagggggctactggtgcccctccccatggttgttgatctgttgcatctggaacacatgcgtgtccggggcagcatcttctgcgagaggctttgtgactctgtttacctgtcaggtgcaatggagatagccttggatcttagtcccaccccaccccccactccttttgggagagtggattcccccaacctacctcctacccacagccttggtttcgccattggcactaaggtggaggtaggaggtagcagaaagcttcctgtaacctattctgcaaggtggtcataggagtcttggccaaacagctttgagcattgctggcttcagcagatttcttgatggcgggacttatcagagcattcgtggtgaagaggcagaggacagagaataggacctttcccaaaccagttacagattagcgaccatttttcataagacaactgcttggaaacttccacacaagatccccgagggtcttcccagctttgacattctggtctaactttggcaagagaatgtgtcctgaaggcacgtagatattagcaatgcctcttttctcctttcctctcccctccttcccagccccgcttccttctttaattccttcctttcttctttccttcctctctctctttcccttgctcattcaataagcattacagggcagaccctgcgccaggctctgtgttgggaagtctgggagtgtcaaggtaaatggacctggggcccttgaggagtagctagtgtggagggatgcccttccctggtcctctcccacctcccttccagcgtttgacctgctctgcaaggtcaagaggaacgttctctgggcccagcagccgccgaggctgagctgtcaccctcagggcctggctcccacagacccgtgcttcgtcaagctccaacatcacttttttttgatgaaacctaatttttctgtttccaagacaagaaagacgaaaaga

SEQ ID NO: 61518 - DNA, 1233 bp, Bovine  19866880397665
  misc_feature (1)..(1): n is a, c, g, or t
nagacgtgacaggaaatccaggctaggttctcaagagcgagccggtccagagtcccgagagcctcccctttacttacatgtcagcgcggccgcccttacttcagcccaacggaaagtccgataatcaacgctaaaatgcccagcaacacaaccactatcacaatgataattaccaatttctggaaagagggataagagaaataaaaacaagtcatcattacaaaccaccaaaaagccggagtcagccatccaaaacccacctctgcaccggaagcctcttatggccccagagagagtgaaatgaaaagctgacatcgctacataaagacgttccactgggctctcgtgtttaagttgcctctgcactagcagtgccagcaggtgcaaatacggagcctccatcagctccgagctcacgctgcagccctcacgtgtggacagacgtggccacaaccgtcacggggtgtctaagcagcagtaaaccaagatacaacgtgactgagattttccttttcaggggggaatatgaagacatatttgacacagtcctcctaaatgcaaactgccatccatctctccccgaaagaacactcccacctgtcaaacccaggacagtgactgagggtctgaaagtacaggtcctgttgtgaacaggacaggattcatcatgtgaaataacttcccagctccctagacacctgcccaagcaacaggtaaagttgggaaaaaaggaactgaagaatgaaaatatcagagcacaaagtcagaaaagagcaggctaaaaagcaaaccccaccacagctggctactgcagtgactgagcagagatgctccaagaacaagggcaccagaactagaggtgggggcgggcactggagcaggatgaggtgacgggaagagctgggctggaacccgaatttgaatcccaagttcctacgcttcctaggtggccagggacttcagtgattcccagctgtttgatctacaagtagaaagcacaggtgtgccctgagagagagcgttcacatagccatcagcacatagctgggttcacggtggggaaaagagatcaaagaggacaggtgtgggctttcagaatggaaggcagtgcagaggaagtttccgaagggcagaggagccacgtgaaataccggacagaccaatagctctgtccagcggaccagcaggaacactgggcggtgacgggtccaccctgcagagctgcctgccagt

SEQ ID NO: 61519 - DNA, 1343 bp, Bovine  19866880583051
  misc_feature (1)..(1): n is a, c, g, or t
naaactatcggtgtttcactggtgacactgaaaacatggggtctttcccccagtttatggcgaaaatttaggtataacggagatttttgtgttttcccatttttgctttttcttctgtgtgagtttttccaaaaatgttgactttttttttttgctgaggaacaacaaaagcaatgaagggacagcaaaaataataccagcaggaaaactcgagtccctcacggcgctgagcttgacagcctgttttgttctgggccagcttgcccagggacggacggctctgttccctgcctgtggggtcagtgtcacgtatctcgtggctcccgcttcttaggatgcagttaaattcaccgacgtgtaacggtttggagccactctcaccatgagctcgcagtggctctgccacctggaaaggatcagaacctgcttcccgtgtagcaggaatcctaatggagcccgagcgccgcgtggctggttttgacacgtttcctgctctgggcccgggcacctctgctccatccccttccgcccttggaaactgttcctcctgtccctccatctgcgctcttgttttttctccccacactgccttgccgaggaactggtttgagattcaagtgatggtaagtgccgttctctctgcagaaagccaggggttgtatggaatgaaggtctaggtgggtggagggaattcccatcttaagatgcacagaaatcaattggaaagaccgaattccggtcaggaagtggcagctggggagggtcggtaatcttgcgaagagaccatgatctcttaaccagataactcaggtaaaaccaacatcttgttacttacagggcctggggatcccttagagaaagcaagcatccccacctcagctgtttactgagcacccaccgtgcgccaggcactttctgtagtagtgggcactcggttcaggctgaatgaacttggttcagatctgagtgaccaggaagacgccagcctcctggcaacatgagagagatgtattctggcttctcttctcacatgtttcatttttaaaaaaggggcgggggacccttcaggatattccaggcgtctagaccacgtgctcctggcgtgcagacgctgtctcgcatgggagaagtaactgactgaatatttcggggccggtgaccgccgcctcggcctgggaaagcactggcaatccaggggaggtgtgccggggttaccccgcggaaggctgcacggcaggtttcccgggtgtccctgtggcctctgcacgcgagctgggaccgtcctgggggtgtgtgtccagggcgtgacccggagtctgtcctccgcaggggggagatgttag

SEQ ID NO: 61520 - DNA, 914 bp, Bovine  19866880596288
  misc_feature (1)..(1): n is a, c, g, or t
ntccattctgtccattctgaaggagatcagccctgggatttctttggaaggaatgatgctgaagctgaaactccagtactttggccacctcatgagaagagttgactcattggaaaagactgatgctgggaaagattgagggcaggaggagaagggcacgacagaggatgagatggctggatggcatcactggctcgatggacgtgagtctgaatgaactctgggagttggtgatggacagggaggcctggcgtgctgcgactcatggggtcgaaaagagtcggacatgactgagcgactgaactgaactgaactgaactggatatgttaaaactgtatgtctgcctaaactacctcgacatgggagaataaaaatctaggcaataattaaaatagagctaagtctagcagcaattaaaccaatttagaatatcatgtccctaaacaattcctgtttgtgttcaaacattgacctacaggggatggtcaagttaaaaggtgggttagcctcttggggcttggttgaaccaaaattggcaggaagatctccagaaatgagatcagaaagagtgagagtagagaaggaacccagggttctgttcccacaggtcctgaagtcccacgtgattaccctgaggagaagcagcgggaaggattgatggtgtctagatgggagcttctctcgctccggacggtttctcagagaggcagtcttagtggtttccaagccattaggagcaggattctagcttgtgcttcacccagcctcagggaaggccgtggctgccagctctcgagaaagaaggtacagagggtgggggaaggccaggctgactgagttgctgcgtggtctagaccatgcggatgggccaaccaaccctactgacctcgggcttttctcatcctgtgcgggg

SEQ ID NO: 61521 - DNA, 950 bp, Bovine  19866880645195
  misc_feature (1)..(1): n is a, c, g, or t
ncccccaaaccccacaccatcactcaccccagaggtgaagatggcagggttcccactctccagcatctcctccagctcctcgtcggtggtctttttgccagctttataacaaaaggagagcgtcagatacaagatcaaagctcatcatttcaaaagtttcctgaaaacggccgtgttcagtcgctcagttgtgtccaactctttgcaaccctgtggactgtagcccaccaggcttctgcctgtgggactttccaggcaaaaatattggagtgggtttccatttcctcctccagtgggtctccccaacccagggatcgaacccacgcctcctgtgtttcctgcataggcagacaattctttatcactgaaccatctggaaatcccagtgggagcacagtaagtttcactctaaagccgtggcctttataagtctgctcgcctttctccgatgtctcccctaacccaatccagcctcaacgttatcagcaattaccctcctgaagtccacgtctgattatattcctttccagctcggaacgtctcccagcccccttcactctgccatggggtccaaagtcctcaggacaacaggccagttcccaggtgagccctccctccaaccgtcttacccccaccctgctccgcccaagcgcaccctgtccccaggccctggccggcctgccctccctgcctgtgaccgagttcattcagttctcagagcatgttccgcgctgcagggccctgattgctactgattcctaaagttactgactcctaaagttactgattcctaaagggcgaggctgtattaactcctttacacaaacggggcaacctgcaccattctctgctgtcaaacaggcagcaaagatgccatgagccccaggaagcagggctgtgtagcaggtatttccctccaggatgcggaaatgcggttcccaggcaaccaa

SEQ ID NO: 61522 - DNA, 2011 bp, Bovine  19866880276227
  misc_feature (1)..(1): n is a, c, g, or t
ntgaaaggtggaggtgtattcattaactcctcagataaccctgctagcttttctgtcacctcctccccctttcttattctggggttcaagggcctgtcttctatctgcttgccccttgttgatcctaaaagctttagtttgcaaaacccacccaccccctacccccaggaagctcaggaaagacttctctctgggggctggggttgcatgtgactgtttagtttgagcagccttgacactcaggggctgttgtcagtaagtcttaaaggtcgtggtcatcaggctcctggaagcccaaggaccacagaggcatctgagcgcctaaggtgatagataaagagatttttgtatggtctctcaaacctgttgcaacagaacctgggatcccttgacaagccccccaatggtgactgcagccatgaaattaaaagatgcttactccttggaagaaaagttataaccaacctagacagtgtattgaaaagcagagacattactttgtcaacaaaggactatctagtcaatgctatggtttttccagtggtcatgtatggatgtgagagttggactataaagaaagctgagcactgaagaattgatgcttttgaactgtggtgtttgaaaagactcttgagaatcccctggactgcaaggagatccaaccagtccatcctaaaggaaatcgcttctgaatattcattggaaggactgatgctgaagctgaaactccaatactttggccacctgatgcaaagaactgactcatttgaaaagaccctgatgctgggaaggattgaaggcatgaggagaaggggatgaccgaggataagatggttgcatcgcatcaccgactcaatggacatgagtttgagtaaactctgggagttggtggcggacagggaggcctggcatgctgcagtccatgggtttgcaaagagtcagatatgactgagctgaactgattgagaaccaacggcagccaccagttcctattttcactgcaaattgaagcagaaatgcagtggcttaaatcacagaacaggtgtttcagattaaacattaggtgaaatttcttttttcagatgtatttgataaactctggaatggattgtcacaggaaattttgaagcttcttttctggaaactttaagaaagaggatagatattcatctgcctgagacagtggaagcataattccatctggagatgctctgatgcactggcttcaggtgggaatggaagggaagagcgatcacctttctactgaagtctcctggccaagcatttcattccacttttcagagcatttcagcattgctgattttatctgatttcaaaagttatacatgttcattacctaaaattcagagaatgcagaaacatatgaaaaagtaaaactcaaacaaaatcctataattcagaggtaaccaaaaatattttttctggcctatatattctccagacttttttttttttttttgtacatttcgcatagaattttccaaaaaaaaaaaaagtatcgcactgcacacttttgtagtctagcttttgtacttattataatgtggggttctttctatatcactaaatatggcttcatataatttttggtagccaaagacaattccatgatatccatgtagcataacttatttaaccaggtttatactgaggaggtttaggttgttctccctggaaatccctgtacatatgtttttgtgggagttgtccagttatttcctaataataaattcctggaagtgaaattgctgtataagggtatggctgtttagatttttcctacctattgccagattcccctccagaaaggtcagatcaatgtgcatcaccatcagtaatgcttgagtgagtctgttttcccttttcctacacgacattaactactgtccatgttcacaggctgttctcaatgttttaacatacatttctttgagttctagaaacattgaggttctcaaggtttttagtcatttctatttcttttgttagt

SEQ ID NO: 61523 - DNA, 1577 bp, Bovine  19866880350036
  misc_feature (1)..(1): n is a, c, g, or t
ncctccctgccggggcatttgcaattgcagttactgccggaggcgcgacggccgctgtgccacaggcatcctcattcacctggccaagttttacggttataacaacgtgaaggagtacctggagaggtaagcctcgcaaatcagaacggagggtgagagtcctgggagcaggagaggggaagactgtgtaggtgggcccggggtgcctcatctcagcctgactcttagaagccacctcgagtgccggctgtgcgggatctgtgtgtgtcgggaatgtcacaaacagtcatagagcctacaaggcgggcagggaaagctgtgaagaccaaagagctcttctcaccctctgggacagagaggggaggcttgtgcgctgggatgaggagatgggtttagggatgtggggctgaggtgagcctgcctgcagtgaccggagtgaagactgaccttgtgtcgggagagcagtttggctgtggtgccctgggggatgctgctgtgtctgcctctgtgcccctaatgcttcctctttcttctcagcttacaaaagcagctggtggaggacaattaagagacgaaccagcccgctcactgtggagcactccaacaagacatgccatctgtgcctaagatctctttttatacagaaattctttgtagagctaaacgcttatttttttttaaagattgtttttatacgcttcaaaagatttctcaggaagatgagagaggaatctgtatacatatattatacacaggcctgtttgtatgttgagttattaaaagtatctgcagatgattaaaaaccacagtttaaaagagtaaagttccaggtaagtcctggaggaaacgcagcattgcagctctttatctcccagacagtaactggaggccaggtcgttacaggggttacacccccttgagtttatcatgagtgaccgtagttcaaaccccatagtttaagctgctctgggttgttggatgtttatattgaagaatgctcctctaaattacaaagtgcaattaaccatgcaactagagttttgtttttgttaaaacttgaaccaaaagtagactgtcacattactgacactggaggccttggagggtggctgcctggggcccatggcttctgtattttaaaagaatatataaaggcaaatttaatttagagatttttgtttaatatctataaaaactacactcccatgtgggaccaggacactccagccaaattgctttttgagttacagtgggattttgatgaaactgtgagctgcactaatcttgttgcaggatggggcagtagaggggtactggggaaacctattgaaaatatgtccctttcccatgttttttctacatttgcttctttttgtcccccttctctacaaggacagtgtttaaaaaaattaatgcacatttaattttctcaaaagttacataagccagaatatgttatgcctcccagtggggatacgttaccacgcccaggagcaacgacaggcgctgcttgtgttccggccaagccagggggactcaggggccacgtcaggcctccagcagcagagccacgcccg

SEQ ID NO: 61524 - DNA, 1549 bp, Bovine  19866880389490
  misc_feature (1)..(1): n is a, c, g, or t
naaattattttgtttgtgcttaatcagattacatggtacattttggcactgcttctcaaaaaataatggtaaattgtaacattccagggccagaaataggccctttcaagtacaaagcttttcttggctccttggactaaaggttaagttgcgcatattttagagcaccttaaatttcattgcatctgacgtagaaatacaggtgaaacagaactaccaacagtactttagggaatatgagttagtacagaaatgttgaatattcacattaccttacatagatcaaatggctccaataagcgtagtctgtcaaaattcttttcatttgctttcttggtaatttattttcacgggtgagtggtttcgttattgcagtgcattttgttggcgagtgttggaaagtaaaactgaggtagatttttctaactgctcctaagtcaccctatactcatgatttctagacttcagagtttgttttgttttttctttttttataactgaaaaaagaaaaaggcattaagcttagtatttttggaagcatttagaccatttcctttcatttgattatatttacatagtagaactctataaaaaggatctataccaagccaattaccattccaccttgacataacttggggatgttctagaaacctttgtgctttgtagaaataaaatggaaatttttagtgttttatacacttaaagtgatagaaataaattaatttatgcataaaagaaaaatacattcaagtaaaatcaaataaaaatagacaattcttttcttacgcctttaagtttaaaaagtagcagatgatcaggaaaagttctgtattaattaacatcatggctaattatagacataaattttagagctattctttagatttttacagcatattaatatattttatttcaagttacatagttcttaaacctgtaatagtatttgtcttccagttttgattggtattagcatgttgcttttatactgcaaaaagtaattcttgtaattaaaaatccactacaaaattttatattatttgtgggaagagggggtatgcccaaaaggatagttgagtatttttgtcagtgatgagccaagaacttgggattagatttagtgatttgatttaatggatagaatttcaaagacaagtttttttgtatattaatacctagatattcattaagctataaataaatgcatttttttattcagaatgtgagtctgtatggcagctatgaatgtgtttaagtgaaagatgtttttatacacaaaagtgcttttctacctagagtcttaaattaccactaattaagcagtatataatataatatataattatagtgttttaatatggttgccagtggatttgctagtctttctaaatggccattgttggctaatagtcttcaggggatcatttatatagccattgtggttctaaaaatatgtctaaataccaatgggacagcctttttttttttgaagcatggctgttaaaatgcacttctattgaagtgtgtcttttgcattaaatcactc

SEQ ID NO: 61525 - DNA, 2289 bp, Bovine  19866880437033
  misc_feature (1)..(1): n is a, c, g, or t
ncaggtttatctctgtttagaatgaattcaatttctcctctgtatattccaggtacatacatgaaaacaacagcctggtcccttgctgtcattttcttcagaagacctactttatgtttaaggacttaggagaccttcctgctctgagtgttctctagccccacatctctgtattctcatccagatcttcaaatgccaatatgaactcatacgatgttgccaaaatacactcaggcagattttctcatggtttactctgtgtttggcttagatcagggctacaaatgcttcacatccagtgacgggaagaaacatattgtcaaaggtctctgtcttctggttgggcatgatctctgacaccctatttactttcccactccttctgccattctggtccaggctctgctttctccaaggcatcatctcatctgtcccttctctttcacccctacagaaaggcagtgctctaggtatagtgctttgaagtttgcaaacagctttataaatatcatctcatttaattagcatggaaactctgcacagaatgttgttgttgttcagtcactaagttgtgtctgactctttgcaaacccatggcctgcagcatgccaggcttccctgtccttcaccatctcccagagtttgctcaaactcatgtccattgagtcagtgatactatctaaccatcttatcctctgctgcctgcttcttcttttacctccagtctttcccagcatcagggtcttctctaatgaataggctcttcacatcaggtggccaaagtgtttgaattcaacttcagcatcagtccttctaatgaatattcaaggttgattttctttaggattgactggtttgatcttcttgcagtccaaagggactctcaagagtcttccccaacatcacagttgaaaagcatcagttctttggaactcagccttctttatggtccaactctcacattcgtatatgactaatggaaaaaccacaactttgactagatggacctttgtcagcaaagtgatgtctctgctttttaatacaccatctatgcacagaatgcacagatgtgaatagtataaggaaaacacagaagtttctgttaacgtgattttatggattaccatgctaatacttcatgcctgggattctgtaacctgttttgctggctgcccagctttcagggtctccttattataaagcactcacatactgatgctaaaatcatctttcttccctgcttatctgaacatgccacaagctggagtccatttatagcctccaacactcttggggtaatgtatttccctgaaacctttgagactgcatctgctaagacctctgactgactttcctcaacctaggatgactgtgtttggctaggcagagttttgtttatccatttgttcatccatccagcattcattcatgtatgcattttgtaacatagcatctatgatgtgctaggcactgcaatggacagtataggggaatacaaatataagttatctctgccctacaagattttacaacctcatctaggtcttatatgcacaagtggttctagtggtaaagtacctgcatgacattgcaggagatgtgagagacatgggttcaatccctgggctgggacggtcccctggagaagggcatggcaacacactccagtatccttgcctagagaatcacatggacagagaagcctggtggctacagtccatggggtcgcaaagagttggatatgactgtagcaatttagcacgcacacacacaggcatttcaaatacaagactaactgtgataagaaaggtggtgaaaatagactcatagtggtaggtaaactctgaggtttacctgaggaagaattaatcccaatgggcaaagcatgcaagacctgcaggaggggtactgttgaatctgtgccaggacaagtagattccataagcagaatggggagatgggacaagactgattcatggaactaaagagcctcttgatgaaagtgaaagaggagagttgacttaaagctcaacattcagaaaactaagatcatggcatctggtcccatcacttcatggcaaatagatggggaaacagtggaaacagtggctgactttatttttgggggctctaaaattgctgcagatggtgactgctgccatgaaattaaaagacactggctccatggaagaaaagttatgaccaagctagacagcatattaaaaagcagagccattactttgccaacaaaggtccatctagtcaaggctatggtttttccagtagtca

SEQ ID NO: 61526 - DNA, 701 bp, Bovine  19866880441552
  misc_feature (1)..(1): n is a, c, g, or t
ntaatttacacatgggcttattagttcacactactgaatttcattttggaacatataactgcaattgatctcaatctaatctttaatttccatgtattttagttgaagaaaatactactttataaaacagttttctctaaatcccatttaaaatgtttacattaaactaaatataattgagcataaataattttgaatactttccctatgcttatttacattttttcttgattctgactgaattttaaggtttttgaatgacattgaaactgctttggcctttggagacgtcatcttaattgaaaaccttgaggaaacaatagatccagtgcttgatccattgcttggtaggaacacgattaaaaagggaaagtaagtattattgaataataattttattattaaaaataatcttaaagataatttttgatgtgtgttttgcactacacatgagtttgatcatcagcttctatttcatggcctcctaatgaaatgtaatatattgaaatattcttttgtaataattgtatttatttgtttatggctgtgctgagtcttcattgctgggtgggcttttctcattgcagtgagcaggggctgctctctagttggggtgcgcgggcttctcgttgaggtgccttctgtttttgtggagcgtggactctcgggtgtgtgggctccgtaactgcaggtcctgggct

SEQ ID NO: 61527 - DNA, 4085 bp, Bovine  19866880467430
  misc_feature (1)..(1): n is a, c, g, or t
ntatgaatactctcaaaatgagataaaaatccaaaattggataaaaatcttctgatctacctaagtaaatgctattacagaccaatttctcagatgagaaaaaagaggctcagagaggttaactaacatgtgctgggtgaaacagtaaatagtggagtctggatgtaaatccaggcactttgattccagaatccttgctttaaatccctgaatgctaccctctttctactgccagaccatggaaattccttaagtgcagaaatcacgaaaagttcccttttctagctcagtcagcatcgagcagacaaggaatgtctactgaagaatataaatgaatatattcatgaaaggtccaattccttcctgagcggtaggtctcagagacggccctgtctgaaggtgggatcctaagaatgggggcggggttccacctcttaagaccttcttcagtgttggagcccgtactcaccgctagctttttcctgatagcccccaatttctcagcagctgcagccagttctaagtttgcctgggctaatgcttggcgtttgggctccacgtcacagtagacctgaaaagccacgtaagggttatttcacaaggcaatgaagatgcaaagagggcaggtaatcattcggccttctatttgctggaagctttacagttaaaatctctaattcatctagaaatttggtgtttactcttagtcatggtaacacctaatggcagatcaaaattccacatagccttccaaattctctctgcttgtccattactcactgacttgttgtggacattagagtgacaagcactagcataaaatgctacgcaggtcaaataccattaagatactacaattagtttttcgtaaaatttggagacaatcctcatatcaccagaaattgtcgagtacagcaactacagctaaacgtgggatcatgtctagccttaaaggcagaaaattggtgtggagaaaattctctgaacccagaaaggaacatgtgagataccctcacacagtataatgttaaccacactaacacttttttttttctctatgttctggccaccttaaaggttatctgaatgggtggtttgagcatttgagtggatcaaatattctgttgggaagggagaatggaaattaaattttcttttctattttatagcaaaacaacacagaacacagcaatgggtccagtgctgggcttgtctttccacctagggtgtgaggctggcacagtggtcaggcgtgccattatggagcgaggccgcccatcagctgtgatccgtctgcagtcttgcctgatacgggtttccttccgctaaagagagacggacagggtcctattcccatgggtccccagagtgaaggacagaacctagttttctgaaaatcatcctgggaatgacagtggcatttcctcagcaattccacctttgaatataacacacaagatttaaagacagaaatgagtcagctcttcctggcaaagggccatgcatgttccctctcacatccagtgcttggcgaagtgtttggggcatacctgacagacagatacttgataaataaaggattaactgagatgatcatctatctctatctggcccaaaactacaaactttagaaaagatcacacacagtcaaaaacgcattcgtcattaaaatacaaaagtcctccaaaggttatttctcatctcattaagtctacttgtagctggcgtaaatttctgctttgagagcagggatgaaatttaattaaacatgaactcaggatttgcagttgtttcaagccaacaactgaaatatttcaatataaataaatataattattctacccaaatgtttttttctaatcaaatttaattgctgctatttgatctaaagaagttactctaccctaaaaaagcatggcttccaacatttcagataccctcctttagagaattctgattaatctgacaccttcatgtcttattcttagaaatgtatcttattcagataattaaatatcaaattattttacatttcttgctggcctagaaattaatatatatatgacccttcctgaataacacccataaaccatctggtcatgcctgatacacctcatagaatttcatgatgttgatgacccaggcgcagagaccagctgctgcaaaagatttggtccgaatcaggtttgggttgaactcagggtctctcaaatactgttccttcaccacttttagacaattctctggaatgtgctctttgtcatagttaattaacgcttgtaaaaaatcatccacctgtaaagcaaaaaagacattgcaatgagccatttgtgctgcagagaaaattccaagatcaaaaggttaaaatcagcttttaggattcacatcacaaaggcaaaattggcaagctgcatttatcccactgtttgactttttcagtctttacagtctaaagttagaattagcaatggacacttttaaaatcccttttatcccagggtaaaatattcagtctttgcacaggaggcattcacattttgaagaaaagaaaggcagaaaagaaaaagaaaaacacataccccaaagccgctttgcttcaccttcttgtacattagtaacattttccaacagaagaaatccatgtaattttctccctcctacacttaaccgctttcataattttgaaaataattagcaaccttccaactgctgctggtgctgatctaggtgtgctacaaccccacgcgtaatctcccacttggcaaacaaaagttctaggtccagagaacacacagtagattactctcagcaaatctgaacatgacttctttttaatagttcggaatgttatagctttcttctttctcctcaaactgcctgtactttaagaaaatttattttactgaagtatagttgattcacaatgttgggttaatttctgatgtagagcacagagattcaattacacatatatagagaatatatatacacacacattcttttcagacggtccatcagaggatattgaatatagttccctgtgctataaaataggaccctgtttatccattctgcgtaaaatagtttgcatctgctaatcccaaactcccagtccattcgtcccttgtccctgctgtcaagtataaccacagaactgaacacagaaatcatcagaattttcacgctgccaggctgataccttccccatgaagacttttgctgctttccaactccggtctttcggcactctgccccggggagccagaaggaccatcacagccgcagtaacattggtgactgcatttggagggttgggaaaggctttcagctcagtgagattgacctgaagaaaagcacacacactctcaagaccagggcgctctgctctctcacaaccactgttgggtcattaagctggtcttcagtggctggtcttttccaccctctcctcttcacaccactcttggtttggcagtttttgcagccctcgcagagatcccactgtgggacaccagtaggtccaggtctttctggcacttttctgatactttgaaaacatcactgccttttttggcttccaagtaaatttatcttcctgatgtaccacctgcagagtcgtgcacactgaggccagggaatttcataaatgtacaggttttagggtatttatgggttcatccaacctatgtaatataactgcctttgaatcaggccttccagaaacagggacttccctggtggtgcagtggtaaagaatctgcctgccaattcaagagacacagggtttgatccttgggtagggaagataccctggagattgaaatggcaacccactccagtattcttgcctggagaatcccatggacagaggagcctggtgggctatagtccacggggtcacaaagagtcagatacaacttagcgactaaataactgcaacaacccagaaacagagtcctttagctcagaatctcttagttttgtctttctgcttcatatgtacaggaagcatctattacactataatgactcaaccaggaagatgcccgtagaggctgaaccttctttctacattcctccttagt

SEQ ID NO: 61528 - DNA, 806 bp, Bovine  19866880494816
  misc_feature (1)..(1): n is a, c, g, or t
ngttgcaaagagctggacacaactgaagcactggacacatgcttacgttgatcacattaaagccaacttattcctaacggtaagatgtagcaataatatcaataggataagcattcagaacctctttgataatacaggaaaagggattagttgactttgctggagatttacctcttggagtctaacactttccgagaatgttttagactgttcaaggtatgaggaaagctttcatgcaagggacataaggatcatgtaaaaaaggcaagtttttaaaatgcatgaagtaaatcgcatgtgaggtgtttgttggtctaaacaaatctgttcttcccaaactaattctatagcaaagtttctggcccaaagacattttccctttgatatccttatacgtggatactgatgtgccattaggatctttcttgctaatcaggaaaacgtggtgctttgatgtaagtccttgtattcattttctgccttcttttgggggagagtaacacagcagtgggagtccagatgtcattggccaggatggtttgttgggcaagtgataagggggcagatgcaggcagcatctttttgtttgggaaacagaagaacaaggactgaaagtctgaaatacaaatcggagtttagtatctaaatatctgaaaaatgaaaccgcatagccctgaggctcattggatgtcatctgttgggggtgttttctctccgcaggtgtcgcatcagccgcatcctgcagtcccctcagggttatgcgctcttgatcggagtgggcggcagggcaagcagagcctgtcccg

SEQ ID NO: 61529 - DNA, 2025 bp, Bovine  19866880557412
  misc_feature (1)..(1): n is a, c, g, or t
ntaacttgaggacttaaaaaattttttaaaatatattgatataagcataatccatgttttatttcattgtcatagcaaaaccccaggggtgtccaatgtatacgtgtttccttataacatttcatatatataaaatgttcgtcaagaaattcatgtggatgagcagttagagctttggggaaatgactagatcaagaattgagagagcagctttgaagactgaaggagcagattcacctgctcttttgaaaagatgtcagtgtcatttgcttgctcttttcggattacatttggccagtacatctgcagcgtctcctgttctttgtgccatgaaattgaagagatttccacagtaaggaatggcctccaactgttcgttttcatctgttgagatttgccctccccctgtctctgttacccagatgaaatgccaataatatccccaactgttctactgcaggctgacaggtagacgactcccaggaggtttatgcttgttctcttttgatgatagtggataatttgggtaggaggcattcataaaacaaatctttagaacaaatccttggtctgggtacttctgaaatttaccttcccatataaagcatcttctactgaacttcacatagtagaacatttccactgtgggtagttctgagtatttgaaagtttgtagagctaaaacatgcctttttgccacaagagaagccactgcaatgaaaagcccacacaccacaacaaagagtagcccctgcttgccacaactagagaaaacccaagcacaccaacggagaactccctcagcccaaaaaaggagatgtggaaataggtgatactgaagaccagatgaaaagaatattatatatgaaatattggacattggactctgtcatggtgtcatgggaagtctttgaagagttttttagcaagagattaacataagatttatattttctattgagtatgatgtggtttgaagagaggtaaatgagaggcaacagtctgagttgggaggagatggtgggttgcattaaatcaaggacacctcacttcttggcttgagaccctggtacatggtggtaccattcactgcctgggtatatgggccatgctacagattagagagtggagggaagtgtaagaaactgacttcacatttggaagtgttgagtttgagttactcgtggggcatttaggtcctggaggtggatggggatgagacttttggaccctggaaatgcagatagattgaaatcctgtgagtaagtgaggttgcctagggagaatgaatagaaagagaagaaggttgagagggctaagaacaaaccactgaggatcatcaaaacttaaagataggggaaagcgaagccttgagggaagagaagtggcagccagagagaaaagagaagagcctggagggtatgtgtcatggaatcctggtggctaaggacaagaggacggtaacatgccagaccctgctgaggacaagataaatgaagactgctatatcacgtcgacctcgaggaggtgaccaccttggggttgtcccgtgaatcctgtcaactcctcataagccgaacagatggtacttcaaactgagtacaatccaggtgttgctgtctctggagtccatcatttcttgctgacctgaatgtcatcctcgtactgttccaaaatcattgttatgcaattctaaatctcatttccattgttaacttataccatgcttatgatcaactaaaaattatcacatctttctaatgtgaacctcatgcacaggagatacatgtacacatagcagacctaaataacagacttaaaaaactaacttacatataggggcttccctggtgggtgcagtggctagagactccatgcttccagtgcagggggcccgggttcagtcgctgggcagggaacgagatgccacctgccgcatgtgagcctgaagcttcacatgttgaaactaagacctggcacagccaagtgaataaatattaaaaaaaaaaaagaaaagaacttacg

SEQ ID NO: 61530 - DNA, 1947 bp, Bovine  19866880567658
  misc_feature (1)..(1): n is a, c, g, or t
ncttgctcactgctatcccctctctgtactcctttcttgaaagttcttggtcaactcagtttatcttgtaattatttttaaaggagtcttgaccttttatttcaggcttcccagatggtgctagtggtaaagaacctgccagctaacgcaggagacttaagagacatagattcgatccttgggttgggaagatcccctggaggaggcagggcaacccactccagtattcttgccttgagaatcccatggacagaggtgcctggtgggccacagtccctagggtcacaaagagttggacacaactgaagcaacttagcatgaaagcatgcatgaccttttattgcaagagacatgcaaaatttcagactcaaaatggtgtggaaatattaatactttcttctgtaggactcattccctggagaggggcatatctcttgggaaaaattaaaagatttcaatcttgtgttgttttgcaaaaattttggtctaattcagttttatgtgccatccatatatgagttgtaaaatcattttcattctagcttagcaactgctttacaaatagctctcttggtgatttaaccttaccttcagtgaaagctcctcatggaagttgttaatggcatatgtatgtaaaggctttcatcccagcctgcatgttgaggtctgactactgacattgttttggattgaacaagagagttgtctaggactcagggatgggtgtgatgaataggaagcccatgaggccaggaccaaaactcacatttttgctgatggctctgatgacaatgtcctgtacataaggatcacaattcattaaaaaattgatgtgcagtttgcatacctgagagtagtgaatgcagtgtccattctctgggacagaggagggggttagattttactagaaactgcattgaccatgtggcttcatatcctgtattaaatgtagctgtcacatcataacccattgtatatcttagattcttcccttggaagctgatatcttgcctggcttgtatagatgattaaattcaaacatggggaacctcaaaattattgacatttgactttggggtatttatttcttgcattgtttcctgtagatattgttagctctgagtattcagaggttgatggcatgagaaagtgatcctaaacacttcagtaagttggccacaaaacagacactgaccaagtactgatgttattagaataggaactctgagcagagcctggtctacatcctgtaccaccaagggtcatttagaaatggaagggctgccccgtctcttctcgctgtgggttttcagtctccctactgcactctcatcatcttctgttgcctttttctctccatgggtcttgtccagccttctgcctcttcagggcagccagggagggtgtgaagtggactccatggagaagaaagagggggaacaaatgaaacgtcttttctcgtagaatctttaatctgtcgtatcttcttgactatttacctagtgatttatctccctctcatgaacccaaacatactcatattagagctaatttaagtttggatttctttctgactgtagacattttctgaatcttgtatatataaagaatcactatttgcatctctggaacactgcctttctgttttagggttagaagtggaggatggtgatagaagtagaggttttatatttttctaattataaaaggaatatatttaatatagaaaaattgaaagtttgaaaagataagaacaaatctaccagtagccagtcccatgaagaccattactattagcattttgatatactcttttctatttgtttcttaagtgctgttgacctcatactgtctctttagttttacttactttctaaaaaacgcttttcaccaaaatacttcactgtattacaagttctttacaatgcttttaatgacttcataaca

SEQ ID NO: 61531 - DNA, 1198 bp, Bovine  19866880626779
  misc_feature (1)..(1): n is a, c, g, or t
naacttgggaaattgctaaaggatgaaattacttttggaagcaaaaagaaagacagccttgaactagtcattttaccggctgacaagttaatacttaaagactccctattgaaggagacaaacactgtacaataagccgaaagctcacgggcagtgttctttcaggtagacatggggagtgagctctagttatagtcttctgttgggccttacttatcctctgagaatggtttattgtgtgttttgaataagatcacacagattacaagctgaccctattgatcttgtgacctgaacagaaccctgcgcttccactggagcctgtcagatctctgggttgctggcctcccatttttgccttacgatctttatttaatatctcattaaccctgagaaaaacacaaagaaagtaactgagcctcagtagttgaaaaatgggaggacagcataaactaatcaaccatgtgttggggggagggggagcagatgaagggcatttctgtttgccttttgttatcactctagagtcaggagaagatcagaatgtacttgatgttaaagcattatgtgagggaacattgtctcttccgctttattactcagaggcagataaaatggccctgcaagctaatcgtttacatagtcaaacaaatacagcccatctccccagtcccagtgcttctttccttcctctccctgggcgtcatgcctcctagcaaaacattctctaaaggaaaagagcaaatgtttcagaaacatatggagttacatgaattttaagggagttcagagagtagttgaatatctaataagatatattaggaaatactccagataatatgatatttgtatattaattgtaagtgaccaaagatattaaatgattccagacaatagtgagcttcatcaaaatgagcatttacctctcaaggcagtactgttacagaaagtagtgattgggtccccatgcagacaaaaggtgctggagaaagatggaccctgagggggcctggtggcacagtgggggcccaccccccttggcagctgacccaatgtcggccagggccgcacatgagtctgggaattaatgaatggctcgttttacccgctatctatttgatggctgtgaaataccatttttacactttattaaattagattcgtctggagttctgatgtgcgtatactcatagctaat

SEQ ID NO: 61532 - DNA, 1555 bp, Bovine  19866880659233
  misc_feature (1)..(1): n is a, c, g, or t
natgataacaaggtgaacagaaatactgtttatcgtaaaatgcaggtctgagatctttatacttgcatgagtttcagtaggacaatttaaaattgtgatatttcagattctaaatacagtttattttttatggtattcaggccttttcatgttaaaaccgttaaaacgaaagtcttaaatttagataattaccatagttgtttaaaagttggcatgagtaagtgcacgttgatgagtttgttcctcaggggtcagtgagctcccctggggatgaactgatatctttattgagactgcatttctcactcgggcagggatcatttctaacttgggcactgagctcatatgtagcctttggcacttctcctgggggcagggccgggggcggtacttcttgctgttgtgaaaagttagcagccttgcctttgctccctaatgaagtggccgcttttgtgctgtgctgctctgtccaggtgctgacactggccagcaatgagcgcatagctctgactccctctatgaagctgctctttgagattcatcacttgaggactgcaaaccccagctactgtttccagagctggtattctgtatgtgaacctacaagatttaggctggaatccgtgagtatggcttttttttttttttttaattgtggtaaaatatacataatgtcaaatttaccattttaaccgttttaagtatagagttcagtggcattgagtacattcacaattgtagtacaaccatcatcaccatcagtctccagaacctttttcatcttcccaaaatgaaaccccatagtcactaaacagtacccctcccagcatccccagctcctttctactatctgtctctatgaatttgaatattctaggtacttcttacaaatggaatcatatagtaatttttgtgatgggcttatttcacttagtgaaatgtcttcaaagtttgttcatggtacagcaggtgccagaatttcctttctttttaaggctgaatggaatatatacccaatggaatctgtgtgtatatgtatatgtgtgtgtatatatatatatatatatctcatactgtttatccattcatccttctgtagacactagggctgcttcagccttttgactgttgcaaataatgcttctatgaacatgggcataatctctttgagtcccagctttcaattgtttttgatatgtacccacacaagcagaatggctagagatcatacagcaagtctatttcagattttttgaggtaccactatgctgtcttccactatggctgcaccatttgacattcccatcagtagtgcactagactttcactttctgcatgaccccaccaccacctgtggttttctctatattttataatagaaacatcctaataggtgtgaagtggaattgcattccaattttgacttacgtttctcttatgattaatcatgttgaacatcttttcatgcgttcattggccatttgtatattttctgtggagatgtgactattccagccctttgcctgttttttaatctaactattggggttttttg

SEQ ID NO: 61533 - DNA, 1678 bp, Bovine  19866880669242
  misc_feature (1)..(1): n is a, c, g, or t
ncttgggttaagagattctgcacctgtggcctgagctgattaaacaaattgaatggccaggggccagtcagatctcttccttgatgattagcccagagcaatcccaagcttgagtttgttagtggagaggcagagagagggggacccaaacagaggaagtcctctgccacctaccacatccctcaatctatctgctctttgctctgattgttcagctttgtcttggagtcgtggagataccccagttgcttccaataaactttcttctagctctcaggccagtgagagtaggactttgtaaattgtaagtaatagagttttagtgagtgaagtgaagtcgctcagtcatgtccgactctttgcaaccccatggactatagcccaccaggctccttccatccatggaattttctaggtaagagtactggagtgggttgctatttccttctccaggggatcggcagaaatgatcttcaaggtgttgtgtttttttttgtttttttttttagctctaatattacactagtggttatctaagtatggtcttcccaccagcagcatcaacatcacttgggaatttatcagaaatgccccaccccagacctattaaatcagaaactctaaggggggcgtccagcaatttgtgattttacaagccttccaggtaattctgacatgtgatcaagttttgcaaactgctgtatttactattttaaagggttatgttttatgtaagaaagggattttcataacaagtgccactatctttcttttctaattaagttactagattgaaggtcaaaagatgatttttattagtaaaaaagttaatttaaaaaaattattaattttattaaatcttcaccctagcgtattttttctttttataaagccatgtaaaaattttattttattaaggtttttttttttttttggctgtgccacacagcatgcagggtcttagttacccaaccaagtattgaacttgcgccccctacattgcacgtgtgggggtcttaatccctggaccaccagagaagtccccaaaagttaatttttataaatagcatgtattacttttacaactttaaagaaatgtcaacagattttgtttttctttttttttaatttttcatttcagaggactaagactgacatttcaaggattagcgtaaaagaatagaaggaaagtgtgaagaatgaaaatgctgccaataaagaacaaaaaagtaagcaacagatcatttcaaatggtgaaagtctggaagggaatacaaaacagataacccagatgctgtgtggttttgcactggaccagatttcgcaaaatgtaccattaaacactgaaatgactaataatttctggcattgggaaactgcagtaatgattgatttacataagtacagtaaaaagtgaaacaggaaactttgacttaagttcatcctggtggttttcactgttaggtttggaaagataaggttaaattggaattttcactgtcacaggatcttaaacaggcagttggaatagatagggctcttttatggggttggttgtttgaaagtaacatattattttcccatggaaaatcatacgttggagggccgactgcaggtagcacaacaaaatccttactggaaggaaatcacagtgctgataatagtacaggtccctggg

SEQ ID NO: 61534 - DNA, 4053 bp, Bovine  19866880704256
  misc_feature (1)..(1): n is a, c, g, or t
nttccttccagccctcttctatctgatcatggccttgatgagtgccttagtcaggatgagaaatgtgaaagttggtaattaatggagtcagaggcaaaaataatgatgaggtttttttttctcataccaacccatatatgtggattccagagaaatagtgtagatgctctcctttgcaaagcagaaatagagacacagatgcagagatcaaacatgtggacaccaagggggaaagggaggagggtgtgatgaattgggaaatcaagattgacgtgtatgcactgttgatactgtatataaaatagataaccaatgagaaccttctgtatagctcagggaactctactcaatgttctgtggtacctaaatgggaaggaaaccccccaaaaaggggacatgtgtacatgtgtagttgatttactttgctatacagcagaaaccaatgcaacattgcaaagcaaccatactccaataaaaattaattttagaaaaactgcaaacaaaacaaaacaaacaaaaaaaaaccaacagaggatcagggaagggaaaaggaaaatggttggtttaaattccatcaattactatttttgcctttcttttttctgtgcctgtgctatccccttgagaacacttaaacctttcctttttatccattcatgtcagaattctgttgagttatatatcagatacttaccatttttcattgactcttacatgcacattttccccaccttttaatgttactgaaaattgagatgcatcataatttatgtcatgtgatggtttgtttcatggcctttttctttttaaataataaataaaataatgtgcaccttaaaattggtggcattttacagtcaataaaataaattaactctttttttggaggcagttgtctaatgttaatttgctaagtgaaggaatttgaagcagtttgctagcagtcagtcactgcagtagcttttcagcaaacaaatggccattgacatttcctgggcagtcatggtgctcttccagcctgggagtggagtccatttttcatttgaacttaggttgaccctgtgatttactttgatcaaaagaatatgggagacgtgacactgtgcaactttggggctgtcagagacttccaattcttttggagagccaggaacctccatgtaaccaaactaagactgctgaatgatgagagacacatggagagagaggcgtttggaggagaagggaagtctccccgccaacacttagccccaagtgctctgagcatgtgagtgaggccatcttgcatcttccagccccagtcgattcgcctcaaataacaccacttgaagcagaggtaaacaatccccattgagcctgctctgaattcccaggatcctgaacaagagctgggtttttgtttgaagcccctgtattttagggttgtttgttaggtggtgatagataactgagagggcaattgagttaggacttaagtcctacaaacatttttttcaatttttcccaacttggagcaaaccctctcccctcagataaagaaatatccttcagtgtttctcattgtttcccaaactgcccacgtttctccctgttcagatttcccagcaccaacaaaacaatccttaacgtactatgaggagtcacagtccaaaaacaaatcctgctgggattctcatttcctcaaatcaccttcccacttaaaattgtttctactcaatgtggtagtgcttcatgggggtatccgcgactcctaaaatgtgtttttctacctaatctaaagtacaactacgtaatcactagggaaccccctccaaaaatgtccagtgcttctaaacaagaaatggcatggcaattctatgaggatacacgttgacaactattgttcaagatcatgattactcagagaaactgaactgcatccaacagacccgagaacaactatggcacaaggtgtgtttgccaaagcaacaatcacagtggaggcatgtctcctgagaatggccactcagaacagctaaccctgctgaccaagcaggatatcctcagtgtgtgcagcagtttctcaataggaagcatgagaattaggaacattgcaaaaggaagggcaagaacattgagagactaatatccggtgaggtgtgaggggggaaacttaagctactcactttgcaggaacaacctcacatggaaagctattttggtagccaagtgtggaaagttaactgtaaccaaataaaaccagggggtcataaagccaggaatgtgtacgaatgcatgagtctggttttcctaagcttatttgctctttcaggagaaaatttcctctattgctccatgaaatatgagtgtatatgtgttttaccctttaataaaacaaaccacattatctcttaaggtcccattattcctattccacagcttaatccaagtatgcaatccagtaattataactgatttaacatttctttaaaattgaagcacactactttttccttttttctgcctaacctttttaaagggacaattaaaattgagaatgaaatatcttctgcagtcttttgactggcacccgagaccttcccccaggatctagctggggttataaaacctttcatgagttccagtcaattggtcaacccagaaagtccatccatatgaaacctgtggacattgatctactgatgggggtaataaagatgcagattaataccatctttattatgatttagtggagaatcatacttgactttggattgctatataacatctgggagagactttaacccagaaggaaaactgtagaatgggatcaccaagaaaaagcaaaccacaaaggaaggggaaagtggtgtcagaaaagttcagtctgacagatacggccatgaatttactgactttatttgcaatgagacattaagaaaggcatcctttccctaccaaataccaaagcacatttttgttttatcactgtggcaaagacacaatgatcgactttaagttggcaacatcattttgaggcctccttgcctttcctctagactgcatcagcagtttgccagatatcataggctgtgcattaaaaaacctcattccaagctaaaaagaagcactgttggtttttcttaaatctagaaaaaatatttttttttcactttctcctctagcaaaggaagtaagggaattcacaccagatcagagacccaaaggtgagttccctggggtttgacccttctctcttaacaggaatagctttaagtaactttgggggtgacagtgtgagatgtcctcatgacctttccccagccctcaacatttccctcacagcacaggagtgttttcacttctctttgtgatgctctgctgaaggactgccagttaaacctacttctaagatgcaaatggcccagcaaggaaggtaggatgataggcactctgatcttcccttggggctgagcatatagaatgggacaaggcagggctcaggaaatgtgcgctgaaagtttgaaggttgactgtacgtgggttactgatcttgttaggacttccaggtggggcaccagagctctgaggggcacctcagatactgaggccaaggagcggggcagctgatggggggagatgacactgtggaaatcaggacctttgtgacacaggacaagggcagtgggaagcactgggcattcagggagagggacttccaagatgacacagggcacacaggttggtggaagggggcctttcaaagtacatggggtctcaggtcagcccgattttctgaaagatgatgaaggaatacttctcttccttctcttcctcccaccttctgtgcctaggaactaagactccagtgggaactgttggtaccaagacttaactttggactgggtcttctttaacctctttggcacccgtgaactgatttcttctcagtcactcttgttaactgtattacatagcacatgatattctgtgaaccacaggcttacagaaacaatttgtgggctgtttttaaggtaagactatctacatctcattaagatgttgccagtccgt

SEQ ID NO: 61535 - DNA, 3293 bp, Bovine  19866880723585
  misc_feature (1)..(1): n is a, c, g, or t
ncgcgccaatgggcagtggctggcttcgcgccccgcgccagatccgggatctcctactcttgctacctggtgaaggcgccgacagcgcccaggcgagcctggggaagagtcgccagcgccacagacgctttcagggcatgaggacggcagtgggctttgtcaagatgcagccgccgtgcgagagcccggccctggccggcgtggcggccgtggctgcggcggacggcgccctgcgccgcagccccagcccgtgtgagctggggcgcgagcagatggtgcctccgcggccatggatgtgggacctgcaggcgctgctcaccctgcggaggaagcgccgcgccgctgggggccgggggagtggccgggtgagtggccgggtactgcgcggcccgagtggccgtgggaggcgcgcgtggagcccgcgctcaccctccggggaggccgaggtggtcatctggaagttgggaaggtgtcgggggccaagcccttgtgcaggcctaggcagaagagggacccgggaaggcggggtcctagggtgaccccccgcggagcagcgtttttttttttttttttttcctctcccctagatgcatctgacttagcgcacctggactctcgctgcaggacagtgagcatcgcccaaagaagggcagtttgcctgtccccagaggaggagctgcaggtgtccggtgcctaaagaccggccctgttgggacagggagcccaatgccccacgcgtgagaccttagtttgcaggaggcaggagacgtgtgcactgctgtcggacgcctcgttgcaactttgggcatcgacactggcttagaacccaactagggacactcctccaccaggaaatcctagggaacacatcagcaggaagtcagtatttaagattctgggagcatcgccgagcactaatctttgtcaccaacactggctctggcgactgccacggcctaaggacagacgcgagttgaaggtctggggcgagctctagctcctgggctccccagtcatcagcacttagttcttggcgacgccaccagagtcttacgtattgacttcctgctggtgtgttccgcaggatttcctggtggacgagtgtccctagttgggttctaagtttatctaatggcccaagcaggtcaggcatgctttgtgatgaagaaaagcaggacagcctgggatctctcataagtcactcagcaggccttgctgacttgtcgggtgtccctgctcactggggccttgggcacctttgggggtgttttacttagcttttaaaaatcttaaggagactttaaggagaaggtatcacaaggtagatattttggtctgtaatgtaagaaagaagtcttagtcgtatgccttaaaagatctcactgggggactttcagctcttgaaagattggtttgtgaaacttgagagttagggagaaacactgggtttggtatggcttcctttgggcaagaaagcatctgaactgatatggagtctttgcctttctaggctgtgttcctccacccctgagaattcttcccacatagagatgactgtacatgatcgacctaagaaggatgttttgaggattagctgagcagtaataggacatctttaggtcaaatgaccagggaagtttaggaattacccaaaaatgaccttaatgtgtggaatacagggttacctgcaaagaaagcgaggaaatgtgtcccaaaaatgtgatagccaaataaacacaaaaatcagaattagagactttgcaggagtctaggggaaggtaggtcaaattgtattcctgttatccttggacagttactttttcactgcacaggatactgacaccatgagggcagccaggcagtctgtgaggaggattacccagggtttctgtgtaaatagatctggagtgttcatctgcgtagaggcttgtgtttccccatgcctgggatgatgttgtggtgtaccttgccaaaatacatatttactctaattattctgaatgtggttacttcaaataaggtatactttattagcccttctttggttctaatactgcattagctctccttgtgacattccaaacacatttcataagtgcgtggccagttttttgtttttttaattggggtaagattgtcaaattttccaacattgaaaacccataattttcaactgttttccctcctttggctctggaagcacctttgtggttgttgaaccttcccatcaaaggggttggaaagggtttgaaagtatgagaaaaacaggtgaaaaatgtattagtttgttcaggctaccataaaaaaaaaaaaaaataccatagacctggtggcttacataatagaaatgtatcatctcacggttttggaggctgagaagtgcaagatcaaggtgccagcatatttagtttctggggagagctctattcctggccggtagacagccaccttccctctatgtcctgacatgaccattccttggtgcctgtggaggaaaagatatcccctctatctctttttttaaactgaaatatagttgacataaacaggatattagtttcaggtgtaccacctactgattggtatttgcatacattggaaaatgatgactgtaagtctgctgctactgctaagttacttcagtcgtgtctgactctgtgcaaccccatagacagcagccaaccaggcttccccatccctgggattctccaggcaagaacactggagtgggttgccatttccttctccaatgcgtgaaagtgaaaagtgaaagtgaagtcgctcagtcatgtccgactcttagcaaccctatggactgcagccttccaggctcctccgtccatgggattttccaggcaagagtactggagtgggttgctattgccttctccggactgtaagtctagttaccatctgttcccatatgaagttattacagtgttattgaccacatgccttatgctgtatatgacatcctcgtggcttatttattttataactggaggctatacctcttaagcttgttcacatgttttgtgccaccccccatcccttgtttattctctgtatctttgtctactttcattttgtcttggtttttagattccacatgtaagttagatcattcagtatgtctttctctaacttatttcacttagcataataccctctagatccatccatgttgtcgccaatggtaagaattcatttttttggatggctgagtaatctttcattaaatgtatataccccatcttcttgatccagtcatccttcagtgaacatttcacata

SEQ ID NO: 61536 - DNA, 2743 bp, Bovine  19866880738244
  misc_feature (1)..(1): n is a, c, g, or t
naatctttagacaggttattactgaagcacctactttaccaccaaccgctgaaacgtaacttccttcatcctctctactctgaatacagctgtgggggaggacaacaaacactgaacgtggaatcaaagacccaggccatgtcccacatttattgatttattagctctgtgaccttcaataagcacttcatctctttgagcctgtttcctcatccataaaacagggaataataaaaatctgtggggtggttatgaaagctaaagtaaataatgcctatgaaaacaccgagcaaacagcaaaatacatatatatatgttgttgtcattaataaatctcatctattttatgtttaaagctgatctaacttaaaaaattccacaatgactacttaatcaaaattatctccaggtaactccctgaagtcctaaccaggccaccgtgctatcactgccaagtacccaggtttgatccctggtcagggaactaaaactgttaaaacttaggctgactgcaagccatgcagtcaaaaaaaaaaaaaagaaggaaagacaaaaaattatctccacacatacacacatgcaagtgtgtgtatgaccggatagtaacatgaaatttgcacacatttttacaagcccacaaattttatgaatgtcttctgggcaatctccccaattagtttttctgaagtctgaagtcaagccctaataaagagaaacactatgacacatcaatctttatttctaaaaacatttacttaaaagtggtagtaatgttgataagagcaacaataaagaacttttttagaaaattaaaatgtgacactcctctgattctcttcctatgacctggtctcttaggagggaaaataaagcttgaggaggagatgcttgtaggagtgagaatttataactgctattagcagagctactaacgaaattttttatctgcaggtgctcttttatgtctattgatttagaagtaggaaaagctgttactcataaagttcctgtttattcctgatgaaatgtcaaaacctgcattgtcaaggctgaaagaacctgactctgttctccactcgattcaggatgagccagttttggttatggcccactgagttacatgcatatttgttatccttggctcctctttggctgatgtcattccttctaaataccatgtaaattccctctcacttacagagttgttctctgcatggtgggcattacaggcaactgtagtcttatgatttcagatcaaaactgatactgtttcacttttcaactatgtcgatttgaaacgtttgcagataccattcacaatggtaacaatggagtgtcatatttattttcaagggagacttagaggatcagaggtaaagtcttaatagttcttctcaagctgcatggacaagatactttttagacctctgtttatggtgtagatatcagaaaagaagatgaactcaagagtctatgaaatcacaggaaagacttggaagcactgtcggaagctgaatgagatacatctttggcctcagttccttcatttgcaaaatgaggaacaactctcctcattagatcactgtggagaaaacgtgagagagtacgtgtaaagtacctagaacaatgaaggcacagtcaggagcacaggctcgtgagaggatatttttattactattcaatctgagctatagagattcaaaaagggctggggactttctaaaatcatatgaaaaatgcctgcgtacttctctgatgaaagagatgtggatgtcatcagattttcgaaataggtacgagtgtgcctgccgagttgttttagtcgtgtctgattctgtgcgaccctatggactgtagccaaccagactcctctgtccacgggattctccaggcaagaatgttggagtgtgttgctgtgccctcccttcaaaacaggtagcctaatcacaaaatttctaagacccatggcacttgggttgagcctaactttctaaactgagtgtgtatatacagaccacagatgaagacaaatgcaggctgccccatttacacttgcagcattaattgtgatgtccaccacaatgtagagttgctcctccattagtgggcccatatccagtacaaacggatctccctccagcacccaacaccactacccacgaccacaagatacaaacctgaaaatgaacacaagttgacaatccacactggtggtcatcacgtagccccgtatctgatggccaagaggttttgggaaggattgaaggcagtctgggaaggggcaaagcaagtggaaacctgatatttctgttgatgcttacatcctaaaaataccacaaagaagtgacatctatcacaggaccaggtatgagagggaaaatgctagaggaggagacagcaaagaaggcatttgcaggaggctgctttactgtttcaattttgcatttttctttcaaaggcagcacagatcctctgtaagaagaaaaagacagatgggatgacagaattttgtgcctgttttccggagcatttactagagaatttatgactcttcgtagttactgttgggtatgcacttagaataattttctgccatgacaacaggtagtcctcataaaatttcagtctctaacaagagggcagagatgtcgcttttctagtgtttctgcttttagtttgcacattaataaccctgaatagctattcagtattctaaataaattgaagctgccttgcttgaaat

SEQ ID NO: 61537 - DNA, 795 bp, Bovine  19866880757395
  misc_feature (1)..(1): n is a, c, g, or t
ncacaggatttcccagggcctttgtggtgtgtggacaaagcatgctggttatgtggaacttggtgggtatgctggctacggccaatgtcatctagagaagatgccaaggaaggggccctggagccccatgtgtctgtcccagggatttggatcacatcccccgagtggtgcttctgtcttcgagcagggagacacaagtaagttctgttgatgtgtcttctatttactgcaattgattccatctcagtaacataccctcgaagtctaagcatttacagagtaagaggacaaacttcaaaagaacatgaatctttgtaccagatggagtttgagagttctcttgtgatttctctgggtctgttctggttagctgtagagcctcaggcactgcacgggtccccgaagagtgccaggatgatgagttcagactagagtgagctcaagttggtggctgagtcctatagacgaaagctctggactcagaaggccagaggtcctgggtctggctgggtaatgtagtcacgtaaccactgccagtcaaggagtacctccagttagggcccagtcgaagtggttttctggagtttgtacttagaactctcccccatgggtgccttacattagaagcagtaacttctcaactgactttcagacagatcctgagaagataatacctgacaatttccttggggtataagccctcctaagaatattcacattttaataagaggcagttggagatttaaacagattgttaggcaaagaaagaagcctttttgtaggttgggtacaagg

SEQ ID NO: 61538 - DNA, 1097 bp, Bovine  19866880916930
  misc_feature (1)..(1): n is a, c, g, or t
nttgaagaatatcccttttagacatgtgcttgtcaattacaacaattctgtggctttgtacactttacctaaagccgtaatttgatagaaacacgctgtgagagactctaacatgcggtgattataatcaacagactgccatccactagcattccttcctgacacttataagactatctgaaatacacactcttgtattgaagaatcactttttcccccattttctgacaggaccctaaaatttttgactgaggacaatgtcacagtatttaaaaatacggacgagaacatttgatgatctcacattaattccatcaagagtaaagatgacacacaagatctctgagggagagaagggaacagagggagagagagaagagttgtttttaatccactgaattgctttaaacacagtctcgagtaatttcatttgctgatgttacattaaaactatggttctgctaaaattaaacacacttttgagacagtatcatatctccagaaattttagaatctgctgctccaaaaatacctgactcatatcacacatttaaacaagtttctggaaatacagctggaccctcacaaaatcacaagtgtttctactaaagtacaatattaagtgtgccaatataccccaaattcactgagaaaatgcagtcatttttaaaactttaagacgagaaaagcattttctttttaaggaaataaaaattcattttccttttaaaaagaactcccccctcccaaaagtttattaagaataaaaatcagcacaaattaactgagaaactgtgctacagagattatagattatagaactataaatagaaagaagtagcatcctttgtttttaaaagatatatattagggagacaaaatataaagggaaatctaaacaaagcttttctcaaacacatctttataagaaaaactacaagtatactggggtttggggtttaaaaagcaaccttcacactatgtcaaagagactatacagatttaagccaatatcttattcacatgattataaaaccaaagatattctacatattttgtgacttattagagagggcctttatgctttatatttaaaa

SEQ ID NO: 61539 - DNA, 3469 bp, Bovine  19866880985909
  misc_feature (1)..(1): n is a, c, g, or t
nttcagggatggatcctgccgaaccaagcagattacaaagagaaagaaaaatcaatgtgctatagaaacaattctaaatctattttcgctgttacaatttgaacatgatttagacatagagtggttcttcctaagaacaaagtagataaaggtttcctaggagaataaactcactaaattagggcaggaaatctaggcaatgaatgaaagtcaagttactggttgacgataatgggaaatgactgccaaagagagacaccttttgattgccctattattttccctccaataggttccttaagtacagtttcctctccataatttctatcatgaggtaaacccaaagtcttttgttaggcacacctcaaagaaaaactgccctcataatgcacagataatgcagagaaaacaaaagaacatttttgttgtgttctgaaaagaaactgcacattttgttatctcaaagatacaaggaatgataaaaaggagaaatggtaaaaagaaaaaaagaataatgcataagaattgcatagtaaatttaaactagctaatttcataggttttgaaatggactgtactgaaaaatgtgccttctgaatatcacaccaaaaagaccattctcgctacctttttccatggagaggaagaagcagtaaccattaccctccttcactccattaagaagcaaagctacctgttcatatacaggtgcactagtctaagctacctgacatggcagaatggagatattgaccactgaaatctaggaagaaatctgaggctaactatcagtttgaagaagtaagtccactatgctcaactacttactgttaaactttcaagttcagagaaaagtttcttaaacttcccagggattttctaaaaacaaacaaacagaaaaagaaaaggtcaaaagaagtcagttattttgagaggaatgttcattaagttgcactatatacttcacatttctgaacataaatccctctatcaactggttctaccttgattgcttctcattactcaattttcatcattccttaatgtgatgttccttgggaatgttgctaaagacagtttaaaatgaatagcagccacaggatttaggaatccaacttaagacagtccacacactggtgatcttttcatgaaagcttggatttcagttctgtatcctacccttgacaaacgctctcaccttcttaaatggtcttgttgagtgggaagtaataatgttgactgatattttttgtataaatgatataatgatgtttcacagcagaggtttaaatagtgaaaggccatgaaaaccctcattgatgaggcctgtactttagtgggtagaatcaccaaaccggaaagatcacccatgcaaacagtggcctgaagactgacaggggatggaaacgtacactgtcctcccaaataagaatttgggcctaaggaagaagggcctgggatttcccagcctgcccttactctggtgaagtaggaaagccagacgtctcggtagtcagtcagagtttgaattctgactctgccctctttctagctgtgtgactgcagccagtctccacgttctctgattgaaatggagactactcacaggaaacgtacagtcgacagttggtgctcggcaaatttcagcacgtaacacttacgagtgttctacaaaatgtgtgggattttctgtttccaaaacaaatcaaaacaatgaggtaaacccttacaataactacacttttaaatatcaatttgataattctgaatatggactcaacaacacaggttattcaacctgtttggaaactactgttacacacaccaacacatacgtattaataaatggatgataaatgcgaaacgataaaatgcagacacctgcaactattcttctgaagctgcatacctgagtattttggatatcccacaaaaaatgtctcagttgcgcgtcaaactcaacgcatctagggccaaactgatctactcaaggggtcagccatgggccaaatatgaccccatgcttttgtaaataaagttttattggagcatggccatgctcatcatttacagactaaacagggcttgcacttcaataggagacttgagtcatgccaatggaaacaacatgccaaaaaaaaaattcaccatctggccctttaccccaaatgactgctgacctctcttctagttcctgaaaccaacttttcctctattgactacttaggccagtgtgatcattttccaggcctagaaacactgaagtcatcagctcaagtgggcgtctctctctgagaacccaatggccttgatcatacaacagtgacaggcagaaccaggatttgggagacctggaacatataacattttgtgggccctcttttttaataaaaaaaaagaatataaaactacttttgtaaattttgcaaagatatctgccatccacgtgaacatactgccaggaatattgcaaatgagaggcctggtagcttaaattcataagcatctcagcaaatctgcctctggacaaacggagcttttgaaaggaccaacatgaaactgtaaccatgccatcacggagaaaaacagaaaactaattcaagttaggaggcatttttcaatttttgtttctttcatatatattatagaaccattttgaagaccacttgatcaaaatatttcctaacaccttttaaatatagcagtgtgtacatgcctatctcaaactcccaaactatcccccacaaccaaccataagctaaaatggataaccaataatgtatagcacatagaactctgctcagttggggcagcctggatgggaggggagtttgggggagaatggatacatggatatgtataactgagtcccttcactgctcacctgaaactatcacagcattgttaatcagctgtaccccaatacaatataaaaagtttaaggagaaaaacagttcctaaggacttgagacactaatttataacatttgtttctagtggtacttctctcatttaaaccatttaaatcaatttactttaaataaggacttttcggtggaacatttcccattcagtgttatttgtcctctcccacccactccatccctgccatggacccccaaggctcacctcccaggtctgagatagccggctcacagaagcagtgttgagacccatcacgatagcaaagaaggagttcaggtttctctgggctttgcagctgtggattaaagaaagcaggaggcactgttaggcaacatccttttgccagatgagcacaaaagataaagctgccaagactctcctaggccacagggttcagcctctagggaggggctgaactctgctccatgacccatgtgcccctgggagaggagtggtacctgctgcacaaaaacaaattcaaatacttccgctcatcattgcctttaggaaaagacctgtgctttttaaaaaacttaattaattt

SEQ ID NO: 61540 - DNA, 780 bp, Bovine  19866881000985
  misc_feature (1)..(1): n is a, c, g, or t
ntctctgtaactgcccttttgagtaaatacagcagcgcaccctcctcctttcactggcaggtgggttgaggatcccagggagggagtcgcttaagactgtttgctgggaggctagaagcaggcctggaactgggttcaattccccttcaacacgcctcactgcctttatgtgccctgtaggaactggaagagtggaaacgctcacacctatggcactgagatactcttaatgtcattggcatcaggcgaatagtctccagtaaccgatccaatttgatgtgtacacgcgcaagtaattttctgttagacatcatcatcattagcattcaacaattaaaattctcatccctttagcctataaaagccggcagagaagctgttcaggtagttctgatccaaatttcccaggtccaagaggcttggttttcccccatctcatgttcagtaaagcatgcaagtaattggccgtggagtggcactgaacggctgacccttttgaggcctgccggccactacgagttgctctgttctgactgtcatctggcggccacagctttcaagcaattacccgtggccacttagtgacagtattaaggaaagttaagttgggactgttcccagctcctaatttaccactcggtaaaaatggaaagttaaaaagaaaactagcttggctgcagcctctaactgtttctgaaaaacctatccggggcagatggttgtgaaggaaggcaactgacagagaacttggcttatctggagatgctgggggaggacttg

SEQ ID NO: 61541 - DNA, 3292 bp, Bovine  19866881072161
  misc_feature (1)..(1): n is a, c, g, or t
ntattttctcccattctaagggttatctttttgtcttgtttatagtttcctttgctgtgcagaaacttttaagtttaattaggtcccatttgtttatttttgtttttacttgaattactccagaggatgggtcaaaaaagatactgctgcaatttgtgccagagagtttcctttcctctaagagttttaaactatctggccttacattcaggtctgtaatccattttgagtacacttaatatttttaaaaacctattttaaattcacttttttttttaaaaaactcagcctcaccccaagtcatagcatgtacaaaatcatgtgtttacttgtgctagttctcttttttcctatatgttaaaaaaaaaaaaaaaaatatatatatatatatatatatatatatatataaaccattaggataaaaaagaattcactagtggatccctaagaacatcccataccagcagcagtggtagactcggcacactcttgctgagacctgcatgatgttccaagtgctgctgttgccccaaacgccatctctccatcacatccttccaggaacagggaaccattacccagcaggcaacatgtcactctgtaattgtgtaaaaggtcagatccagtagttctgtctctaactgagcctggatgggctcactggagattgtggcatgtccaaagctctctgtgcctcttccctcaagaaaccaacattgccacggcttattccactgaatttccttctcttttttgttgtttttcttcacagaggtgtaatttcagaatttccccaatacttttcttccttggcacccactttctgcctcaaaggtgtcttttctctcttttcatcactggattattcctgtcaatttaaaatgaaaataggtctgcttaagggtgactaacttctattttgtaaaaagtctctctctaactgattagtatttattatacaattcaccaattaaatccatttacagtgagtgacaacttataattgtttaataaaccaaaatttacccatacatgcatttagaagagtctaataagacatttgacaaactgcagccctgacataaataaaattgtggccatatctgatgtgttaaaaatacagtgcaaaatcttggatgtcactaaagtgtaatccttgttattaaggttctgactctattatgaagacacagaatttttgtcagtgaaatacatattctcttagctttaacttgaacctttgatgacacaatttaggtgtaaaaaattctgtctttctctctttatatatatatgtatttttttaatgtttatttatgtatttggctgtacccagtctagttacggctagactgggaaactctgaccttgttgtagcaggtgagacgtgggatcttttagtttcagcactcaagacctttagttgtagaatgcgaactcttagctgtatcatgtgggacctagttccctgaccagggatggaactcaggcctcctgcattggaagcatgagtcttagccactgacccaccaggaaagttcctatatatgtgtgtatatattgataatctaaaacatccaaagactgataaatttgagtcctgatttttttctaagtatggatatagttaagtaaaagaatcccagagtatttttttatttgtatttcagaaacaagttgttttatatagagcatcaaattctttatcacaaaatatcacaccagggcaatttattccaaattaataatctttcctgaatatgtgctaagaaaagttatgaccaacctagactgcatattaaaaagcagaaacattactttgccaaaaagggtctgtctagttaaggctatggtttttccagtagtcacgtatggatgtgagagttggggctataaagaaaccaaagtgccgaagaattgatgcttttgaactgtagtgttggaaaagactcttgagaatcccttgggctgcaaggagatccaaccagtccatcctaaaggagatcagtcctgagtgttcattggaagctgatgctgaagctgaaaccaatactttggccacctgatgtgaagagttgactcatttgaaaagaccctgatgctgggaaagattgaaggagggaggagaaggggacgacagaggatgaggtggttggatggcatcaccgactcaatggacatgagtttgagtaaacttccagagttggcgatagacagggaggcctggtgtgctgcagtccacgaggtcgccaagagtcggaaaagactgagtgactgatctgaactgattaggctttatagaattgatcatgtcattgtagctgtttttaaaagttgaagaaaattttaaatgatctgtaagaatataataaatggagtttattgcatgcagttgttactgtaacacttctaactcctaaactctttcataagagtggcaacaactgcttttatgaaggtaattttgtgtaccttgagttttctttagatgtttttagagttttgttattcagagaatctgagtccttgcaaattgtgtcagtcactgaataaggcttctctgagaactgccagaggcaggccctgtactggtggtcagtgattcagaacccaaggtacagaccctgcccttaaggaagctgcatttcctgagggggaagtcagacctatacacagcacaagtcatacatgccatgggtatgatgatggaagtatacacgatagagagtcatctgctccgtggtttagacttggaaagactttgtgttacatttacatttagtgtgaatcttaaaaggtcagtgggcatttgtcagacaaatgggagaagagaattctggaatgagaagactcataccaagtactaaaacatactaatcagcccagcagcttcggggaactgcgattaagattcaaatatgtggagagccccattttggggaaaaaggtgtatgaactgagaaaggtgggactggattgtcaggccccagaatgtgagtgtccttgggtacccacagatgacccacaggttggccttttcctttgttacaatgcttttcccccaagcacattgaaggggcacattcctgtccataatgctagttgacagtatccatggtttgtaaccaagggaccttgtcttcgtggagtaacacatctggagtttctgtatgttcacttgagaatcatgagcagaagtcagtgggaaagctagtgaagactcttagcatgctaagaataatgcaatcagatttatggtttttgaaagggcacgttggcagtatggagtatt

SEQ ID NO: 61542 - DNA, 1622 bp, Bovine  19866881091735
  misc_feature (1)..(1): n is a, c, g, or t
natcgaacccggtctccttgcattgtagatagacgctttactgcctgagtccaccagggaagcaccagtggcaggaaagcttctgctaaacccactgaccctcagcccttcctcattactctcaggctggtgttgagcatgttagaggttgaggtcttctcagtgaccactcagaaccatgctaaggacgttccacactgaggaactttcaaccttctaggctcttacagccaggtccacagttctggaaggaggagccctgagacaaggctgaatgcatggatgaatgcattagccaggcctcacctgactgtgcctgtaacctctgcagctgctttggtgaaaggatcacttgtgattgccccaagaggaaaggttttgtcacagaagctatttccctcttgcatctttttgtgaatctttttctattagtgcattaatcataagaagtattgctggcttaaaggatttttgtgagtcagccaggggtctaccaccacggtgtttaatcaccttcattgccacatgatcttcagctcgcagttgaaggccagaaccacaggtttaaagggccatgggcgtctcactccgcacatccctgctgacttatttaccttctgttcattgactggtaaaaaggaaatagtaaaggtgcatgttactctattatttttcatctaattatttagaaaagcctcccctgtgaattgattaaggtattataccgagggaagatttcagatcgactctgggtaaatctacagactcgtgtaaatccacccattacatctaaatggacttcctttgaaccaggtcactctgtaaatgatgagggccttaatcctgtctttcgtttaaacacgtctttcaagataatttctcctagcaacctgttggggtattagttcggctctgatgcagacggagttagcgttgaactgtaaagcacaaaatcccttgtttggtttcccagaatttgtttcctaaaatttaataatatttccctgtttttcttttgtttgaataacagcgagggagtttacttgattgaagcttcgacattatcttaccctagacagagacactgagcgccaaaactgtgagcggctgtgtgttaaagggaccatccctgcccgaatcctctttcatcttctgttcccatctggccaggttttccttccagatgctcgtctcttctctgcttctccactcccacttagactgtttaacagcctcaggtgttatcacctcaactgggagtccccttggttatcccccagtctgcctccttgatcttaattctagatattccaggcaacgatgcctcctgtttgtctgctaattatcctcaagcatgcttccaccatgtccgtccccaactaagaaacatactgtgctccctacggattaccacgcaccttccagtgttctctgctggactttcgaggccttccacaatctagcctgtcccacacagcccagcatgctctcatgctccattactcgacgcactttgctttttcctcttaccgtgagcaagtcgggatcgtttccagagccagtggatatgggtgtccagcttgtgtactgcagccctgggcgtcatgcaaagccgatcattt

SEQ ID NO: 61543 - DNA, 870 bp, Bovine  19866881138953
  misc_feature (1)..(1): n is a, c, g, or t
ngctcggcttcctcgctgtctgttggtcaagttaggtctcctattgccttctcctgtgtcttcttgggcctttgaccacaaagaaatttttttttttttaaccagtgtcctaaatactcaagggctgtgtaaacgtgcacacctgacttaaaaaaggaaatttccagtatgataacagtcaatggcatatgaaaaggcataaacagacagattttgtttcaagattatgagtgtgtagaagacaaacttgcaaggaaggacactcacccttatcagctggtctctggttggagccaccaatgcaaatagtgtaaggaaaaaatgtgtcatccttgaagggaatatttgcatgatgcatagtgcatgatatactacacaaataatagcacagcatcacacaggtttgtcatgaaccatctgatggcagatagtcctatttgtgattcttgaaaactaaaataaaatgagtaaggcttaacatttttgggtttgaaacatgtttcattattttgtgacttttatctcaattgcatattcattccataataaaacataaaaatagtattagtatcaagcacacacttctgtgtggcattctcagcagaggcagggtgggcagtactgggtttcaagtgcaagctctgcctctgatctcccacttcagccttagttcttggggaaggtcccattcagtccatcttgatcattatatattaaagcgttagcaggcttgaatagagaggcaaaactgtattttagattttctctttcaattagctggtaaagaaaatgcaaaacatcttaaatggaggaaaaattaaaacaagagatgttgggaagggatgggcaccaaggaggactcatcaaagt

SEQ ID NO: 61544 - DNA, 1482 bp, Bovine  19866881139569
  misc_feature (1)..(1): n is a, c, g, or t
ncgttttctgaatgttaagctttaagccactttttcctttccctttcctttctcaagaggcttgtgagttcctcttcactttctgccataagggtggtgtcatctgcatatctgaggttattgatatttctcccagcaatcttgattccagcttgtgatactcagggtgggtgcattttatcgcaggaaacaaagctgatttaaaacatgagttaaaaggaatgggttcagacgcaacagcacaagttctctgacagattgccgtaagtgtataaactggcagagtatgtgtggaaagcaggttgtcagtaaagacctgaactattcaccaagtaattctacatgcagaaatctattctggataataagctgaaataaggataatgcttcatgtgaagggatgtttacagcctgctattttgtgatcataaagaaccgaaaagaaaaacacaagccctccatgtcagacaatagggaatggttaagaagattatggatgagccaagggagtgaccattttggagctacaaagaaatggtatttctaaagaattttcagtaatatgacaaactacttatgtcaacacattaaatgagaattaaatgaaaatcatgcctaatctaataacttaagctcataaaacaggaattataagactagaaaaaatataacaatatttctaggtgataaaattgtaatttttttctttattcagtttcatattttccaaatagtctgtactttgtcaaaattatatttataataaaaatcattttattataaatataataagagctagtattaaatgttcaatgtaccatgtaagttttatgtaacaattttgaggtctggtttcatatttcacaagagttaatttatcatggtgaaagttctctctataaagggatcccaaagaaacaataaggggttttccatagaaattcttgagtaaaaacaaatcatttaacagtgcaaaccagcaacgttaggtggcatgagcgctccagatgctaaaccacaaaagcataacacttgcctgaaaagagctttgagattttctggtaattcagttcgaccagcatatcctgggttcatagtgataaatattccgactgatggcttcagtatgatagcttcgccaagaaatacaaatctaccagaagaagaatgctgatggaattaaatgtgttcattgaatatcaatgcacattgacaaatgcaaaccactgcaaaatgcaaattattattaggaagctgtttatgctgtgtaattttctttaaaattcataagcatacatattttgaatatcttgaagcatgtttattaaaaatacactcccttcccccaaagaaattacaagtatggcaaatatccctttgtattttagcatggccagtgtgctagaatataaaaatgaggacttgactacttcaacagttaatgaaaggtgatgccatctggacttcaacatgggctgcaat

SEQ ID NO: 61545 - DNA, 2007 bp, Bovine  19866881214417
  misc_feature (1)..(1): n is a, c, g, or t
nagagctctgctaagtgacagggaatgtgaaggttaagtaaatcacagtctcaaaatattacataaagaagccagattaattttatcaggacataaagattttattgagcatgatacctgtcacacttggctaacacttctgaaattctgtaaatttagcttcataaacatttatatctggaaagggattttctaggtaactgaatttgctcttcttagttttcaggtaaggaaaagggacaagaaatagagagcctaggaaaagacaccctcttgccagactcttcactgagtgacttacttaacaacattcatgtaccttcaggtttgtgttaataactgtgctaaagccttgtaagagatgtgaccacatatatgtaagtaacggaaggccttttatgagaccagtgttattatgacaaagttaagaaaaggaaactgagtgtaaacatgaaaactgtaacaaatattactgaatgggatctggcaatatataaaaatgataatatatgataaaatgatatttatcccaggaatattagggtgattcaacatctaaaaatcacagtataatccaccatattcagtccccataagaaaaccaaaagtatatgacaaactctgcagatgcatgaaagcatttttaaaaattcaacattcatgataaaaaattttcagaaaaccgagaatgtaagggaatttcttcaatctggtataaccttacatgaaacatatagcttacatcatacttaatagcaaaagactgaatacttttccgctaaaactgtgaacaaggctaatatattgccttttatcactgtttccaacatgagccagtgcaatacggccagacaaagaaatggtatacagattagaaggaaaaaaataaagccatctttctttgtagatgacctaataataaacataaattatatacagagaagattccaaggaatccacaagaaacccactagacctaataagtggtttagcaagattgcaggctataagatcaatgtacagaatcacatttctctgtactagcacaaaaaagaacctatgaaatgcttaggtgcaagtcttaagaaagtgtgtaagagctgtatgtcacacacttcataagcctgatagtaaaaaatcaggaattaagtagggaatctattcatgttcatggattggaagctttgatattgtttagatattaattctccccacattggccaatcacttctatggctgtcatctcctgccctgttgccctcactatacctatataatataaaacccatgtttggaaacattgacctttaagcagggagtgtctggagctcagtcttcttttttctgctgtctctctggatgcaccgtcactcagtcatatttttaatatcaactccacagtgatgactcccataatttcagatccctgtcttctccgaggactttattatataataatagcaccaccaccaattcctgcatcacctctgacccctttattctccttatcctgcctaacttgtccttttttatctgacatgtgtaagcaccatgagaaatccattggcatccttaatttctgagatggtgctagattaacacctaactggaaagatcaactgcaagtccgcattcctgcttccccaaactgcactttgtattcttgactttttctgattagattctcattttatgatccttggagaggacgaaatactggatgagtaaacaaaggttttttgagtatctctcaaaatttttttcatgatgaaacttggcataagttttgtattagggtcatagtaaaaactgctatgaaatcagctgttctcagtctttgttattactcatcactccttctcctaaggaaaaactaagtcctctaaaatttccattgtttacagataagacttgctccaggtgtggaaacagactgcttttctctatcagtttaggaatagaataggaattttaacaaaaattaaacttttaggcttgcttgggcca

SEQ ID NO: 61546 - DNA, 1031 bp, Bovine  19866881219162
  misc_feature (1)..(1): n is a, c, g, or t
ncacaggactgctatgggcatgaagtgagttaacacctataaagcatccaggaatggtgcctgcaacagcgagtgctacgtgcatgttagctaccatcatcatcatcatcatcacactactataagcaatacggctgagcttaacaacaaattataatagaaggacacttcagtccctagttgctttactatttcatttgtttaaacccttcttcctatctaaattattaaaactccttgacaatcagtactgcttctgcttgtaatatgcctcctacatggcccccacattgccaggagcataaaagtgactgataggcttcactgaaaagggccaacagtgcaggtatttctagagtttatattttttttaaaaatatacttttagatttctacaaaattctgaagcttttacaaaggtatgtaagacagacctcagatttagaaattcactttgaaacttcagagggatcaaccaacgagctgtggcctggcagcttttggcatccaagagataactgctgttgaatgaaccaagggattgtggctgtattcgacaagcagtgtgtattacttttgtatttctgccctagcaaatcacgacccacagcttaagagaacacccattgatcatctcacactgccataggttaggagtgcagaggaagcatggctcagctggatcctctgcttagagacttatgaggccaaaaacgaaggtacaggcggagctgtgttccctgtggaggcactgggagagaagatgcttccaagagcatccgggtggttggcagagtctgggtcctgcatctacgtgactaggggacccatttccttgcttgtgtcacctggaacctgccctgagctcctagaggcctctctctggtccttgcacagggagacctacttctcagagccagcaacaacacactgaatcctcacactcgaatctttccttattttctcttctgtcatttctctttgatgctcaccacagcaaggttcacaggattagactgggtacttgcaga

SEQ ID NO: 61547 - DNA, 1065 bp, Bovine  19866881249687
  misc_feature (1)..(1): n is a, c, g, or t
ntggtctttaaatgaggtcgtgcctttgaattgaagactgggtaacaaattagctacacaaagtaacaaaacatactttagcttaatgttcccagacaggatcttttaatctggtaggttggtggggctgggagaaggcagcatttcatttgcaagaaatccagagtgctttaggaattttaggagacacctggagatgagttgggaatattttccaaccttgggcaccagcattgtacccttgggagggaaggggctctgtggggttccccccatctccaacggagtgtgggcggctctgcatagaacagtgcctccccttgtttacattctactcacacagccctccgtgatcagctaaacagtgtcacggcagcattctctgttgttttcatggaaaggatgtgttgacacgcgctacctagctgtgaatataaacacgaagatgctgacagcagccggagcagacggctagcaggtacccacacttagagcgggcagatgtttaaccttgacatgagcagtaattaagcagagcctcggtaaccagtgcctccccaggagccaattaataatttggtgggggagatgttatatgcagatttccccccaaaccactgcagcatgcctttccagcctcccccagtggacggggctgagcaatcatttgtaacagagccctgtggtgtgcgtgtgaacaaattgtaattaggcaaattaaatgaatgctgcatgtacatcagttaatttctggtcacaagatagacagcgatccattatatatcaaagtcttcatcttggaggcagcactcacccacctctgcctacccctctctcttctacacccacccccaggaaaagccttggccctcacttaattctcattgagttacttcatcccagtttgtttatttctttttggcagcaatatagcaatatacacattccaagcagtcttctgactttcaaaagagaaaaaaatcctgctttaaaaagatgtttagaaaatgcatgcatctagcatatattgttctttctggatccagtagtgatagcatccatttc

SEQ ID NO: 61548 - DNA, 662 bp, Bovine  19866881333265
  misc_feature (1)..(1): n is a, c, g, or t
nctatgtttttcctttgtatggattctcagtaaattacttttgtatgagtcaaacccaaaacagacagcatcctctttaagagacttaagttcccaggataaatattctaaattcggagtcatgaagacgtcatagtaaatcagatggattgctaggaagcaagtgacgcaaatcacagtgataaaaaaaaaaacaacatggcttttatttttgcagtagaaccccttttgattcatcaattattttgtgaacagagcaactggcttctactaatagaaacccaacttccatgctaaagcttaaaatggattttagtagctccccaccaccaaaaaaggatgtaaaattatagaggatgaaagaaaatctgtgtatccccaaacttagtaggtactggaccgtacatcccaccggctaggacagggaaaggggctgctctcctcgttggacgggggtctccactcaggtttcgctcccagtgtcaagcccactggctctctctgggccaagggtctggcaggtaaggagccagttgtggtgtgctttaaggcgtgttctgagtctgtcgcaggagcacttggtgggctgcgggaggacagcctggcattatgagtgccctttggtgccctgtgttcttcccacaccatcagagaaaaagcta

SEQ ID NO: 61549 - DNA, 789 bp, Bovine  19866881354611
  misc_feature (1)..(1): n is a, c, g, or t
ngaggcagactgcatgtggcccatgggctgtaggcggctgacccctggcgtgagagctggagtcccccctcctcatggactgcccagagcagagcctccacgatgattctgtcattcaaaaatcggacctcagaggacagacggaaaggcatcagggctcatttaaattcagagaaaaagaaccagaggtccacaggggcttctgtgataatagaatttcagacatcctgagcatttgctgctgggataaataacctgtgggcagggttcatatcgtttttcatttcatcaagtcaagagcatgtttcataagcaaatgcaaatgctcaagagcttttctgagtttgtagcaagtggcaggaatttacatcctgtgtgtcccagtggcatggtgccaggggctccctctccacccttctcagacctgttggcctaagtctttgggggcattccctccaagaacccccaaactggactggaggctatctagggaagagctaaacccatgcctgcagctcatgttaagggaacggaggacaaaagcataaagtcttcaaaatcgtcatttctacatgaatagaccaatcaagcactgaagattcaagcatgaggatcaccagtgcgaagcttttcagatgtcaacagcaaaagggaaacaaaatcaagaggctggactgcctttcacctccaccctggttcactagcttttagttgccaattatctctcaacgctcctgtcccatcccctgtcatgtttgtctggcaagcatctaagcctctctctcatta

SEQ ID NO: 61550 - DNA, 979 bp, Bovine  19866882071709
  misc_feature (1)..(1): n is a, c, g, or t
ntagtcgtcttttctagtcttgagaaggtgtaaaatcttacgcagcacttacagggtttgatttcattctggcttccaaggtattggttttcattccaattttgcagtcattttcaacagcagtgatgtgctggacatttgtggtaaaagtcaggtggctggggtacttggtatggcagtgattcccactgcctgagaaccaggacaccaagtagaagagatctgtgtttctatgtttacagagagccaaccaagagagtagaatttaaacactttttattaatgtgaggaaaaaacagtttcttctttgcatttgactctgcattggatccagcattgttttccaaagcatcttagtggggaaaccctgcatttataatcactggatactggcactttgcttctttttatttttgccttcaccgtgattggctgcaagatgactgcaaatgagatcaaccagttttcattaaggggccatatgtagcaggaatgatgttcttcgctccatcctgtaaaagtgaaaaatacagcatagcatcaccattgctgtagctgtaccaggagccctctcctcccagctccccctgccccccaaaagaaaattagagataaatgaatggcagaataaataatttatgctaatgaaattactgcaattagtagttctacaatgacccttttaaaagccacagctgttaatgtcaggaagtgctgtcactactgaccttatcataagagaaagtgacaaattgagaatgcagggaagaccagtcatcaaagaggtctgttctggaacgattagagttttctgaaaaacagtgtgaattacaaccagctgctccctggctctgcaagtctcccatgctgtgccattttgttaagcccgataacaatagttattttgccccattgagacaagttgtctcgggcctcttccagctctaccggaaaccacttcttccatctcggatttaca

SEQ ID NO: 61551 - DNA, 1777 bp, Bovine  19866880373773
  misc_feature (1)..(1): n is a, c, g, or t
nagagctaaccattatatcagagaaacatgtgtccagaagtggcactgttaacatacagtaggtatctaccaatggaaacaacacccattccagggtacttttggctgtggaatcccagcactacgcttgggggcagaaggtgggtagaaaaataaaaatatgagttcagttcagttcagttcagtcgctcagtcgtgtccgactctttgcaaccccatgaattgcagcacgccaggcctccctgtccatcaacaactcccggagttcactcagactcacgtccatcgagtcagtgatgccatccagccatctcatcctctgttgtccccttctcctcctgctcccaatccctcccagcatcagagtctttcccaatgagtcaactcttcgcatgaggtggccaaaatatgagttaccacatactaaagaatcaacctgctaactggtacctatgtcatgattctagaaatgtactaacctgatgctcagatgagccagagctcacatgttttatggaataataatctgtcccactgggggcacacaaaaatcaagacctaccagagaagcaaaaatagggaatgaattatttaactgggataattttttaaaactaaacttttaacccttttatatatggtattaaatttaccttaatactgtagaattgtgtattaagacacgagaaacttttccacgtttcaacacattaaaaggtatatattttaaaagtatgtataagttaaaacagggatccaaggatatagagccaattctgcagcagagtggaggagacctgaacaggttccactgaggaaatgattcttccttaacaagatgggagttatgagaggtgttataaaggagaatctatacaactcggtgcccaaatgaggtaagtgaggaaaagcgggtctaggctgactcaaggctggctagactgactgaagagattaggtgaggagcctgactgggtgaaatgaggagttctgaacacagttcatctgtagagttgctgagacttgacctgctctcctcagcagggagatggcgtgtggtgggggaggcagactgacaacaaaagaagcaggtggtcagaaaacaaaccacgtaattaaaaaaaaaaaaaaaaagctgaaacaattctcatagactttagatcaataaggactttaaatgctaactgctctacacacaagtaacacgttttaaaaagttaactactctcatcatatatgtgagtaaactagaaacgttttgtttttgctttaatgaacactatttattcaagtggtaaagaatctgcatgccaatgcagaagatgccagagatgcggttcgatccccgggtcgggaagatcccctggagcaggaaatggccacccattccagtactcttgcctggagaagcccaagggcagagaagcctggtgggctacagtctatgggggtcgcaaagagtcagaaacgactgagcttgcaatctaccaccaaaatctgtccccaacccgcatatcaactaagtacacataagacaggtgggctcaaaagacttctgcctctgcaggcaaaaccctaaagaaatgtgatcgccatggtttataataacacatctcaacattaacatggagaagtgattacctgtactacaggtcttcgaaacatggcttctactctctcttcttccaatctaatctttagtcttttcctgaagaaaaagagattatatcctatagcaagaacacgatttcactgaagtcctaaattcctaacggca

SEQ ID NO: 61552 - DNA, 2421 bp, Bovine  19866880389510
  misc_feature (1)..(1): n is a, c, g, or t
nagcacaaactctagggccagactgcctgtgttcagacaccaggtctagcattggctggtggaaaccactttctctctctatgcctggatctaaccatcttgaaatggggacaacaggactgtgggcgggattatgtgaattaacatatgtaaaagatttggcacatcagcattatgtaagtattttatattatcaggattaggttcttttgactcacactgagggtttcagcaccaggagcccctctttgtgaaggtctctggctactccccagcccaggctgagttaggctccctcccctgtgcttccacactgatccggccctcacaccctcactgcactgatgtcaccctgttgtcactgcaggtttaattctgcagatcttgatgagggcagggtgtgtccccagggcctcacacagcaccttactgagggaggggtgagttaagatgctctggaaataggattacttgagtaagaggtgtgctaagggacatgcctatgaggtcaaagcgggcgggaacagaagaatgtagggagagccttcaaaccacaaggtaaggtaggtctgacatgtgtgaaggaggtggggaaggaaggaggtctgggtagaaggatctcagacctcagttcagttcagccgctcagtcgtgtccgacttttgcgacctcatgaaccgcagcacaccaggcctccctgtccatcatcaactcccggattttactcaaactcacgtccattgaatcagtgatgccatccaaccatctcatcctctgtcatccccttctcctctcaccttcaatctttcccagtatcaggggcttttcaaatgagtcagctctttgcatcaggtggccaaagtgctggagtttcagctctggcatcagtccttccaatgaatattcaggactgatttccattacgattgactggttggatctccatgcagtccaatggactctcaagagtcttctccaacaccacagttcaaaagcatcaattcttcagtgctcagctttctttatagtccaactctcacatccatacatgactactggaaaaaccatagctttgattagatggacctttgttggcaaagtaatgtctctgctttgtaatatgctgtctaggttggttataggttttcttccaaggagcaggcgtcttttaatttcatggctgcaatcaccatctgtagtgattttggagccccccaaataaagtcagccactgtttcctcattctacttggcaaacaatttatgcttatgaacaacctagagtctgtaatgcataggttgtcactgaggaactcctggctccagccaatctgaatccacacttccaaaggtgtacccagaacatgccaagggcagcccactgcacacccatgctggtactggcttccttacccaggaggccttttcacactcccatttgcagatcttaccccttcttcaaggtctagtttaggatctgcttttctcatgaaacttcctataaatatttgagcttttttaaggatcttgaccgtccaacatctcaataatgatatccagcgtgcgttctcagtcacttcagtcatgttgaactctttgcaatcctgtacactgccaagctcctctgtccatgggattctccaggcaagaatactggagtgggttgccatgccctcctccagggcatcttcccaacccagggatcaaacctgcatcacttatgtctcctgcattggcaggcagattctttacccactgagccacctaggaagcccatgatatccagcatttacatttaatcacttattgatctttgacattgttttcttttactgatatgtatttattatttgtggattaatgcgtttctttttgtgtacctgttttatgacacaaacataattataagcttcctgaaggcctgagctatacaattttttccttgtgtttcccttattaactgatacagagcttggctggtaggagttacttggcacttgagagcagaatgagctttaaggtcatctgggacttttactttatttcaatcacagtaatctattttaaaaataagtttttttcctctacaagattatttattgacccgttcatccctcccaccttgccatcagtatgtaaaaacaaaattttactcattgaaaaaagtgtcctgtttcttgtttgtgagcttgattatgtctgattgacagctgagacatactccatgtttttcacgacaggttgttggctcatcgtccctgatgaggctgtgcaagtgatgctcagggtggaatcttgcccgtggtcacagggttgaactccagagagaggaagaaatagcaacactgcagaggctgccaaacttaattcaggcaccacttggccttgatgccttttgtactgaaggatattaacataaaga

SEQ ID NO: 61553 - DNA, 1217 bp, Bovine  19866880402324
  misc_feature (1)..(1): n is a, c, g, or t
ntttgccacctctaaagatttctgctttcagggctaagaggttgacagcccctggattacaggtaccaagccctaagaggtgttcagaaaatgaatccctgtagttacttaaatgggttcaagaacactttggattttgtggtcttggagttgccatgaggaatgagaccctgtcttgctcacaccttcgtgaccagcgcctagaacaaagctgacacacgaggcaaggcactcggtgcctgtttgttgagtgaaagggcaaagccttttcacgtttccagcttcttcgcagtgatttgactctcctgacccacagctctctccctgatctcaggaaaagaacaaggggggctgccaagcaagtttgaaattaacctacattttgcaatttgtacaagaatataattagattccttctccagaggtactccattaatgtaatcgatgatagtagttactcagtatgtagccttaaaaaattgctgatgcctcataaaaacaaacacttgcctagtaaaattctctgcccaggactagtcacttatctgttttattttgtatgagacctggtatctcctctgcagcatgtccacttagagacagcagccaggcctgctcccttggaggccggaaggacccctcagtcatcacacctgtgaagtggagggctcttgctgctggtgggaggcatggaattgcgtggttctcaccatcagctagttctcccatgctggctagctggtgcttcccatggctgaccatacgatccagtcagcactgctattgccatacaacttaactcttttattttatctttttaatagacatgtaaatatgtatgaattcagcaccagttaaactcatgtaaatttaggggagccacttccttctttcaccctgtttcttccttctcctaccagaaagcattctctagccttggggtgtcatgggtctccagttgtcctgcctttaactgcaggcaggctgatgcccatcagggaccctgagcctcccctcagagacttgtggggagatatcagttgggccctaaacccgggagcaagaggctagtgatggagacatcaccccccggttgagaaaagagtgaagaggtcatctgagcacagctgtgagctgccatctctaataaccagggggaagtgggtgatgtcagttcctgcactggaaagttcttttgagtgacttggagcagatgg

SEQ ID NO: 61554 - DNA, 5655 bp, Bovine  19866880420550
  misc_feature (1)..(1): n is a, c, g, or t
ngaagacgaaatggcaacccctccgtattcctgccagacaatcccatgggcagaggagactggccggctacattccatggggttgcaaagagtcggagaggaacaagcatacatgcacaggaggaaaatagtagtttttccttctacagaaggaattgggaggttgggaaaatgaaagggaaagagacattctccattttgtattttatataatccttctgtatttttaaaaccgtgaaccatgtcaatgtctcacctatacaaaaaaagtaaatgatgatgctaaaaacaaaacaagagtagagatcacaaaaaagaaaatccagctctgcccaggatggttttgaggcggtcacctcccacatctgaaccacagattctcatccctgcccttctggctcccacatcactcttgcatggcactcagcatctgtgatggtcctcaacagacacttttccgttctccgccctccaagccttcctctcccccacaatttgagtcacccctctcttaaccttaaaagcagggctgtgcctttgcagagagacattacaatggctgacacagccagtgggtgagccggtggccacgagggcctgtctcaggctaggacaaggtcagaactgccacatcaccactcactctgccctcacctattcaccagtcctgccttgtcctcaggcccagggctcacaggccagccacttacatcaccagttcctccaggctgaggactccacctgccccttgccaggatggatggctgcatccctagccctggatgagccggaggcgacccagccactggctgccagcctcctgtacattgacccagcggcacacagcctgcccctaagttcctattgctttgcctgtcttctgtcaggatgccctgggcgctagatttcctccactccttgtattagtggctgccccctgggtacccctgcccactgccgggagagctctgtttcactcccacacctcccacagccaacttggtgaagctttgctcccagaaacagcccttcaagtcttgccctcggctatgttctagtacattatggtgagggagtgtctctcatcatttgatgttcattctaggctactttaaaacagctcagaaaacctctcgtgacgtccgcggccagttcgggcatcacggctatctggaagatgaactgtcactgcagtgtgacccttcagatctacgctggctccactaccctcttcccaaagaatatagtgacctccctggtttggacttcagttcttgttgttgagtctctcagttgtgtccgactctttgtgaccccatggactgcagcatgccaggcttccctgtccttcactatcacctggagtttgctcaaactcacgtccattgagtcgatgataccatccaaccatctcatcctctgtctcccccttctcctcctgccctcaatctttcccagcatcgagggcttttccaatggacttcagattccttgtcaattccatcatcaccaatcctggacctcctcaggcagcaggactcaggaacgccctccagctcactttttccaccagataactttgactgttggcagggttccccaggtttggacaagtacgtgaccttgattctctccaggcttatcttcaatccacagcacatcccagactttcagagcagcctgtaatttctgtatatcctctcatgtgagtacttcaaggtcacaatcaccggcaaagagcaatcagcgctcaaatgactgtcttaatggatgttgtttgcagcctctctttactagaaggtacgcttatttcttttttatctcctcgtagcacctagggaagtacaaggctctgcatacagatgtgtaacgtatggaaagaaagaggtacaaggctagaagtcagaaggcttagtccacgctcttccacttactcatcgtgcaagtctcgcaacttcccagtttcctcccatgtaaaatgaaagccacagcacctgctccacaaggctgctgtgaaagcttgaggagttccagtgtatgatggcaccgttctggacattatcatcagtgtactgagagtcctcttacaaacatcttatcaaaggcatacacgtagaagatacaggctcgagactatccaagtggacttgtgatgctgccacatgtcagatactcagggactccttaaagatgctgcagaggcaagagccctgacatgagggtagcccatgctattagaaggccacgtgagtctactcactgtccggagggaatcaggagaacccccttcctggaaaccagataaatcctgccctacccaaacttccttctaagagagtatgcatcaccagtttttcctgatgtttaaacagctgtatactgaaatatgtgaccctcaacccgaaactgggccggggatgggcaccagccacccatggcaagggtccagcataagatccaaaactcagccagtcttcccgcaagtgaatggtggcagaaacactgaaggaaagcagcggaagataaaggggtagcatcaagttaagctggtaccaagaaaagcaaacagaataatatacaaaataaaatgcagattaaagttacgagggaggcagggaagtaggaagctgggtagaaagagcagatgagggagaagcagaggcccggaaagactctttctttccggaaggatcccaggctgcccgggttctttatcttcccagctgcggtccatcctcgcaatcacctccctccacttgagtacctgtgttccttgaagtcaagccagtcagactagaaaaactcctagttcactgaaaaagcatccagtttccaaaatgcagctggaaactgcattttggtccctattttgaccacggttgttggcaccaccctctcagttcttggcatctacccagactctgtaggatcatctctggtttcctaacccatgaccttgactcttatgatgaactcaatgaactgtcaactgtcaccccaactcactgatcatagccgcccccaaactttatttttttttttaatagcatcaagtcacagtggacaggaaagaagaccaagttattaaggatccaaaaggttaagaagctgaagtttcaaaaggaaagaattctcaggagaagctgacctaggaccaaagtttacatttaatgtcataattaagaccatctctggatggggctcacgaatgaggtgctaacttaacatcagcaccccagaagcactgagagtaccatggtaacagcctaagctgtccgtgactacttggggcgttagacgtgtctgggcacgtctggaggattggtaagacagctgccatgcagagcagaaagagtgctaattggacttcagaacatgtgggtgtagtcccaggattaccctttctggactttccagaagtttatttgcacgagggacccaggagaccactggaaaaatatccatcctaagagaagggtcactgtgcacaagcctggcccaaggaccacggcccagggtgggggagggcgattccaagtacggcaggatgtgtcattcaggggtccccagctcctgggatctgtgccagagccctgggaacaacagatttaacaaaataaatggacgagccaagtgacagaagtccctgtaagaaagtcactgccacacacactcgaggcagcccatgctggtgacccacgaaacgggggtggggcgggggcaacggagtcccttcctctccagtgaaatgacaaccaggaggcgggctccgggcagccaggaccatagaaagctgggccagcccgtgtctggaacagactaggagggcagagaccccactcaccagacacgagcagcagtgggggagccaagtggtgggaacagaagaggctgcagggcaggagtcgctggtggagagcagagatcttgactccttctgaatgaatcacgagagccctctggggagccaagagccaagaacatgtggacataaacagatacctctaggatttcctgaacctgctgagaggaattggagggtccctaaagaacaatatggacatgaatctggggaaatagtgaaggacagtgaggcctggtgtggctgcagtccatggggttgcaaagagatggacatgactgagtgactgaacgacgacaagaaagaacaatagtgggggaagaaggaccttgaagatcaggatgagctaatccatgcctaaaacctaaaccaaaacaataaagcaattgcaggtctagcactcactccaattaggtacaagccagtcaacaaacgcttccacaaacaactgtggaagatgatggaggagacacagcctccaggatctcactctagaacctgtgtccccacaagtgcggttctcaccagtctgtgctgttcagaccctgtgagggagtggaactgcccagaagaaatccgtgaagaatgtcggtactttggttaaaaaaaaaaaaaaaaaaagaaccctcctgaaggaaagagttccaaggaagcatgggtaccaagagcccagtggggagagccacccagaaggaggctgagcccagagggctctgattccatcatttctgaagatgctattcctttgctgaggccaaacagggctgctctgtgccccaaggaggccagcatgtggggatgaactcggccacaggccagcactcagacaaccccatgaccctctgctcaaaacctgccccttccaggaaagaagtgaaagtgaaagtcactcagtcatgtccaactctttgtgaccccatgggactatccaggccagaatactggagtgggtaacctgtcccttctccaggggatcttcccaacccagggattgaacccaggtctctcgcatcacaggcgattctttaccagctgagccacaagggaagcccgggaaacacttgcttatcagaggtcaaaaccttatcttgttgttgtttagtcgctcagtcatgtcccaccctttgtaaccccatggactgtagcccaccagactcctctgtccatggggttttctaggcgagaatactagagtgggttgtcatttccttctccaggggatcttcccaacccaaggatcgaacctgagtcttctatgtctccagcattggcatgcaggttctttaccactcagccaccagagaagcccacataaccttatatgggttcacaattatccatcactcctgacattaggtattgggcactgaactaagggttagggtaagaaaattagcaaaatacattctcattttcaacattttaaatctaatgtggacaagggagcagaaaggaggaagaagaggaaggaagctagaaatcatgtccagggaaacatcacatgagtaagcagaaataattggtgattaacacatcaatggtcaaggtataaacaggtacttctaaattgtttgaaatcaaacaattatacttacacgtctaatatgctcaatcaactattttttcctaagtaccacaaagaagaattccaaccccaaacctgtttgaagaatgcaaagttctaacttgaatgaagcgctaatttttaccactgacgtccacgtgcattgctaacaattaagggcaaaacaaaggacctggaatttgagagtgagcatgtggatgacaggctg

SEQ ID NO: 61555 - DNA, 1896 bp, Bovine  19866880486528
  misc_feature (1)..(1): n is a, c, g, or t
ntagattctggggtgttcattggatactagcttaagtgagacagtgactattagccatagaagctagttccagtgagtagagttatgtacttttggccatagtttagcattttgacttgggatactggattgtgggtgacaaataatttcttcccctttacccagctctgttattggaatagacagacaccagtgtgtccatttctgggactaagttccagccaggctaatgtacacaacagagggaattacagtacctgtcaaatggatggattatgtatcttatctcaagacctttttagggcttaaattaaaaatattttcactgtaactccttgatatggaatgcaagactaaagaaattcacatgtggaactgcaaacatagtgataatcaagatagcatcttttatgtaaatatataaataagtttgggcattgaaatgtacaacatttttctcctctgtgggctatatatatatatatacacaaaagaaaaaaagtctgtgtttagaaaaaaataaaaatagatttttgccatcgagaaataagtttatatttctgggttttgccaaccactattcatggtcaatttggttttctaagtgcagaaaatactcttttttattattatctttatttttcattttaggctgttatccagaagttcctatatctaggtaggtatatatgtctctatgctaaataaaatcttttgttgtctcttggtatgctctctgcaaatattgtaccatatgttaagcattatgtgtgatcatttgcttagacttactgtttttagcattccttagcactgagccctggagaaggcaatggcaactcactccagtactcttgcctagaaaatcccatgggcggaggagcctggtaggctgccgtctatggggtcacaaaagtctgacatgactgagcgacttcattttcacttttcactttcgtgcattggagaaggaaatggcaacccactccagtgttcttgcctggagaatcccaggggcgggggagcctggtgggctgccgtctatggggtcgcacagagtcagacacgactgaagtgacttagcagcagtagcagcagcagcactgagcccatttatggtataatatttaaaggcactatttgaaatgaacatgctctttgagaacatagtattaaaacctaaacttgaggaatggcaggcaagacgagatcatcctatacttcctcctacacttgttctgacccttcggtctgccccaccacattgtggtaagtatgtggtggagtctttccatgcatgcttttttaatatgttgtttagttgctaagtcgtgtccaacgtttttgtgaccccatggaatgtaggccaccaggctcctctgtccatgggatttcccagacaagaatactggagtgttgccatttccttctccaggggatcttcccgacccagggatcaaacccattgcattggcaggtggattctttgccactgagccaccagggaagccagtttttttttttgttgttgttgtttgtttgttttttaccatacattcaattctattcactgagagagacagagaagtaaatagtatagaagattctattcttcctctcactccattgggtgacctctgagttctgagtgaatttggagtggaagagacacgtggtatttcttgtgaagttcaattccttgaagcccttcatctcaccatgctgagtattattttgggacgtaaagataagtatttcttttacaactggggctggaaatggaaaacacttattctagctaaaaggacagtgatgggagggtctattcaactttacgtgaattctgttttaggcatgtatttcaggctctaatcctcagattagatgctgcatttt

SEQ ID NO: 61556 - DNA, 1617 bp, Bovine  19866880506924
  misc_feature (1)..(1): n is a, c, g, or t
naggtgaaggtattaatacttcgcacaagaaagggagtgagtgcccatatccactctttgttcaagagcaaaaggcttccctgtgcatgattttctagttgctaatgcaaaattagcttggggtgaagatcacctcaaatttaatactaaagtttatttgaacaactcagagccatgagatgaaacaacaaagcaatcaaactcctaaaacatggatttagaacagttagggaatcccgaaagagagaaattcgttcatagtgtctattgtcattggcatccgtgacaacatttcagaatgttttctgccccctacttctactaaatgtatcatgcctttgtcactttttaatttcacgtttctttttggtatttctgacatcataagtttaagtgacataacaaaaaagcaacctaaccatgcaaattcatctgcaagttatactgtgcatatttggaggggagggaagaaaagaaatgtgatcttaaatttgaaaggatgaacaattcaactctaactagagagatgaatatttaagtgcaatacctgagacggggaataacaatgcacagggtatgactcagctgggctaaagagacaggctttaaagtacgaatcaacagttttaagaagatttgactttgagaggtaacgactgctctgaactgatatccttggggcttattcggcttaggcatgaatctggctttagccagagcttccaggccacctgcagacatgaacaaattcccagaacgccaaccagtccggttctgtgttctttggactaatccagaagtaaacaagtctgaaggggtgggcgttggaactgcttttcaccagatggttaacttccttgagttctattcagagttggctggcagcctgattcatcccgatagtgagggaaaaaatagccaagctgcactgatgcaaggtgctgggcaagtcccctggaacagcccaagacttctgcacggtggagataaggcgggttttaattgtttcatattaaacggcattacctgagcttcttgacaggctgctctccttagtaggttatcactatcaaagtaaacaaaagagaaggaacgttagctttaataagtaggttcagatccaaatcatcgttttttaaagtaaatataactctttaaagtagtcaagtgaacgttccttaagacctgtaacaaatcacgggcacatctgaaaggtactttctccgaatgaaatccgtgttaggagttcccacacaacagcaggcagaataatccccactccctttaagatgctcacatcctaattcccagaacctgaaaaggttaccttatgtggcaacagggtttctacagacatgattaagttagggtctggagatgggagagaattctggatgatgtaggtgggcccaatggaatcgcaggggtcctcaaaagcagagaaacttcagcagcaaatgtgaccaggaaaggatggtcgcaaaggtgcagcctcgctggctttggagatggaaggtggctttaagtcaaggagtgtgggtacccaggaaggagaggggttctctccggagcctccaggaggaacgctgtccttgctgacaccttgatgttaaggga

SEQ ID NO: 61557 - DNA, 3009 bp, Bovine  19866880558768
  misc_feature (1)..(1): n is a, c, g, or t
nccatgagaagcatccccgaggggaacaggatgaagcagtagttacagaattggtgccacaggagggtgaggaagagccctgtgatcctggctaaggactcctaggtctaaggactcctaggctccctcccacaccccacgatgctctatggataaacagatcccttggatccaggcttcagacaaccaggctcacaccggagcatcgccacaaacatctgcttcagcttactatttcccagaatgagaacataggagtggccagcaagatataacattgcaattacttctccaatctttgcaatcatcttagttgctggtaagaaataacctggatgttaaaacataaaaggaaagatagtagagtaggaagagaaagaggaaggagaggatgactctgatggccctcctgtgggcctcggtactgagatctctggagctggcacagtcttgatgcatctgccgcatatgcctccccagggagaggataagcagaaagtaggagattagcgatatgactaggggagggaggtcccacagagtcccaagaacatggatcagtttatattctttttctttctttctaaaaagttcagtcatattcccggttctatcaattccaccaagaacagaatagatcttaaattcccggatcagagagatggcactgcaacatgataacagcagggtactcaacagcatccatacaaccaccctggaaactctccatttgagccagaggaacataggatgggagaaactggccactttcaggcagtagaagacactgagacaggtggtaagccaaatgttcagatggtttgtaaatgtccagaaaacatcaataatttgcatgattatcccttcatcatgtagtttgggaaagaacaccagtaaaataccatcgatcaagagaatccacagcaaaacaatcctggagacagccaggttagtgataacgaagtcatgcaaagagatcctcttgctcttgaaccagctgctgccattgacccaccctatgaaaccattccccagcattcccaggatgaactgaatggcggtcagaaccagaaaccccatattgctgagtctcaacatgtttgctgttcagcagacctgatctttgttctttccattgagaaacattctcttgctgatttgaaattcctgttaatcacctctacctgctgcttctctgtacctgtctcttatctctgcccagtttggtctgttgtagacacaacacagcaaaccttctcctggctctttcaggttagtctgtcctctttagaggatgacttggtttgtcacattccatctacgatctaaactcagaagctctttgccaaaatgcaaatagagtagtgtccagtgtcacgcagagaagaaagagatgagtcacaaagaagatggaggatttgggctccatttcaaaggtggtagggctctgagtggaaagtggaatggaaacccagagtggaaaggtgggtcaccagaagggtcacacagaatcactcaggaggaacgactcagggacacatacaaaagggggaaatatcagaatttcaccatatggctctatcacaatcatcctggagggaggtttacattcataaaacaggaaaaattcagagtcaatggtcctggatcagaattaaatggagtgcctcttagtgcctctttccttgttttcttagagtatgcttcacatgaaggggctacaagctcatctctagggagtcacgacatcggaaattcttcagtacctgaatgtttaaatgataacaataatgaagtatcgtaaaagctgctcaaaggatggattttttcagagcgcctgaccactgtattgacatgtcagcaataattcaggctaaccaaaaaaacatatagacactctctgtgaaccaaaacagtgccttacaaatttcccaggacagtgtgcttccatgtatatcttattagctggtgaccagaattcaatttctcaaatgactttgttgaatatcattatcactgccatcattccatcaggtatcagtgataggaattatgagcccacagttataactattctcatttcttaacataaatagtaaaaccatcatactataactaaaaccacagcattactaaaggctgctgccaaaatgtacattgaccatggtctaccaagtaaccacatgtatttccattctattaagcctgaagtttgttggagaaatcaatactggagctgtgatattgtggcaacccaggctgcagatacctaaaaagaatactaagatcacacacttgctctcaaccattcttttcagtaaaagaccaaagtaagtaaggtaagtcagggcatgggcaaaaataatttgcataccaaggtcattccagaagtgtttcaaaaaggattattttttaaatgaagacagagtattagggaaactataaacagatagtttaggactccagggcaggaacagagggtactacaatatgataccactcctggagaaagagctgtgtgtagagaggacctccagaccattagctgatattttctcagctgggagaccctgaagagagtcagctgagagaataccagtcagcagactaacaaggcattctcagatcatcttccaccccttcattattcttggcactttctccccaaggacttagacatcatggtccaagtctctgcatcattcctgcttctgatactactctgcatgacaactgtgtggataaatgttagcagtacactcagactgacatcaagacaaatcttagacaatatccatttataccaatcaaagttcactaatctgaagagcacagaaggtaatcagcagagttgagtgtacacagcagagagatcagcaatacatataaaatgataagtggtctgcagcattgcagggcctttaaagtcctgacctgaagaatgcaccatgtccagtaataagtctacttcagttcagttgctcagttgtgtccgagtttttgcgaccc

SEQ ID NO: 61558 - DNA, 1434 bp, Bovine  19866880584268
  misc_feature (1)..(1): n is a, c, g, or t
naattgcagcataagcaaggtgagggtatgggtattgtattttttttttcctaaggaaaaaataacagtgcagaatgaaacctttcaaagaagattacaaagctgttttctttctcattactcatcactttcttcctccgcagaattccaagtcctattgtctcaccaaacagtgaaaagagtaaaatgtaagaaccttccagaattaacctaggctttgtataccctccttgttggatgtgtgtcccttttgtgctttggtttggtagaaattaaccaaagagtaaagaaatatctggggtcccatatcgggatgctaattagttgttttcttgtcaaaggaattaaaaagatgtttctgagagaatgtctgtttgatttggaagagaacttttgtctcaccccagttttacgtggtgtccccaggtatctccaattagctcaagaggtgttacaccattaaaaaaaaaaaaaatctcaaagtgaaaattagtttgctttggtttaaaacatacatgcaatatatcccttcaggaggaagaaagctattataaaatctggaaaacaatttacaaaaagaacttagctccctaactgctcggaaggaagtctggtgccctatactgtctgaaactgactggaaaatagagttgttgttttaattgcagttggcatttgcaactctccaggtgaaggaagtcagcttgctggaacatttcttttggcattagaagctcaggaaattaataagaaagaaccgaggacaaagtggtacttaccgattaaagcacacttctggaatttctcacggaccctcaggtaacctttggtttgtagacattgagcgattgctaagcagagagcgctgtgctggtgcagagagctcccttctctaaaggactctgggcttgctgggagtaggaaggaagcaagagagagaaccagagttagtggcatgacggatccgatcctcagtgtgttgggaggtcagagaaaggaggggccaggctggattggagtccagaaaagagataccatggctggcccggtggtgcctgatggggtgccttgtttgccggtgagcagagatgactcgaaagggcattcaaaactgaggaatagtgtgagccagagctggaaggcaagcagtgtgttggcacattgggtaggtgggtagtggtacgtggaggtgactcatgagaggtgaggcaggaaagctgagcaggtgctgatctgtgaaaagatggtgctgtttgagtctggaatgtctttcctgaactcagtttcctccatcctttgctctccacacccttccccttgtttgggcgcacacagaaactggttgggaaatgttgctgtaaacagtgagtggtcaatggtgctttgatcagaggatggcatgtctcagaagaggattatgtaagaacttatttt

SEQ ID NO: 61559 - DNA, 1597 bp, Bovine  19866880642908
  misc_feature (1)..(1): n is a, c, g, or t
ntacactgataatatttttttccccccaagtgaggaatccagtccaggagaaggcaagggagaacaagggctgcctgctaaggtgagcactgctctttggtccagatgttgtaacacagccatttcattctaatacctcttctttctccctccctccctccctccctccccaaaccttgacacttgtagtaaatatgtcttgcaggtgaatttatctggactgtaaccagggtctatattcttagctagttgttactttatcagacagtgtctaacatctatactgctgaatcattaccttggactattcttaaattcaaagctactgtttctgtctttgatctgggggaaagttctgtattcctgggatatagaagtaaagggaacatcaagatatctaaggtccaaaaaggaaaaaaaaaaaaaaaaaaacagaaaaatagcgtaaagccagaggtttatatgtaaaagttttagctcttaaatgtgtcaatatttattgattttataatgttcacaatctttgatctaatatcactcatttgataatctaaactaagaaaataatgccgtaaatattaccaccagagatgtttgtttcagccttaactataagagcagaaaaagaaaagaaaataggggcagtaccaaatatccaataatggaagaatggttatgtaaattagaccataaagtcagtggaatattaaattgccatcaaggtgacatgttggacataggcatgttttcatgatattataatgttcagtgtccgtacagggcagggaggacaatggggaaggggcgatatggatagtaagctggtacttggtgtctgagatgaggatataagggagcaggtaagcactaccagagccttcaggcctctgatcagaggtgaggattcctcatgggaaacaattaggtatgtctcattctatggcatcatttcacaaaaataatcttactgatagaggagacagagaaagggcgggcagctggagcaagtccagaggtggaggaaattgagcttgagactggtaagggcaagggaaattatcgatcttgttgatgaagactgactgggcttggatgttgaaaatgaagagctggtaagagtcaagattttttaaacatttaaagttagaaggaaaaagttcttgctaatggagatattgggaaaaggtgatttcacagggatgaatcagtttggactgagattcttataaatctatggatatttccatcatcagctactgtttactgagaatttatatatattcgtgatatatgtgattctcatataatatttgaaaggaccatgagacatagttgctctgatcctcatctgacaaatgagaaaactgatacaggagttcagtgacttgctcgagttccttacttagcaatgagtgatgtcacggttggccagtagggggagcggttgctgcagctgagcacacagtctgaaataaatcaatttgacaattttgttctctagactaaggctttgggggaagcaaactaaaaagtatgtttattgcacttaagatgaaacattagcagccagagtgtgagacaagtaagcaagaggcaa

SEQ ID NO: 61560 - DNA, 1081 bp, Bovine  19866880689490
  misc_feature (1)..(1): n is a, c, g, or t
ncagagtttagtattgactataattaaggcttccctgttggctcagtgggtaaagaatctgcctgcaattcaggagaaacaggaggcccaggttcgatccctgggtctggcagatgccctggagtaggaaatggcaacccactccagtaatcttgcctggaaaattccaaggacacaggagcctggcagactatagtccaaggggtcgcaaagagtcggacacgactgagcgactaagcacacacacagcaactgtctagctttcatagggatggtagagggcccattgcaatatccacaatcaagcacgtttcttgttaagcccatcagggtttttagattgtgaaaattagaatcaaaacaagtctgctcctgaggtaacggacacctaagatgcctctctacatatatcctgttcaatgaaaaaaaacgtggacttgggcccaggacaaccaaggttctggtcttagatctgctatcaccagctcaactttgggccaatcacttaaccttttaaaggcgtcatccttgttactgtatcatatagaggagttacaaacattaaatgtggtaagatagtaagtaagcaagcagtgagcattcaacaaatgtgaataatgcctcatatctcatctttaaagaatttgtatgtgtgttattttcagtttcctcaatgctttcccgtctcttaggactctggctatgcatgaagtttatgcccatgcggtgctgggacaacacccccatgtggtgcgttactactctgcgtgggcagaagatgactacatgatcattcaaaatgaatactgcaatggtaagcatgtgggctcatatctatggagagggaggattagcttttaagtctttgggaaaaaaaaatctttgctttcttcttttacttaatagcaggtatagcagaatcatatctaaaagtctgtactactgttttgcttagaagcagagagctggaggaaatgagttgagctggaaaggaatttcaggcttatgctgtaaggtgcttctttcaaagctgatgtgtagttggtacataggagctatcacgtccttcacactttaatta

SEQ ID NO: 61561 - DNA, 1493 bp, Bovine  19866880767987
  misc_feature (1)..(1): n is a, c, g, or t
nagaaatactactgatttttattctgtattttctatttcccatttgttgatttagtgttaaagaaggaaagtttttactcagccattaaaaagagtgaaatattcacactataaaatagataataagaacctactgtatagcacagggaaatctactcaatagtctataatggctatatgggaaaagaatctgcaaaaagagtggatatgtgaatatgtgtaactgattcactttgctatacacctgacactaacataacattagaaatcaactatagtccaaaaaaaacattttttcaagaagaatgaggtaacaacatttgcagcaacatggttggacctaaagagtgtcgtactaagtggaataagtcagacagagaaagacaaatatatgacaccacttataaaaagtgaaagtgaaagtcactcagtcatgtccgctctttgtgaccccatggactatacaacccatggaattctccaggccagaatactggaatgggcatcctttcccttctccaggggatcttcccaacccagggatcaaacccagggtctcctgcattgcaggcagattctttaccagctgagccaccacggaagcccaagaatactagaatgggtagcctatcccttctccagtggatcttcctgacccaggaatcggaccggggtctcctgcattgcaggtggattctttaccagctgagctagtaagcagaatctaaaaagaaaaaattgatacaaacgaacttattcacaaaagggacacagactcaaagacttaagagaacaaatttatggttaccagggggagagactttgggggagggacagattgggagtttgggattgacatgtacacactggtaaatttaaaacagataaccagcaaggacctaatgtatagcacaaggaattctgctcaatattgtgtaatagcctaaatggaaaagaatttgaaagagaatagatacatatatatgtataactgaatcactctgtgtatacctgaaactaacacaacattgttaatcaactatactccaatataaaattttaaaaaaatttttaaagaaggaaaaattttaaagtcagtcctctttgggagagctatcaaaaaattatctcaaaacagtctcctgaccacccctctctccagctcacaggccctgggctcttcaagcacatacagtcttccacaggattctctgacatgcctgcttcatcctggggttccccatgatcagtatgacagaatgaagaaaagggtaggtggccatgagtgtctcagagatgaagacagtgaagagatctgcaggaaaagtcttggagctgatggagaaggggctggccaggatgtagaccatgtaaagtacaaggaaacagcccaaggacttcaggacagtgatatgagccttggcctgagcatctcttctgccggctgtatggaccttcatcttcctgtagcgtctatacaaagagacacagca

SEQ ID NO: 61562 - DNA, 844 bp, Bovine  19866880770997
  misc_feature (1)..(1): n is a, c, g, or t
naaatttaaatttagttttatttttattaatactttttaatccaagtaaaagtggtaataaaatacaactaaaaatgtcctaaagaaaaaaggccagtcctttgccgcttattttccaagccaactttttagttactttggatgttttttaattgtttcctcattttaaagtgatacacttatgtcacgatgtgttagatattacatttaaactttgatatcattgattgaattttagtctttatatcctatgctgcttcatccacctctttatctcaatataattatatcacaatttttggttaaaatcccttatcagtatttacattattatgactgtgtaaatatcatttattaatacttctgagctagatagtgtactcagattctatttacttctcatacattttattttcctagaggtaataaaactgcctttcaaaaaattgctccatgttttatgtatcttttgctaatttctccccaagattctttttttaatttattttaattggaggataattactttacaatattgtgatggtttttggcatacatcaacttgaatcagctgcaggtatacatgggtccattccatcctgaacccgcccgcaacctccctctccctgagattctaatagagctgtcaaatatctatcaatcctgttttccaaacagctcaccaggagagagaatctgtaagttctgtttccccttctcacatccctctttcgttctgctctggaggctctttctttagctctttctttaggccggtagtgcaaacccagtaatccaaggactttgaccactctcatatttaaaatccccttttcattaatgt

SEQ ID NO: 61563 - DNA, 591 bp, Bovine  19866880776028
  misc_feature (1)..(1): n is a, c, g, or t
ncggttcgtcccacttttccccatagataggatcatgcatgtgcctgtgcacttagtctcgtcagtcctgtctgactctttgcaaccctatgggccatagcctgccaggctcctctgtgcatgggattctccaggcaagaatactagagtgggttgccatgccctccttgaggggaccttcccaacccagggatcaaacccacatctcttatgtctcctgcattggcaggcggattctttaccaccagcaccacctgggaaaccccagatagggtcatatgtgtacataatacctaaagttgctacaactattgttcggccatgaagggagccagccccagggcaaagccagctcacagagggtgagcaggaagagacggaaagaacttgggtgcttggtggcatcattgaggcaaatggttggactatgcctggagtttgcttaaacttggacatcctataatgtgaaataataaattccgttattgtctatgtcagagtcagcgtattctgttccttgaagccaagagcactgacctgataaagtgcaagtcatcagatctcggtagtagcagacacagtaggacattt

SEQ ID NO: 61564 - DNA, 895 bp, Bovine  19866880823556
  misc_feature (1)..(1): n is a, c, g, or t
nttttttctttcattgcaacctttctggacataaacaaaagaagagaaagtgttgctggtttaattactcattgctatcgcctgtaagagaaaaagaatgacaaatatcacctacccatccgtgaaacacgaatatgtgaaactaccatctccttgaagaagagagaaataaatccctattcaaatgagaaaaatctcacttttggcagtagagccagtttcaactttatatatattgtgcgtgtttattagaatttaacaaagaagagaaatttcacgtaattagtcaccagaggatacccacacaaccccataaatgtaagagaggcatattgacagtggcataaaaggaaacgctaattaaattccaatttcctccaaatactgccagatcattcaggtataagctcacttcctgggttgttgagcatttactcaaatgagcccagattccagattcatggtgctgcgaaacacagaggaatctggagcaaagcctctcgtgagcacaatgacgtgtcctccaggcgggctgcgctttgcacagcctagaagagtacagtggagtcagagagatggggaaggaggtttagttaagggaagtgacaggaaccgctgaggaatcttctagaaacacagaaatgtaagtcaagttaggagctgtgggttgggaaagacataaaatgaaggagaaaggtaaaaggagatagagagaggaagagaaaagaggaaaggagaatggccatgggggctggtgggggttggatggggcgggcggtgtggggaacgctcgcagggacagagcactgggctctgccatcctgggcagttcaaaaacctggtcagtgttgggaataacagcttctccccaccatcttcagcttgtcccttagca

SEQ ID NO: 61565 - DNA, 2652 bp, Bovine  19866880849763
  misc_feature (1)..(1): n is a, c, g, or t
nctgtcctggaaggctgcaaggcaccaaggagtctcccttactgtcctagcccagcaccccttcacttagtcctggctctgtctctgggaacatcgtgtaaataaaaccagacaagtttatctgtgtcctgacagatgcccaccattcttatgtgccagagagcaaaaggctgcctgatagagacttgacctctgggccgtggaagatgccaacacaaatgccagcttggaaaagggattaatgatgtaaatggtctgagggaaggaaaatgctattagtactagcttggctcactgagaagggtccattaattcacatataggagttccagggggaaaaatgttgccctaattatgtcttgggtaatttggccatttacatggctaaccaatttgcagcttggttcttcctcgaggtatcacatctttattcagtactgtcccttcccacccggggccaggctgctcttccgatatatgcaacattgtggaggtgttagcttgtcttggctgatcgcgaccccgcctcctctccagtcatgtgaccttgtagctcttctgcgcgattggaaatgtgtctcgctggagttatcaccctacgttagcagaattcttgtagcctccggaagatacagggccagataccatgtttgtagcatcttccatgaatagctgtgatgggtaaggatcagctttgtcattcaattaagggcagattcagaacctatccaagtcccgttctggtgagatgcctgctggagaagcctggtacataggaaaacacagtgccctgctctccaggaaggacccatcctccggagatggccttctcatacccagtgagctgagtatctggaccttgccatgaacatcaccctcaatcgtgattgactgataggctccaagtgactgtgctgatgtttttcccaggatgccagacatgtctccaggctttggtggagagagatcttctggatcaatgactatgatttttgcttccaccagtccctaccacctaatgcctttattttcttggactccaaaatcacttcaaatggtaactgcagccatgaaattaaaacatgcttgctccttgaaagaaaagctatgacaaacctagacagcatattaaaaatcagagacattgctttactgacaaagatgcatatagtcaaagctgtggtttttccagtagttatgtatggatgtgagagttggactataaagaaagctgagtgctgaagaattgaggcttttgaactgtggtgttggagaagactcttgagagacccttggactgcaaggagatcaaacaagtccagcctaaaggaaatcagtcctggatgttctttggaaggactgatgctaaagctgaggctccaataatttggccatctgatgcgaagagctgactcattggaaaagaccctgatgctgggaaagattgagggcaggagaaggggacgacagagaatgagatggctggatggcatcactgacttgatggatgtgagtctgagcaaactccaggaggtggtgatggacagggaagcctgttgtgctggagtccatggggttgcagagtcagacacagctgagcaactgaattgaaccacctaaggcaggcaaagacactgaaagcgtgactgtgagaaaatgtgatgttcttcccaaaacagcaggaagaaaagcaacaatgagtatttattaacaagatctcttttaataataatagataaaagctattatttttcatatgccaggcttcatattgagtgtgctgaacatatttctttatctaacttttacaataacctaagaggtaatggatatcatggtctccattttacaggttatagaaaagaggctcagagaggtttggtggcttgtctgatcacaaagccagtaagttagtagaagcaagattccagtcaggtttttggattcaattgtccacgttcttttggcagctcatagctgcttagggactagtgttcattgcagcagctgaatgtttaggatttaaggtaaccaacgttagttcagaataccagtgagcaacattatagggttgttaattgattccatttctaagagcgccacatgtttctcctctttctcttcctgctttgcagatctttcataccctgtattggtgagtcaagatggaggtagaggagaatagaaagtggtgactggaggtgggcaggcagagttgtcacaggatggaagagctccatcttttgtaaccagtcctgttgttcttttgagaaaatggcagtgaatttgctccactggctctgtgtgccctgtgctccccccgcccccatgcctcctctctctttttgtccccaaccctccccccaccaaatgtttctttgcactccactcagtcctgtactattgccagattactatcccaaagtaaaaatcagatcacatcagctggggcaaacatcttttatggtctgtggcatttggagctttccatggtgtgaccccaagtcactttctggtcttgtgctctgccatcacttccctacactgaaaacagggagagcagtagcaatagtagtaatactaccagtagtactaatactactactaggagtaaagcagcagcaatataggagcagccagggtcacagaaca

SEQ ID NO: 61566 - DNA, 1688 bp, Bovine  19866880887517
  misc_feature (1)..(1): n is a, c, g, or t
ngtccttgccgcctccctgtgtctgcgtccagcccagctttctaggtctcacggcctcactttgttcttgggtcattggttgtgcaggtgtggctgctccagtgatttcaggcccataatgatttcttgcgccttcttgactctcctcaccagtaaatagtgatccgttcataccatgtcatagaaatatgtttgtttgtcatcgtctattctatttgggggccttgttttctcagaagcccgcaaaggcaagaattttgtactgatgatattgcttctgtttcctccatatacatcgtcagtgctaaatgagtgcatattggtttgaattgaatagggagcagttaagatgggctggtaggtgaaagagacattttaagagagaagtctactttatgctacttttctaaatccaaccaggcgtctttttctcttcagtagcttttaggaatttagcaatatgaagtagaccctctttactcccagatttccatttcccatgttgaagctgcataacatgagtaatgcggaatgatgctgatttacagattttaattgtgtgtttgtgcgttgagagagaacgcggtgtacagcatgcagccattcagctcacgagtaatacattagcacccacacccgcatctcttcgtggctttatcactctccactcattcagaatgtgaacttaactgtgttccacggtgcaaagtacatattacagtgatacctgtgaatttagagattcaagaagactctgattatatatctcataaattgcaaggatttagctgatgtataactaattatgttctgtttgacgtggtattcaaatgcagattaaaaacttactgtaatacttttttatgctaaaccacaatctccaaacctccagagcagacacttctggtagaggtgtaattctaatgtattatctgtcctgaatggtatctagcacattgacagttttcttaatagtctaatcagatttttatcttgctcttttttaggtactggtatcttgggcctctaaaaaccaaagcagcccactttttcagcactcttaaggtaaatgcaggctacagtattgacatttgacctctggtattttgttattcctttgtgatgtgtgtatttggaatttttaaaagtttcttgctatagatgtatatggcatgctcctaaaatggggcctatttacttacacacaaatccagaaagcattcctgttctgatatttctcatctgccaacttattctctattaccaagcccatatttaatttcattttagtatttcacttccctttgttcattcactcttaaccaaacaaaccttgaacacagtgacctatatctcattaattacttgcaaatgtgtctatattagtatcgagaagctaactgaagatttgtatctgaatacgccatgaaattaaaagacacttactccttggaaaaaaagttatgaccaacctagacagcatattgaaaagcagagatataactttgccaataaaggtccatctagccaaggctatggtttttccagtggtcatgtatggatgtgagagttggactgtgaagaaagctgagcgccgaagaattgatgcttttgaactgtggtgttggagaagactcttgagagtcccttggactgcaaggagatccaaccagtccattctaaaggag

SEQ ID NO: 61567 - DNA, 1109 bp, Bovine  19866880911652
  misc_feature (1)..(1): n is a, c, g, or t
ntacagcacaaagaggtcctcttcacaagggttgtaatcttcttccacctcctgggaatataacagcatctgcctgttgggaaggagatgaccatcagcttctggcacagctacaaggacccccaaggccccaggctaggtcactgggcgggcatctgcatgggtcactgcctctcaaggaggaggctgaaaacccagagcaacaccccccaccgctgccccggccaaaggcagggagagaaggggcagcacagggcttggagtccagggctgggcctggccctgggtaatccaggacgagggacagtctttcctaattgtcatacaattggggtgaggccatgaagccatttatcccacccctgataccagcgtgctgttccaggcttcacagattccagaggccaccagaaaggagtcagcccaggcatgcctgctgcccatcagtataggtggggagcttcctcaaccccccgctccctgggcagatgggcaaaaaatgtgcacagagggaaagggcggcaggcagcggagctggaccagagcccctcggatgtctggacaggggcggctccccttcccccagcctcacctctgctcgttgagccgccggtacttctcccggtcggcgctgttgatcttcagcagcggctgcaggtggtcgtggtgcgtcttcacgttctggttgtccacgtagacgtcgtagagctcccgcttctcctcgaaaatcttctccgtggtgcctgcgggagctggggttcaggaggtggggaccccccgcagggtggccctacagggaaccagggaccccggggaggcgggggtgccagggatgggcgggccccgtactcacaggccacataagacacctctacctccagggtctcgatgtcggccacgttcacgtagaagaaaggcttggactcgggcacggtgcccccaatgccaggcagagagacgttggccaggcagcagcagcagtacactggcgggagagcggaagtgagggcgcccggggtccccctcccagcctgccccccctacctcccaggctgccagcatcactagggtctccattcagacacgggtcagtctttctctcaggagat

SEQ ID NO: 61568 - DNA, 1381 bp, Bovine  19866881092943
  misc_feature (1)..(1): n is a, c, g, or t
ntgctggttgtatagcataagtaacatgcatgcatgctcagtccctcagttgtatccaactctttgcaaccccatggcctgtagcccaccaggctcctctgtccattggatttcccaagaatacgggagtgggttgccgtttctgactcagggatcgaacccacatctcctgtgtctcctgcattggcaggtgagttctttgccactgtgccacctgggaagccctacaagtgacataccagcttgtaaaaattaggaagatgttcttccttgcactgaagcttcatccttcaatccttcgtcaccttcctgcttcaacattgaaatgtttcagcttgaaatgaggccagactccaagcatcagctccagacttgatctgaaaatctatctcagttttatgtcctgcacatggccttcaagtacatgttagtgaagctttgcttttcaccgtcactctcttttatccctttataattagcacaagcgttctgcccactgctaagccgctggttgacttctccataatttaatggattttcttctaggaactatcagaacttaatgttatttttcctattgttagccttttcaagggttgtatacagactattctactgggatctgttacatctctcgtttctcttcccttcctccctccagtctgtctctctttctccccttctctccctcttctttttcttctccctttatttacataggcacacccgcacattgctgagtcccactactaagcccgaacacacagctgggagatggaaaaacgcagttgagaagtagagtgtggggactggatgtggtctcagggttgctgcatatttttgtccagaatagactatcatgtaaatgataccctccagatttgtgcagtgcacaacctgggcaatattcacagtggcccagtggtgtaacgtcaaggctgaatccccccaaaatttgagacacagcatatcgaaagcagggtggatgcttgctcgttggtataggggctgctacaaatgttgtagtggagacatggatatggctgttgtttgcctataagcaaactgctgctgcctatttggaagcatttgatttagtgaggatgggcctctcccaggtagcatgatttgtagagctcatctctgaaaaatcagctcaggtcccctcctgccttcccaatcttcccactagctgtggaggcttagactagtctcttcatctgacaaggaaacagtgttggtatattgactgttatgatttgaattgtgtcccccacaaagtgatattgcagtcctaaggcccagggtgctcctgattctgtgaccctatggactgtagcccaccaggctcctctgtccctgggattctccaggcaagaat

SEQ ID NO: 61569 - DNA, 1479 bp, Bovine  19866881140323
  misc_feature (1)..(1): n is a, c, g, or t
ngactcttttccccgtgctcagatggtaaagaatctacctgcaatgtaggagacccaggtttgatccctgggtttgatcccctggagaagggaatggctacattctccagtgttggtgcctggagaatcccatggtcagaggagctggcagactataatccgtggggtctcaaacagtaggacacgacccagcaaccgacactttaactttctgactttttcagtgcaactgtccttgaagttcatgaagagttctgactttcagcccatgttattataagccgaattgtgtcctctcaaatttacgtgttacagtcctaaccacaggtacgttagcatggcccggggctggggcgggccctaatccaatatggcggacaccactggaagaagaggagcctaggacaccgaccccgagagggcggaccgtgtgaagacacagggcagagatggccatctacgagccaaggagcgagaccagaagagctggttctttgatctcagcgttctagcctccagaatcgcgagaaaataaacttctgttgtcacactacccagtctactttcccaaagcagccccggcaaacacaacccattaatactgaataatagatgcaactcagtaatgatgaaagcaagggtagaagaaggagtggagataattacgatggtgctcagatggcagaaatagggcaacggacagaggaaaaataaaactctggaaatctgagtgtgtcttcagacttagaaaagaccttggctttgttaaacagcattcttccctgacacccaccaatacatccgtgcctctgcaaaggacctttacctctttcgcgggcagtggaaggcgttcctgagccccactggaggccgaggtgcaaagaatatgggctgtgcaatgaaggcccctttgtccccacagggggaaccaagacagcccatttcctgtgagcctccaggtaagaagacaaaggctatgccacctgcccagatgctcttcctgcatctcaggaggctgggggaacatgaattctgtttgttttacactgaaatctggtcaatatctgacctcactcagattcaactaaaacacaggtagcaagagcttgaaaaatgcatgaatatgctcccagttgtgcattacagggggcggggatggatggaaagaaacaaagacaattgtttctagtctgatacccagatgaggaagactctcttctctcaacagtgattatgcagacaacctgtgaaggatctgaatccaatcacccctttttccttggctatgatgaggtttacaagggaaaatccataattccaacactaatacagttagtaaaatctgccaataaatcttcaaaggaaatctgtcagcaatgctgttattaaataaacggaacaacatattgcatggtacaaattcaaacaacacacctcattactgcatgaattcagatttcttccaagtcaaattctgtc

SEQ ID NO: 61570 - DNA, 1772 bp, Bovine  19866881140705
  misc_feature (1)..(1): n is a, c, g, or t
ntgggggattgacaattggttcaagataaactggagattagagtcaacagatttctggtggatgggatatgggattggggagagaggaatcaagcacaatttgagcaaatttggtagatgctggtgccattattgagatgggcatgacagaggaagggactggtttaggcgaggagaattcaactcttttggggcacgtgaagtttgagaaaagtcttagacattgtgtggagatgccaattagacatcaattagatagcagggggtatctgatcctcaaactcagggaaagagggctggagatttaaatctaggatgaataaatgaatgctggagacctactctctgtattaaaagtggaaaaggttctagccaagacagaatagaagagtataaatgcattcagttcctctcagttacaagagaaaatgtattatttctgtgggcaaaaaagaggggactgaattgtcaatgtcctaagacatgaaagcccctcacacacattttttccaatatagggaatgtttgctactaaggccctcattttctagattcacttaaatatatttgagacccatatgtctttaataaggcaaggtttgagggatatatggaaagaagtatgggaatatttagaaatagccttttaaaataataatttatagacagaaatatttgaagctcaggaaagaaaagaaagaaatatgaaaaatgaaagttgctccttcttgggaaggaaaaatttcacacagcacttagttctctgacaaaccaagtgtggcccaggaaaatcaaatgaaaattacctccccaacaacttcagggaaagaatctacatcgctattcagaatttgttgctattgttcaatcgctcagtcacgtccagctctttgtaacttcatgaaggtagcccgccaggctcctctgtccatgggatttcccaggcaagaatactggaatagattgccatttccttcttcaggggatcttcctgactcagggattggatctgcatctcctgcattggcaggtgggttctttaccactgagccccagggaagccctcctattcagaatggagggctggaattgtcttttatgtggattaaggatctagaagaatttaagaggtgtgaacaaggccacagaggaaaatcaggagaagccacatacaagactctgatggggtgcagtgggcatgccagggcacatcactgaattacatgaaaagatcacagccacgtggatgctacccttgccttgacttctggggtccagaacacttctgttcaccttacctcattcgctgtactattatgagaaagtgaagcaagcatacaaaagaaataatgctgtgcacacaggtaaggtgtggaccatattgtgctacatgggataagagtaaggagacagtgatgcacctgtcactggggtctcagcatccacagtattagcctctgaaatactcagttacaggtctgattccttctaggtaagtatctgagtccagaattttcagacagacaggaaggtataagtctcttttcagagatgatatcctgcctctaaaatacaatgagattagcacactgagacaacttcacttacaatgcaatgattgaatatagctgcagatgattacaatttatgtgaataattatcttagggagcagaatgataaatgctatcaattaatatttgcttgtagaagggcacagaatccttccctaaataaacatacacacatgcacacagacagcaaaaacaaatag

SEQ ID NO: 61571 - DNA, 1174 bp, Bovine  19866881284406
  misc_feature (1)..(1): n is a, c, g, or t
ntctgaacactgtgtaatagacttaatctttaaatatcctgaggtcttattttccttatttgcaaaataggaacattacaatgatgatgccttttgcatttatttattgagctatggactctggaatgatcatatctgcattccaatactacttccagaattttctacttctgactttggttaaggcattcaacctaactttgctttagttttcctttcttaaacattataatggaacctaccttcattgctgggataaagggaaaatgagatcatatatataaaatagcacaatgtctggcacatggaaaaaatggacaccatatattctctgttccaagatggctagctttctcatttgacatttctagtttttggacttacgtaatacagaagaatataaaaactaaaatgccaaaatagactgttttttcctgttttgaaaaaaaatcaaagttgcaattcttgtaaatttaactttgtcacctacatacaagaatggagttgacaagaacacagaagggtgttacaggcaagaaatggttacataatgaaaaaagcaggtaccgagtacctgagcagtttgaatttgtttgaccttggtcgggccctttttaccacagagcttagacacgtctcctgtatttaacatacggcagaattaaggcttggagtactttttctaatctactgctacagacctataggaatctaccacagttgtgcaattagtgacctgttaaaacagtaagcagggacttccagtttccagttccacatgtaaggagcttggagattgttactctatcctaacaataaataaaaggctacatattctgaaaaatcagcaacaatttttagatccataagaggggggagaatgcagtgataaatcactgcccccaagattagagagacagacaggtgaatacaggtcatccagacttatcagagcagactctcaagcagagaccttcacaggaaccagtgtcagggtcggaaaacctgagatgtattgatgagttgctagaggcttgattgagacgatgctcagagttaaaaactccaggggaattcagccataggaaggaccccatgaggttgtgaggtttacctccaggaattctaccaggttcccacagtaaacactggggaaaatccccttgtgcttccg

SEQ ID NO: 61572 - DNA, 1494 bp, Bovine  19866881290702
  misc_feature (1)..(1): n is a, c, g, or t
natgcaggcacacacaggcacacacacagacacacacacagacacacacacacacacacacagtggaatattactcagccataaaaaagaatgaaatgttgtcatctgcaacaacatggatggacctagagatcatcacactaagtgaaataagtcagaaagaacgagaaaaattttatataatattacttacatgtggcatgtaaaaaaaaattattttaaaaacagaaataaactcacaaacatagaaaataaacttatggctaccaaagtggggagggataaattaggagtatgggattaacagatacacacactattatatataaattagataaacaaagaagatttaccagttaattgttttttttttttttttttgccaagcagcacgtgggatcttagttccctgaccagggattgaaaccgagcctcctgcattggaagtatggcatcttaatcactggacggccaaggaagtcccaacaaagatttactgtatagcacaaggaactatattcaatgtattataataatcaataatggaaaaggatctgaaaaaatatatatgtatatataactgaatcattctgctgtacatctgaacctaacacaatactgtaactcaactataatttaaaaaaaagaaaaaaatatctgaacatttgggcctttattcacatatttatgtgatgccacaggtacagacaatctcgaagatgaaagtgaagacattttttttccttctaatgttccatataaaagattgaaaaacaagtgttaccagtacgaaatgtattatttattatataattaagggtgagatagcaccagagtcaaataaaaactttctatactacagcaatttccaggttcctgcacacacaaaaaataattactccttaatgtattatgtattaatgctaaacacagttatcttatttcctaaagctctaatgtagttttaaaccagtactacataatgaaatagctacatgataaattataaattatgtgtcagggcaaagccaagatgacaaaaatagtacaattaagtagcgaaagcaatttcagagtgactgcttcctagaagcatgcaggattcaccttgtcaaagcggaccatgactttagaaagattttccttactctcgtctgcagataaaggtatcatatttttcaacaagaacttcacctttaaaatcacaaatacatttccatgtaaaagtgtaagcagaacctaaaactgcttttaaaagaagtgtcattgtttaaaaatgcaaatatctcttagatgtaaaaattcaaaatgactgattatagcttaaacaattgccatatagatcatcagaattggcaagttactaacttactaggtctctagaggaataggacctggaacagttacattagttcggacagagggagaggtccaagggtggagagtcaagtaaagaaccttttgaactcagcctacagggtcagtaagggcttc

SEQ ID NO: 61573 - DNA, 2497 bp, Bovine  19866881309137
  misc_feature (1)..(1): n is a, c, g, or t
ntgataaacggatttctgctaagaagtaaagagaccaggatataaggaggggtggcttggataaaattaacactctagagcaattctcaccttaacgatagtaacatccatgccagataagtgtaaaatcggggcagcatttttttcaaatagagtcctggctttgctgtaaacaaaggaaaaaatacaaatattttaacaggagtgctcaggagggaaaataaaaagcccaactatcttctctagaataggacgaggaacagcctagcgcacaaaggcttcctctatttgttcaacccaggaagctaatgatgagtaatgaatgggtttctctgggtagaaacacaaactctctcactctagagcccccaggagcttgcccgtatccatatgggatgcttacagttcacattctagctcccccaggggaaagtgtacactagatatggctccagtctagcaacaacgtctgattcagtcaacaagcactaccgaccttctactgtgtgctagacacataggagcgggacaaacaagaggacaaggcagacaaacaaacgtgtgattcaggtaaaatgtaacaagccctcaagggacttcttatagtccactggtggactgagaatgtatttaacatttttcatgtggtctgagagaacagattgaaccaaagagagtattgcttaattctgactcagtgaacacaacctttgaaggaaagagacatcatttttaacaatttcaaatactaggagtatctccatttcttgagttttacccctgtagtgaaatccctggagaaagagcaaaattcttttccatggaggcagaatttctgctgggaaaggggagaagttctaaattacctaatcttactatgggatatttggtagcttgtctaaaactccaaggggcctccctggtggctcagctggtacagaatctacctgcaatgcgggagacctgggttccatccctgggttgggaagatctcctggagaagggaaaggctatccactccagtattctggcctggagaattccctggactgtatagttcatggggtagcaaagagccggtcacaacagagagactctcactgtcactttctaaaactcccagtcatgtgcttctcagggtagccctggcacatggtccacacctctcacagggacttttaccttctatgatgaatagtggttcccaagacagtcttcaggactagactggaagccttgcaaaaacacacacctaaccttattagtccttgagtcctatggcctttagcattatgactggtatacttagaaggttattcagtaagcacctggtacattaatgcacttatgaatgaatgaataatccattccaaatgtagacaggtatattgtgaggaaaaggaaatgagacaattgtggtatctgataacaacagaaataaaactctcttaggagagtttgtgtgttttaaaagtatcatacacatcattctagtagtgacccttgtccaattcaggtcaagattcaaaaacaagagcctagaaatcaagggatacagaagctgcagaaagttcccaatcacagagtctcaaggttaaataaatgttaaacataccaatcagctgacgtcttttactcaaatattttcaactatcgtatcacaaaacagaaacaaaaactagcactttcaaaacaatcaacaccaaacatctaacttttactttcacacttacccagtcctctatcaaaaagattatttttcttatcagtgaggcatgctttgaatttcttaagaatattttatactagaaagagatgcaaaagtagtgaatgaggaacatgcaaagttatgcacagaccaaattcaacgttctttaaaaagaagtaactaccacatggaatacaaaacataaaacgtttctgattatgaacgaaaacagaaattgagaaacttgagcaaattttcacaacagacaaaagaatagcttgagccaagggcccacctaggcaggtaataagcaaatgaaacaaaccgatcctcccacttctacggctccacttctacggctccgaatgcttattagaatgaatgggaaaggctaaatggaaactcctccttcccaaatcaccatttctggggcttagaccaacaataaaaggctgagctggtgatactgtaaacactccttcttgcaggactgctttcattaacaggctagtaagaaaggtcaggtggaactggatcagatctgtctctgggaggcaggactctggcgaagtctcaagtggctatattaatcacttataacacacctgtgggctcctctgagctagcttaggaaataacatttgcaaaagtacaatgaggtatcaccctcacacacagtcaaatggcatcatcaaaaaaatctacaaacaataaattctggagagtgtgtggagagaagggaaccctcttacactgttggtggggatgcaaattggttcagccaccatg

SEQ ID NO: 61574 - DNA, 793 bp, Bovine  19866881325630
  misc_feature (1)..(1): n is a, c, g, or t
ntattctggcctggagaaattcccatggactgtatagtaattccatggactgtatagtccatggggttgcaaagagtcagacatgactgagcgacttcccacttcactttatcattaactaacaatagtaattctttcaattaaacatcatcggttttctaaagcaactttacagtgttctaatcagatactcagaggaagctgacttgatttcacttcccgtagagaccaaaaggaaactatgttattgctgctgctgcagatgatgacagcaaccatgtgcaccataataacttcgtctaatttaagcaatatcagtgtttccttctggttttgggtgtcagcattatgaaggagattcgaatatagctggtcccacaggcttgtgggacactgtgtagcttctggacccttcctaggagaagagacttttcccttcctcccttttaccatagttacagcaagtaaatcaaaggctgcagaagcagctattcagcatctgaagaactggtacccaaggcgagaaccacccaaactgagcaaagacactgtgctgccagtgctggcacagagactgaggtagccatggagacccggccgctgcagcagcaatgtctaacccttacgtgggcacaagagggagctctgagacagagttcaggaaaaaatggagcagattccagttggcatggtaacacacagccttctcagtcgctctgaagtctggcggaaggctgagagcatccttaaccaataaaactcggcagaggtacggcttacaaatcagacagga

SEQ ID NO: 61575 - DNA, 768 bp, Bovine  19866881449959
  misc_feature (1)..(1): n is a, c, g, or t
ncatatccgtagtggtgtggtggctggctgggcgcttgcagatcaataaaagctgctaaaaaggggaatgcatcagagaccataatggctccttcacagaagatagatcgtctccagctagtgaagtgcactcaggagcaacagcaacatccctgtgctgagcttctcattatttagaagagagaaacggactttctcaaggtgatgagtcctatgatgcagaccttaacatgctaaacataccctccaagagagtttctgttccaaacagattcagtttgtttaagcagaagaattcctaggtggcgaaatacagaattgattctcttggcctcaaacatgacttgattgtagttattctgcagcttggatgtcctgttaatttttaaaagtcctcttatgacttgaacactgatttctaagagactcaggtgggcttgggtacagcatccgtgacgtgttgggaagattagtgaccctaatgagtggggtttgagagcggtggaaacttccagaagatggtacagagttgcttggctaaagttcttgacttgaaggctgtggacacatggagtcaaggttttgtttgagctgagtgtacttatgtgcaggtgggtccctagggtatgatgtcagagaggatggtgactttttctagggtgtgtgttctactctgtggttctccttcctgatgccatgaataaattacacaaattatatattcacttattcaacacatatttggtgaatacttacatgtcagggttt

SEQ ID NO: 61576 - DNA, 914 bp, Bovine  19866881700576
  misc_feature (1)..(1): n is a, c, g, or t
nattagtcgtaaaaagagaatggaataatgctatttgcagctacatggatagacctagagattatcatactaaatgaagtcaaagataaatgtatgatatcacttatgtggctacaaaggaactttataaaacaaaaacagagtcacagacatggaaaaaacttacagttaccaaaggggtaaaaggggagagggataaattaggagtttgggattaagagatacacacactacttactatatataaaataaataacaaggacctactgtgtaatacagggaaatatagtcagcatcctgtaataaccattataggaaaagaatctgaagaaaaatgtgtaacaaaatcgctttgctatatacctgaaatgttgtaaatcagctatatttcaattaaaaaaagcaaaaaaccccttcccaaaccaaaaatttgttgacatctttcacatgtcgatgttgccttttctgtacgcctcagtgaaggactcgctagcaacatatcaagaaggaaagttgaaacccaggtttgtcctgtctaatgcaggttctttgtccaagatcaaggaattgttattgatggatttatcaatgggccatgagagtgttgcatttaagaattttatgcttgtcagcttcagagggcaaagggcattgattatgcaaaacaaaccccatcctccagtactgcatggagactgcagactcaaccttaaatgtgattacacaaatgtatcatggtcagggagaaaattactgataaggactttttcctttttcatcttgtccattgtttttcttcttcttttttagaaaccacttttctttgtgaatctgaaggctctgaatgaaagataatgataatagcttgtttatgtagccataaagacaaccattatagctagttgttcccatag

SEQ ID NO: 61577 - DNA, 969 bp, Bovine  19866881745089
  misc_feature (1)..(1): n is a, c, g, or t
ntgtggacacaatgtaccctgctgtaatatgcaatgtcactcgcagctaatccctttattgattttttttttccctctgaatttgctgacagcaaaagattaggtctagagaaatagttgcagttcaggttctgtttgacaatatttagaatttaaagtgacctttaaaagagagagggctgcctgagagggatttaagtggttagggacagggccatactaagggtgaggtaaaagggaatgcttttttaatgctggtgtcaaggcaggccatcctggacaagtgtcctctgtccttaggaccacgtgagagcccagggccaggttgacccttggctttgttgtgaaggagacgaagtttgatttttgtcccatttactctttaatgcacttgactctcccttctgtaacctgctgtctctggtctcgctcgcgctgtctaaagccctccactgtacatctctcccaggcctgtgcaccttccatgccctgggctcccatgccacctccaggagtcctcccatctctgcccatttttaagaggaaactgatcgaatgaaactaacaagatgtgtgtggctagtggtccttcactccccatgaagtaaagcctctgaaatagtatatagacaggtttttttcctttgtgcatatcagtgatgtggtttaacacattaagaatttaaataaaacataaatatatccaaaaacacggcactcgttctagccctctcctgtctctaccctgcgctggtggtcaccccttctcttttccttggtcactttcccgggagcaacatttataccctctgtagacttggtgtgtcacgtggagctcgtgtttatgttggtcgtgcttttaggagttatttcaccttggtatatccaaattcacctgatgtgttccattctatccttttgcttgtcagtatcaccggcagaagacagtacgtttccatagttcccaag

SEQ ID NO: 61578 - DNA, 1380 bp, Bovine  19866880390593
  misc_feature (1)..(1): n is a, c, g, or t
ntattctctgttgtccccttctactcttgccttcaatctttcccagcatcagggtcttttcaaatgagtcgttctttgtatcaggtggccaaagtatcggagtttcagcttcagcatcagtccttccaatgaatattcaggactgatttcctttaggatggacttgttggatctccttacagtccaagggactctcaagagtcttctccaacaccacagttcaaaagcatcaattcttcagtcattgcctttgagctcagaatccagtggcagaggcagcaaagtctgtatcactgcactacaatgaaggaagtgtcatagtagatacatatggaaaagttttgtttcatccagggtggaatggaggaagtgttaggtgggtagtggtgatcagggaagtttcatagaagggacaacatttgagctcagtgttcagggatatatagttaaatgtcaggtgaaaaagacaaggaactaacaacagtccaggcagaggaaatgggacaccaatgactggaaggtatgcaagattatacagtatgggaacaattgttaaatcctgaagtgatttccatcaccccattccacgaaacatttgaggcagtttttaaaaagattacaattaaagagaaaaattacaagtaaaataaaccatcatctgggaaaatataaatgagaatagaaggtgaaggccatgtagggaggttaattagaattcagatgtataggtcatagaatcccactcagtttctaaaggggagctgcacttgtgaccaggtagccaaaacaaaggcaatggcatctcactccagtacttttgcctggaaagtcccacggacggaggagcctggtgggctgcagtccatggggtcactagccatgtggctccaaagcccacacactgggatgtaatccaggaccagttgattctgcattccttagtctgatgcaaagtgtagaagctaagaatatagtgtatttttcatgaagctgtatttgctcaattgaaaggactattttttattcagagattatagatttcctatatttttggtttttaaatgttctgtcttttatgaattgcaaaatggtacatggttagtttttgttatttttttccatgtcttttcttggcaaattaagaggttggcaaccttaaatatatagatgtatatgcttttatcttattcatctctaaaatccagaaatctaggaaccaaagatgaggtgtgaaatgtcctccctaatgccttcccaaaggtgttcacagcgtccctgaatctgccaaatgttctaacaagaacacaaagaacaaaataggaaggaatagggggaaggtgggctataaagatagataattgcaaaaacttatactaaaga

SEQ ID NO: 61579 - DNA, 1108 bp, Bovine  19866880644284
  misc_feature (1)..(1): n is a, c, g, or t
ntctgggtaggcaggaatgagatcatgaatgacccctatatgccatgttatggagctggactttctcttgaaggcaatagagaactactgccaggtttttaagtgggaagtgacagagaactgcagcttggaaaaatcacagagcagtgaaaagcctagtttgggtagaaagcctgaagtagatagatgagccaagaggcaagagacgctgacagaagtcagtgtcattggggctggattttatgggtagaattgacaggacttagagaaatcgtttattataataggaagggtagctctgaagtttatggtctgggtgagtgtgtgatgcttattcccaacagagaagataatttgggacatggggaactaaaccttttgacaagaagggaagtggtcacatgcaacttttctgagctccccttgcccatggagtttcatgataatattctatatattattgggaggggggagtgctttaaactccaaagatcaggtaatgtagcattgacagagaaaggataggtagaagtttatcatccaataatctatataaaacagctctatccaaaaacaaaaacaaaaacaaaatccctcacttcttttgtttccaaaattcccttttgcccactttccttaaatggccagagtcacacatgtcagaaataaacacttgcctcataattaagttcagtatcggataggatgaggagtattttttatgccttttgaactgagctataaggcaaaatcttagcatacatctttataaaagttccttcaactgcaaagcaatatcttttagccccaaagtgaacacctaagtccagccaccaaactgcatccacaaaatgaccatcttaaccaaaggcacacacagagaacctaaccacagtacccaattaagagccagtaattcctgattcacaaagacaggtccaaaatcaattagccaaaggtttcattctgacatacacagcctagctctggtttaatttttttacatgactcctttttttccccttacccaattcaaacatttttggtacctgtttttggagttgcagctatttcttcttgccaagggttataagatctggtcatccaa

SEQ ID NO: 61580 - DNA, 1940 bp, Bovine  19866881315101
  misc_feature (1)..(1): n is a, c, g, or t
nagaaattgaagctgccttctagggctttgctgatactgacagagggaggggcacgtgatttctgctcaccctgtggcctccactaacattgactggggataaaagatccatacggccttcttctacccactaggctcccacttagtctttgctcatgggaatgagggtaaggccctagaagttgacgctcccttctagggctttgctgataccaccctggctgatagagagggaggggcacctgacttttgctcaccatgtggcctccactaacagtggctgagagaagatccatttggccttctcctacccactaggttcccgacttagtctttgctcattggaatgagagtaaggcccatgtttttcctatattgtttggctggaataaagtgtttattatctaaaatttttctgaattgctgtttgcccctttcttggtcttttgactagagagagcaggctttcttgaaactagttttgtctgtgctctttggtttctctgggttgctggcttcctcaatacctagtccaagataaatgaagaacacccaggaaattcatcactttggtattccttggatcccaaaagtccttagccagtctgccttttttttctccacctttcagagtgcttgtgttagttttatataaaataggtttttagctgtacttattgggaaaactaggagaagtgcatctctttatcttgtgctagaaccagaagctcagatatgctttttattattctaatttaccatttaaaggtgtttttctagaattcgatgtatcagccgacagacccaccccactcatcatgttcataaccatcattgaaattatatattttaaccatgctacctctcagccttctttcatcccttggatcatttagttgactttcagtagataatcttcaagtccatggtgacttctttgaatatcctgatggtatttcccatatttctcaactctgatacctgttcttacttccaactctgaacttagtcattttagcaactgcccagatttttgtctttagtgaacagttaagatgaatcctcacttcattgaaaaccatgctcaaatgtcacctcttcagagtggcttttcatgaccattctctgtacagttactctgctttcttttcttcatatcacttatcactatttgaccttttataatcatgtgtttgttcattgtccccatccctctaatataaagactcttaggacaaggcctgtgttttattcactgttgtattcccaatgctcagaaaagtccctggcacatagcagtctctaagtaaatattttactgattgaatgaataaatatgtcacaagggatttggtgaaagaggaagaagagaatggagagttcagggcacctgatccaaaaaattctaacttatataggacagtagcctccagattagacatacatggaccaaacttagataaaaatgtgtgaggggcagaaaatttctttttgtctttttggttcttttctctctctcatgtaaaccacatttcttgttctatgaaaatactttagcataggagcaaaacctttttaaatatggcagttataaccctctgatggcaaggttgaagactcctgaccagaaatttccacattttgcttagaagacggaagcaagtgacagttcggccagctgcagtgcatcagaactcatgtggtccgtggaagaactgtattcattccaaatgcaggtctttcagtgaagcgcaagaccttgagttgaatccagtttttacaggtgagtagttaaaatgcatagaagaaagcagtgaggtcatccatccggagcagtcaggacctcatcatatctctactcaccctatgacttttgttgcagctgcctgtggagccctacgtgggctgggatctcttgctgtcacagcaaaggaagggat

SEQ ID NO: 61581 - DNA, 689 bp, Bovine  19866881632504
  misc_feature (1)..(1): n is a, c, g, or t
nctcggatctttccctggcgtatcagcatgagatcccacaagagaaagtaagcatcacccgcaagttgcaccccagtatccgtcccttatcctgagggtgggggatctggctgcgggatgcagtagtgaggaaggggagcagagctgccagggccagaaggaggggctgcagaaaaagaccaagagaagaaagaggatgccaaggacaaattggaccagctccaaactgccgctccctccctttctccccctctcctcatctggtgctctagaatgtataaaggggcagcacccagcccattttcagcaggagagggagagatcctctccttccagggaaaggaaaaccaccctgagcagtcaaattacactgctgtgttgggtaagattgatttaattcctgagggggaaggggtaagaaagagtagcaggggaagagggcgcctttttggtattgctggtgctgaggtggtacttgaaaagagtgccaccaaggctgcttcgagagccagaagctctcttcctttgctagggcttaaaagagacttgccactgggtttctggatctcatttccaatccaaatccaaaagccacaactccgagcctttggggaataagttcatgtcttccagagctgccccagcacctacagatgtttatcctctcccctccccttcctcctcctctc

SEQ ID NO: 61582 - DNA, 1792 bp, Bovine  19866880125930
  misc_feature (1)..(1): n is a, c, g, or t
naattgatgcttttgaactgtggtgttagagaagactcttgagagtcccttggactgcaaggagatccaaccattccattctgaaggagattagccctgggatttctttggaaggaatgatgctaaagctgaaactccagtactttggccacctcatgcaaagagttgactcattggaaacgactctgatgctgggagggactgggggcaggaggagaaggggacgacagaggatgagatggctggatggcatcactgactccatggacgtgagtctgggtgaactctgggagttggtgatggacagggaggcctggcgtgctgcgattcatggggtcgcaaagagtaggacacgactgagcaactgatctgatctgatctgatctgaaggacctactctgggcttcccacacggcactagtagtaaaggacccacctgccagttcaggagaagtaagagatgtagtttcgatccctgggatacagaataatccctggaagagggcatggcaacccactccagtattcttgcctggagaataccgtaaacagaggagtccatacagtagcaaagagtaagacacggctgaagcgacttagcacgcaagcacacatgcatatgcaaggtcctaccatacagtacacagagctgtattcagtattctgtcatgacctatatggtgaaagaattataaaaagagtggagatatatatatatatatatatagggagagagagagagagagagagagagagataactgattcataaaactttgctgtctgtataacagaaactaacacaacattgtaaatgaagtatactccaatgaaaatttgaaaaattaaaaaaaaatactctgttggatgagagaaaaattttcattacttgggctatgctcttcctaacgttgtaacagcgttaacactttggagggagtgaggaaggagttgcagaaggccttcctggatgttagatggggctggttacttaacacagttatcatctacatgactcattgctgctttcagcatgagctgagctccactgggcctctttttttttccccccaaaaaaatcctcttctatcttcctctcccagtttctaagcagccaagtactcactaaagagaaactagggagagtgtgtcattgctttagatattacaaactgctgcttgtctgaatactaaatattccactctgtgtcacttccaaagatgcacagactgttttgataaactatttctactctttgagttttgcaactttaggtccagcagggaaaaagcccacaaaagtgataaagaaaagcagacggaactgtcaaagaaggccaaaggcaaggagcaaagggaaaaatgtatattttctgaaaaagtcaagtctataaattaaattgttttcatctactttatgcccgaaaggtatgatttgtgtgaccagtgttgtccacagcacataagatggtattgacactgacttttctaaaacaccgagagtaatgccactactgtcagggcaattttataaaggaatagtaggggaaattggtgttatagtcagactttttcattctacttctcactagaatgtgagaagcattgacaagactaaaacttctgttaaaggaattcttgtacttaggaatcagtgtaatttagagttaagaacaagagttttgagttattgcaattcaaaatctggtatctcacatcagttctgaaaataacttataattgtttattaagagtgcattttaaatctcattttgttatttataaaaattatt

SEQ ID NO: 61583 - DNA, 1630 bp, Bovine  19866880604885
  misc_feature (1)..(1): n is a, c, g, or t
ntctgagccttatgctcattttatctatactcatgataaaagtgagacaggagacagaattctctgagctagatttccaagcatttatctgcataggagagaaaccacaggaggcaatagtatccagagggaaaaaaatatggagatgaaaaaaggaaaatagtaggatcggagggacgtaagcacaagggaagccaaaaaactagaattcaattttacaatggagtaggatatattcagttaccgtttacacatttggtgagtaaaaataacaataagaaatgatgaaattacctatgtggcattgcttattaaaataattgctaaacatattccagttgattttgacaaggttataacactgtgatcatttcaaattatcatccaattctcatttaatcacatagcttaagcaaaatacagagcccagaaaaaaagggggaagaacagcgaaccaaaagcagtttaaacattataagtgacatttattcaaaaagaagttgcaggctgcaaggcaagaaaagattattttagttgaaatcagtttatattactgaatacgtgaccttgtgatctaaacgttggaacactagtctagaataaatctagaacagcagaatataaatatgtatatgtgtgacatttaaaaaatattcccatttgaatataataactatgtgtgctttcttgtttttttgtctttatcctcattcttatccaggaatgaattaaaaatttatgggaaggatgaaatcaaagaagagagaaaaaggcacacaataaaatactttgtacatgtataaacaccagataatttgatctttttactatgattaaagctgaaaactaattcatcttagttctcctgggcttcctccccgcttcttacctttttctcacttcatctatctcaggcgccctttcgctttaacatgcccatccttctttcaacagcaattcataggtaatggtacatctctgttgttaacatctttatataaattcaagtcaacatgtaactaacttctaatccttattcactcttgcacagattaaatgcgatgttattaattattatcctgtacattttccaatttaccatgcctttcacatacctcactgtattagtaaactgtgaattaaaaaagaaacgattctctctgagaccactcttatcactgcttaggttttgcatatgcctagttgacgattaaaagtttttacccatttcattgaatactttaagagattatggaacagatggagatgtttgagcaatagtggggacaacaggaaagcctaaatcccctcatatcacataggaaattggctattctagctagcacatctgaacaaacacaatgcttgctatagaagacatggagtgtggagagtgacagcatttaaggattgtcagggaagaccctccctatttggctaacaaaaaagtgactccagcaataaaaaatttgagcaccccatctctggttgtcctaacttccccttttaaaacattttcctccataaagaagaaatcttatttcttttcatactttatgctctttcttccctccttcaaccttgcaatatctttacttagttggattcagtcttattaaattgcaaatga

SEQ ID NO: 61584 - DNA, 2579 bp, Bovine  19866880649892
  misc_feature (1)..(1): n is a, c, g, or t
ntactttgacatttccctgtggcttttctcacaggcaacaaatgaaagcaatcttgaaatcattctgctaaaggctcagtgcaggaggccagtccatacattgtcatcagaaaatcttccaatcaggcttgaagcatttacgtctagaggagcaacaggtttttaatagaaaatacgcaactccgagctcaaatgtttaaaaagcaaacaaaatttaaagataacatgcacatccatacaggtatacatactcatatgattgttccctattataattaaattttagagaaaatagaagttgaatagctgaaccctcaagaaatgtagaaacagaactatttctagaaggaatactaaagtagcaacaaagagggaaaagggagagacaggcctgtcagaacacatgtgacaggactgtatggacccagtgtgaccagtagagagttcagctaagaacagatagcaaagggaaagggaggctcacagaagtgaaaaaacaggtatctttagatttgaaaacaaaaaccaaaaaacaccactcacagaagtgaaaaacaggtatctttagatttgaaaacaaaaaccaaaaacaccacacacacacacacacacacaagcttctgacactgtgacattgtaactctaacgaatggtccatggagggagctgttgacacaagttcctgggtggagataaaacgacaccagtacatccagctgaaaagaaggaaagggaagagaactcaactgcacatttgaaatgatttggcagaaataatttcctttaagctagaaatctgctgtccaagtgcttccccatgtagatccctccccagcacctgtgtaggcccccatggtgcctgggtcagaacccagtgccacagcttccatcagtccacagcagaagcaaagattcttcgaatcacagaagtaacccaccactgcaaagaggaaagcatcgagaaaagctgggaggaagtgagttaacccctgaaacgccagccattctattatggtaaatattggcgttaggcaacacatcaggtaaatagattggagggaagctgtcacaagaaaggccactttcggacccctcagaagggacagggaatgtgggcagagtatctttttgcataacatctgactccagaatgcataatgggtggcatcccttcaaataatgtctgttttgcacatttccatgtacagaagttttgcagagtgattttctcttctaattgcttggcaatagacattgactagtttctgatgatgaaagtggaaaattatagacgaggaactaagaaccctaggtgctcagaatttatccccaaggatcctcacccacctaatctggggggtggggtattcttcagggcataggactcactgttccctctaaaaggggcaaagacagggctgaggcagagcagtctgtcctcagctgccttctgcctcagctcatcagaggaagacctattggaaacagcagacttagacagaatctaagagcaacagtggtaacattcattcataaaaatgggataagctttttctgaaaaattgcagacttcctccttctccctttttgtttctttaaatctctgtgtgatacggtgaaaagctcagttcagcaaagactattacctaactttgagtaaacttgtatcattaggaattaatattttgtaaaacaaaacttttctttagcagcacatgtatatttccttttagaaaagctaccacaaaggttattatccaaggttgaagaatctttttgaaagtgcagatgttaaaatgagaaattcttctacttctcaatttctatggaatttacatattcagccattatcacaagtcatttgcccataagtcataaaattcagtatatatttttgagatgtttaagattctcataactaatatttgctaaaaataaagaatataaaaataccaacattaaaactatggtttgaccctatctgcttgtaatggtactaaaaaggtatagataggccagggaaattcttttccatggaatttttgtagaaattaatgaaatgatgagacttgtacttgagtccttaagggcttccttgaattaaaatgctcttttgcctataatgtcacatttgtcctcatgtcaaatttagatgtgggacagaagttattactaatatcaaggattaaaatgagactatggtaaaaagttaatgaccattaataatgcttaattaaaaggaatgctatttattctgttcacattttttagtagctttgctttctgctgggtaacttcaggccttgagataattaccaaaaattacttttgatgtataacctaaagttggttttcaaaagcatgatgcttgtatttcaacatataagactaaggacttatatattgatctattaaattgttttcattttctaataaagaatccttcccggtctagctttcttgtacctgaattccaagttgtttgtgatgtgtgctaattgatcaccctgaataaacattagttattgttttgttattttttaaatttaaccatacataagaacagataggaaacataa

SEQ ID NO: 61585 - DNA, 834 bp, Bovine  19866880876592
  misc_feature (1)..(1): n is a, c, g, or t
ntgatgaatatttaataatgcttctaataatctcaccaaataaacatttcttgtgttgctttgcaattgagattggctatcagaggaacttgcagatggttatttttatattccccagtgaaagtcttggaagtctaattggactggtaagtgattttataattattaataaattttaatgactaatagcttagagtaaacaaaatgatattaaaacatgttttctaggtaaagtttttatcaaatatatgttgcatcttttcctaaagtattcacttattttaaaaagtaatgttttacactgtaatttttaatttatactgttcctttatgcatcccctaaccactttaactgtcacatttagtattgtggaaatcagtaacatcaaagagaaatgccagccataatacacaagccataaagatcatttcagatcataattaatttggaaatgttgatgggtttgctgtgaccataagtaaaactttttttttaagaaaaagacccattgtagtggtatctctttcagtaaacataagcaaaaatgaaccaggtatgccatagctggaaaacaaccaacatggaggaaaaaggataatattacataaagtattgttgaaaagtaaactgttatattattaaatgaatcacaacttgctgctgctgctactaagacgcttcagtcgtgtccgactctgtgcgaccccatagacagcagcccaccaggctcccccatccctggaattctccaggcaagaatactggagtgggttgccatttccttctccaatgcatgagagtgaaaagtcaaagtgaagttgctcagttgtgtc

SEQ ID NO: 61586 - DNA, 780 bp, Bovine  19866880886906
  misc_feature (1)..(1): n is a, c, g, or t
ncctggggtcacagagtcggacaggactgcgtgactaagcacacacaccctatggataagacctgaagtttaataagccttagcaatggcctaagatgagtaagtagcttactcttaggcaagatctaaatttctggaaagacaaaacatggcgtgtaaattgtgttaaagtaagattcactggagagaaggagttcagtggtggaggctcaatcccacatctgaactataagacattgtaaaaaagtcgtttgggggccagtggtttgtcctgagacctcatttctctgactaaagtaagaagagttgttgatgtttcagtttgtttagttttttacttgttagcacagagtgtgacttctaagctctttacttgctgaacttcagtccttctttttagactttctctacttctaacttgaattagcctcatatctactgacaagttgcttgggctgtggcatgcgtgtgtgcatgcgcagtcagtcgctgcagacgtgtctgactctgtgcaaccccatgggacatagccccccaggctcctctgtccatgggattctccaggccagaatactggagtcagttgccatttcctcctccaggggatcttcccaatccagggatcaaacccatgtctcctgtgtctcctgcattggcaggtggatcttgcaccacaccattatgcatgctgctgctgctaagtcgcagcagtcatgtccgaccctgtgcgaccccatagacggcagcccaacaggctcctctgtccctggattctccagg

SEQ ID NO: 61587 - DNA, 1397 bp, Bovine  19866881057674
  misc_feature (1)..(1): n is a, c, g, or t
natgctgttaatagtttctgtgttaccttggggcttcctaggtggcacagtggtaaagagttctcctgccagtgcaggagactcaagagacaccagttcgattcctgggtttgaaagatctcctggagtaggaaatggcaatcctctcccagtattttacatggaaaatttcatggacagagaaccctagcaggctacactccaaagggtcccaaagagttggacaagactgagcctgcacacaagcacacacaccttgcatttagtaaattataaatgttggctactgtacccaagtttgcatgaaaaggacccttttcttcaaatttgagcatataaattgaacactctatacctaacatacataaatatggcacttgataagtgcctagcacaaatatagtacagcttaaatgctcaatttaccctcattccccccttgtttactccttgttccactaagataattaacagaagcttctgaataatgatatgaaaagctctgtgatacacaggcatatcaccatgtgaaaacctagcatctttcccaaaaaaatatgtgtccattatttggtcccaagcactaaacattttgttggatggaagatactggaaactaaggctaatttgctcaaaagaagaggcatttcaaatatatcttaaaaaaatcattttggtgaatctctatatacatcactttcaaaactttcttctgagctttcatggtgatatcttttcacatcccaacagtgcatacagtagtttggaatgaagtaggaacttccaatttgcaaaacactaattggctgatagtgtggtgtgttagccaccagaaagaatagggcaaaaagggtagggaaaatagaggtcctgtttcaaaacaggctagtttttaaacttcattatacagaggtaaaataatgcaatagcatgaatactgaaaatatggaataaggtaatatgttaataatgtaaattatatttacaaatttatcattattacatttcagaaaaaaacgtgaataaatgggtaatattttaggtaactatttccaggggaaaacaatcatcattttactattcaaatataatgtaatttaaataaaaagtaaaacagaacccaacataaaagtagttatatcctgtataattgaagatagcttaaaatgaggacagcttagatcttgaattaatgaagccaagaaggtcaaccctgatcatcaaaaacattacttgtgagagatgaaagtttaactaccattactttcttacagaaaaagtagaaaattggaatctaaaaagaaataccaattaggcatatatcgatagcatttaactgagtttaggtacagaaaatagagtggtgaaggtatatttttatagcacatctagttaag

SEQ ID NO: 61588 - DNA, 1429 bp, Bovine  19866881181007
  misc_feature (1)..(1): n is a, c, g, or t
ncaggaagcatggtgcaatttaggtttccaattccccccaacaaatatcatgccatctttcactactccttatcactttagagttaatttaaataatataagatctctccctaatatattcatttattctatgacttcatattataaccaacccccttagttcaattttcaatttgagaaattttaatttttgatttgagtaaacatcctttggttttctcagactttgtttagctatttttccatctttttttctatgaacaaactatttgataatttttacgtacaatctctaagtgcatttatttacctctgctttatttattattgagaaactatacactgtgcactatgctaatccctgatgatactctgttcaaaatgagcacaatttctactctgtaggaaatttcagtctattgagagaatgtttagcaaacctggcatctggattcagtgagaatggcctggcatgaggtcggaagtgactgtcctctgagggacatctaacagttttaggaagctaatgacaggctttctgaataggggccattagctggggtatgaagaatcagctgaagttagacaagaagatagttaaaggtagaatggtatgggaagtgttttaggcagaggagggcagtttggtcaactgttttgagttgaaagaaagcatttctaactgagactgattatttaggttaacactcccatctagaacagtaactaaatccacatatacagttacataaaatatatagtgggccttcaaatgtctttctcaaccttcagaatattacaaaagcttttattgcagaacacgcacttaatcccactccgtgtttgtcagtgtttcattgagaatttagatgctttaaacattttaataaacgtttgtgtgctgagctatatttttttacatctatggaagcatatccaactattctttaattcacctcagaggttttgcattcattttatattctcaccctcaatatctgaagaatgctttgaaaatactgcacatttagcaaatacgcttactgataatgagtaaaaacaaatatcctacttaggactgtgattaagaaaatattggcaataatagctcctttaggattttagtagtaattagatattatcttactaatgcaatgttttcaagtataaaagataaaaatcaatatttcattgaaaattaatactcctaaatgtaaaggagtgtatatgtctcccttgggtaccaatatacaggcacaaatgagttttcatatggaattacatgggttttgtactaattgtcagtgactaaagccccttaatgaatcaaggaaatgctatataatataacaatatattttctattacaaatggttaattcttatcattctttgaattttatctggctaaaatataaatcccaatattt

SEQ ID NO: 61589 - DNA, 4888 bp, Bovine  19866881200351
  misc_feature (1)..(1): n is a, c, g, or t
naacattgtaaaatttctgttagaaatatctatcagaagaatttctccaactaataaatcttcaatgtgaagagttaacagcttaatttttttttttaattaataggtaaaatacctagtaaagaaagaattaaaatgaaagctaacacattcatggagaaaggctcaaactataaaacttgtcacttgaagcaacctctttttgggtacctggtactgactggttcttaccacctgtccgtcacacctggaaaatgaaacagatgttagaaagctgacatagaaaagcaggactactatttaggttttggtttcttttttcttcctttaagatacaactaatgtaaatgacacagaagtctgtgtatggcagcacttctgaaaaagaactctttgtaaatagagcatgaaggaggcatgaaggaagctagcaagacccatttgggtctttaggcctaatagcccagatctggccctcagatgtgcatgtacgcacaaggtgatactgagtttgaccaaagctgtgcaaacaatcctaaagccaaatgagtcaacgcttgatgcctaaggagttgaaattgaaatttccagacaagacagtcttagaaaagctactcaggcacagaggaaatgtcctgtttcatcctcactgagacccagagtgacattttaagaaaaagaaatatttatagtttttaagtttttttctttagggagttcataaccagaattcctttcaaatttatttaaagccatcagaagtaaattttgtgacttaaaatacttcattttaatcatttaaaagatgtgggtatttgtgatctatcaaagtcagtgaaagatttaaaacttataggtgtgtagagaacttcagcttcaccaaagtgaactcagtgcatttgcttgaatatgcaatggtgcaatcactaaaataaatgtacttgctgcactcaattaaacattgtattgtacatgtgtgtttattcaattgtgtgacgatacagtgattgaaatacacacgctcggagcatttgtctcaatctgcagtgcatttatataaatgtacaatcaatcatagtcctctgcttttagtttttcctttgtatttttagagaatactaaatataagccattgtgtgtatgctgtgacatggtgaagaactgaaatgcacattaagtaaagcaatataaaatgggaagtttcagggaaagaaataatgcaactcatatgtgtaaatggccaaatctgtcaaatctaatatataaggtcggagttttatattctgaactgtttctgttgattaactgctgtgcgtgtggtggtactaatatatctttaatagtaattaacaaaagggatgtaaaagatattcaaagctatattaaaatatttgcttcatatttgtatatagctttattgagtcttgctcaatattcattattttaaacatgcttattattttattcatcaggcttttctactgtctgaatttgtggtgcctctcatccttctgttagttctacctgtgaattcttactccagtgtatgatatcatattgtgtaattaaaaaaaaaaataacctcttcctcctagggctctctctgtgtttattttaggtggtccaagttgagggaatgtctctccagagccagttttcctgcccaatgttctgacctggaaccccaattcaagggtttcatattctcattggacatttttctctccatacagtgccaaggtagagaaagacaacctgcctcacccacctctggatttttgttcatgtattttctctacctagaaagtgttttccccctgtatgtgacatggtcaactcttctcatattttagatcttaacttatatctcatctctttaaagctgtcctcataaacaattctacctttttctttcatttatatatgcattcaattgatacttcttgaatgctcataaccttctaggcattgacgatatagtgatgaaccagatagaaagtgttagtcactcagttgtgtctttgactttttgcaaccccgtggactgtagcctgccaagctccttggtctataaaattctccaggcaggaatactggagtgagtagctattcccttcttcaggggatcttcctgacccagggattgaacccaggtcttccacatttcattcaattaatgtttcttgaatgcttgtaatcttgtagccattgaggatacagtgatgaactagacagatacaaccactttaaccatggaatcgataatctgtctgtgtcaccctttcattcttcatctccttattccaattcttgtgcagcacatgctgtagtttgctttttttctacttgcttatgtttttcctttgtttattttgcttggctacacatttccctaggaaaagcaccatgcctgtttttgctcaccaatgttttccttaatgctcagaacagtggaatataataagatagtaaaaagtcagatgactttattagtcaagagaaggagagatgaataaaatccttgcagtaacccaaagtaacctctactgtccctactttgcattgaaaaacgcagaagctgagtggtacaaatggcatgtccaaaccatgctgctggtcagttatatgatcagagattactattaaatcagtgtccccactcttctccatggtattctgaactatttcattgtgcaccagtgagtgacagtatatagttcagggagtaatctctgaagagagcaggtccaaattcaggaaagtttctaaacctccctcatctctatagtgagcataataataatacctgactgcttccctggtggctcagacagtaaagcgtctgcctgcaatgcgagagacctgggttcgatccctgggttgggaagatcccctggaggaggaaatggcaccccactccagtactcttgcctggaaaatcccatggatggaggagtctggtaggctacagtccatggggtcacaaagagtcggacacaactgagcgacttcactttctttctttctttcaaagataacattgtgactattaaatagatgatagatgtaaagtgattagaacagtgtaaatattactattgttgatatagtgattattattcctatctaaaaacaaaaactgtataattgattgtcagaattgtcttctgtgtggaagttatttgaatgatatcatttcactgaaaagctaaggatcatttcttatacttgtattgagaatagcacataagtctgtaccattcctcaaaaggcatttgagctatatgtgttgggtggatggctaaatggaagatgaataaaaaaggaatgacttaattcctttgctgaaaaatagattgcaaatgacaaatccagtcttaaacaatacttcaaaaattattaagcaagcacagtcttttttagcatatgattaaatccaaaaatgctgtgtgtttcctgaatgtagagataccctctagagatcagaaaagtccagaattttagcccagactctcctcttaactttcctatatgagtctccttgtactacccaatgcctataaaatagggttaccagtgaacagagaaaaacgacaatgatgatacttaacaacatatctgacaaggccattgtcatcactgaaagtagatttttaaaagtaaagcattttgacacttaaactaccataaacatcagaactatgattacttttagcaagagctggcaacacctgacttaagggaaacagaaaaggactcaagtgccagtcatgacttcacttgcacttattagaaactttcagacttttttcccctttgagacttaaatagaggttctcttcataatccctattcaaaggtctgtgtcatcaggagcttttccataatccaaggcagaagggaagaggaacagggcagagggaagctcaagaggagggagacaggttgcttgaaaaaacgggacctcaacaaagacagtccagagagctccaaggactaaaacctcacccagtctccgaggaagctaaatcactgcctgccattcactaaaactcaaatagggatgagattactatccatatcatccagtctgggctcactgtggactcctggaagacaacacattcctcttcctccatgaaggacagctacccgaccaactggggtcaggctgccatgccaggagggcccgtgtaagaggaatctgctcgctttgcagctgggcagctcagcatagaaacagccaccctggcaacttacttccatcaggacaaggccttctcagttgactctcagttcctttatttatgaatcccatttagccccaggccactatcaatcttatgctgttcagaagtttactacttgtgctacatcatttttgcctaatgctacctacaccaagctacactgacatcagtactgcctgccagaaatgcttctactcaagtccggattattggggtaattgtgtctccctagtttacctaagacagtcccagtttgcatctcttgtccctatgtgataaccatattcccctttcactccctgaagaaccctggtttggttcataaataataggagcatactgctatgtcctgattgtaacacaatggccttcacattcattcagtagagaaaatgcatccttagtcatgtagataaaacaaactaccaatgattaaaaaaaaaaaaaaaaaacacagtaatttgactcctaatgccacagtatttatcaatagctgatataccatatgttcatgcttatatattatccatcttccctaactggaatataattttgataagggcaggaactttgttttgcatactgttgtatccatagcacttagaaagtgattagtaaatttatttgtctgctaaata

SEQ ID NO: 61590 - DNA, 882 bp, Bovine  19866881397928
  misc_feature (1)..(1): n is a, c, g, or t
ntgataggtaatatttagcagtttcgttatattcccttattttttgtaaatttatttgtcaaagtgcttttcataagaaaaaaattaactccattttaaaacaattatgtactgtttagagaaatgaaatgaatcaaataaagtagctgcttgttcatactgttctccctctgtttttaagattaaactacaaacataattctgaaatagaaacataatactatataattaggaagtagtgtgtttcatttgttacattatatttcttgactgttactgaaattttaaattaattcattttgctatgggcatgctgttttgttttgttttgttttcaaacagtgggaggagaaaaaaaaaatcagagagtgccacgcagccgcagccggcggcatgaatgttctcatcctttctttcatagtcttcctccagctctatacaaacccaaaaggctattcagcagcaggggtgggagcaccgagggagggaaggggtcacgtctcccatctctccatgtatctcattgttcatcacttgtcagtatatttcccacacaccatctccagccactctgcccctcatcctgactgccggttccatgacctctatgacattattctctctccctccattccctacatctacagtcttgttttgttttttaatttttcccagactgtggttgctataagactgtcactctgactataaaacatagaaaatatttgtcggaacaaccataacaaaagtttctcggtacagtgatgcctgattcctactgcatcgtgttcttgccctacctccatgcttctgcctccagtttcttcacaactttgtacaatgattgttaacttttcactgaagcagcatgtgttgtaagaa

SEQ ID NO: 61591 - DNA, 1257 bp, Bovine  19866880364577
  misc_feature (1)..(1): n is a, c, g, or t
nttttatcctgttgtatattttgaattcttcaaaagccttgtgagtttttcatttatccttcctcctgaagtgacctttgtacaggttcgtttggtaggttcaggctgccagcagcaggccacttttcaatcttgctttgccattattaaagatagatagccacaattgcgggattaaaatacctatctatgtaaacattaaattcagtgttgtgtcagaattcccctgaggatcaagaaaaggactttaattttaagtgaatatgtgcaattttattcacagtctgggaatattataagattacaggtataaataatttcaagaaatttatgagctgtaaagtgtctgcctacaatgtgggagacctgggttcgattccttgatctggaggatcccctggagaaggaaatggcaacccactccagtactcttgcctggaaagtcccatggaggatcctagtaggcttcagtccatgggatcgcaaagagttggatacgacttagcgatttaacttttgtagaatacatactcaagagtaaaaccaccaaaaaaaaaaaaaaaaaaaaccgaaaaactgcatgcatataattgagcaacaaataagccacaatagagctgcttagtggcacaatttgcaagtctggccttagaattcaggttaaatagtgtccctaggtttcagtgggatatttcttttcgctgcctttgctattggaagtctgtattgtcaagggtgaatcacaaaacagttctgatcattagtgggagagttcttttgaagtgggtgagaggcctagaaagtaaaatcttggaaatcaactaaatgcccttgtgttttattagctcacactttttatagctcataataaagtcagctcagaaggtcacttcttgaacatggctgtgaatattgtagtttatgaattctcaaattgtttataagcaggctgggtgaggatttttaataaatacttggccaagagaactattctgatatatatgtatatgaatcacgcaatgaaaagttgtatcagattcctcttcttctctccccctcccatttcctcaccccagggcaacaagtcccatcctcattgaagccatggttactatattcttgtttttccttatgcatttgatgtctatagactttgtggggattacagagctatttacatactttatttataacttaactgaaggattttgtcacctgtatttcccaccattttataaatatttcttaacatttttt

SEQ ID NO: 61592 - DNA, 1434 bp, Bovine  19866880370492
  misc_feature (1)..(1): n is a, c, g, or t
ngagcctggtgggctacagtccacagggttgaaaagaatcggacatgactaggtgatgaacacttttgcttttttcacttttctactccttagcaattaacaatgtaaaatttagttctcttaagtgttttattatctacctgggaaaattcagttacctacaacaacttttgatgcccataagccaatttcttgctcctcaagtaaataacccattctagatatactgtacataattaaatctggagtaagtttcagagtttctgctctggttttgacatttcgaagtcctggaaccttcagcaaattgcttaaactctctaaatctcagtttgttcatatagaaaagtgggaataataataataatgcctgcctcacaatgttgaggaatgtgcattgaatatttagtatagtgcctggcacagtggacatccttaataaatgacagatacttttactttaaatatttcactttaaatattttggaagcaatatgtgagtttctaaacactaattaaaggcaatatattttctaataactttgaagtcatgccctctaaatataattagcatgaaatctcagcacaaaggtgtaagttcatcaatagtcattagtccttctgtgtcccttcatgatctccagcagtccaaacactctccacaaacccagtttctagaagattcaattctgtagtcaaatagtgtccaggtcaccttactgttccctggctaggccatgtcaagctattaatatatagtaaaagatgacagccaggaaggaactaaagtgtttataaccagtaaataagtaataaaccatatactacgggttctaaagcagagagttttagggttgaagtcttcgttctgccttcattagcttgatgaccctggtatactttcttttcttcttttttcaaatgtggatgtcagtatatgcacttcagagggctgttgtaagtattaaattgaatactgaatgttaagggtgtttagtatatcgttagcttcttctggaacccttccttcttttgcccctcatcatgtcctttgggtttcctccagcgtcagagcagggtccttctcagcctcccagccagtcccattccctgcttgaaaagaaatggagtgcctgaaggttcttggtccttttacctacatagatggcccagacgtccttatccaatcccacatcttaaagcaccttccattgagaaggaagatctaatttccaacttattaacactgctgaagtagtttacattggccaaaactatacagaaagggtggaattggcataaaatcacatctgtctgatactgaagtccaactattaaaaatgtaggtaggagagagagagagaaaaaaagatgatttcgtacaagtcccccaagtacaagttccaaacaagaaaaagaagaaggaagcattag

SEQ ID NO: 61593 - DNA, 1077 bp, Bovine  19866880390036
  misc_feature (1)..(1): n is a, c, g, or t
naaatgtctggggaaaaatcgaaactatgtttagcaaatatctaaaataaaaacagaagtaatcacacctcaaagaaatgcaagttaaaagaagcatcccaacttacacctcacgtagagaaagaactcacccagaagtaggttactgaccctaaataaacaaaaccatatttctctcctaaaagctgcagctctccaacttccactgcttcctgtcatgcggtttgcagtgattttattcagagaacacactatatttattctgagcagcaaataggagacaaactccttgtttttcctaatctataatcaaaatacctgggtgctaggtaaatctcagtgaactgagatttttcattttacataaaatgaacatttgggcaaatattaaagcaagttattgtactgaaagtgtgttcctagaaaaacaggcacaatatcagtgttatcagactcagtgtgaacatggaatcatacatatgtttccttattgatattcaagggatcacaggctcagttgctctatgcccacttggaaaagtgtatgtaataatgacacctaccttacagggttggggaaagaatgaagagttaccatacacaaagcacagcttttgtttgtttgtttcacttccactgtgtctttattgcagggcaagggctcagtagttgcagcttagatgccccatagcatgtgcgatcctagttccccaacctgggatcaaacccatgtcccctgcatcggaaggcagattcttagccaatgggccacaagggaaatcacacacataaagcacttcacaaagtcctggtatatagggttccatcaatatcatctgcttattctagtaatgttaagagtagaactagtaacagtagtcaaaagcatctttagatgtccccaaattttccaatttagagtgtaaataaataataccaatattaacagatggattgtcctgagacctcatcataagagacagatgtaagccattcatttgtttatgcactctggaaacactaagcaggctttgtcctacttctgggcagatacattggacacaagcacagtagcga

SEQ ID NO: 61594 - DNA, 1841 bp, Bovine  19866880392899
  misc_feature (1)..(1): n is a, c, g, or t
nctcttttgtatccttgaaggccccttaagtgataaagaaattctcctgaccttggagtgactccaagagacaattcaaaggcaagatacagcagccttcaaaaaaagctcaacataaatttgaatgtgctctaaagagagggcagctgtcaccatggtgattttattctttcctagactgagttcaaaatgagaggggaggtgttttcaaagtaaagatgctgaaataagtgaattaaagatctggatataatttatatcaatagaaatatggtgcttagtttgaagtttggagcctatatatggatttgtatactcaagataatgattgttaagtagcctgagagatcatctttctattgtcaaaatatttacagataattacagttgtccttatcattatcaatattctgctaaaaggcattatattctcagtgatttctcaactaatattgaatgtttactattcctgtgcaatacacaaagttttgtgcatgctttatttcatttaatctatgagagagatagtataatcattcccatttaaaagatgcaaaaactaaggcaaaggagacaaaggcttttgaagttcttttaaatgtttatttggatttgattttaattttttcagtgccatagttttataaaaaataggttaaaaagccccatcctcatgaagcatgcatgccagtggtttgtgtatgccgcacagtaaatgccagatgtaagagtcaaacccaggttcaaatacaaaaaccctagtgtaaataactcgagtcagagtatcaaagcatacataaatattataggatgttgaaagtcttgtttaagattagccatacctacaggtcagatttgggacaatacaggaaggaaaacctttgaaacaattctggagggctcacagctacttttgtgctccattatcagaattttaggaatacatcaccaaagatataacttttttcctatcccctgttacccagaagcctctttggacttctggaaattcctgtcaactacatttgaagaacgattctcttccagttgggaagggccttctcttaaactgagcatatgaaaccgagatttatcaaactcaacctggctaccattgtggtgacagatgtcccagctcaaactccctcagacaatcctggagtggctctttgcagttctacatgtgccaacagtcgttttcaaacactgcatttttttttgctcatgttctccttgcttttcatgtgaacttcatcaggtagctctttcccctgaatatgtgatttctgacttttaaaaccgggaagagcaattctttcctcttagatcactgaaagtctgacaagttgaatatcttggtgaacgtttatcagtatttgggagtactgaccctcctgctccaagtccagaggtcctagtgttgttcacctcctagccccaaagcaaaagaaccttcctttgtctcttttttgaatactttggagaattcctagccagtaacttcatttccctggaggaaatgcatgagagccagctgctaagtgccggtgtttgcatgcacctgtttgtttattttctaaaatgtaattggaaatatgcctggaagcctgagtctgttctgtagtacactcaaaccagattcagtgcacagaagacaaccacagccttgtattgtgcatcttgcacagcaatacaactattgtgtgcacaggtctctagttggcgttttgcaaagacatgatgatcaggaatgcctggaacacaaacttttcatgggtgaccgagatattgacaattaaccaggaacattcatggaaaacaccacacagtattcataactc

SEQ ID NO: 61595 - DNA, 1387 bp, Bovine  19866880428179
  misc_feature (1)..(1): n is a, c, g, or t
ntcttcttacgtctcagtgttcttctcatattcttggtcgcttcttagtctgtcatcacatcaatgacttgcagtatccttaacccttgccttccatctcatctatgatttccctaacccaacagatttccctaccttaaaatgtccgtggttatcaaagacagaaaatcgacttcctctcagcagtcagtactgcaactagaaaaggctccttttggttggctggtgattctttttattcaaggaatagcccttggtattttaaaatcaattttctttatgactatatttaactctaactcattttgtaaaactttctcttattcatactaagtcaaatcagcactaaactgtctctgtggttgttctgtatctcggctctcctctgatcctcccatggaattgagagtaagaatgctagaagagatcagtaaaagatcaacttatcaaccctactgttaatcacaaagtgaattcactcttaccagccacccttctccaaggatagagagcactgagcatctctctattcttccttttgtgtgttgtgctcaacggacattctccatatctccatttctgtgactctgccatcaaggacaatctcttagacactgcctgtcattgtgattattggcaatatcactgaattaaggtaatcaggccacattcattgcgtgtacttggagcagaagctgaaaccacaggtaaaattgaaatgccaagtaatggccatttcagtgttggtttcctgtactttttctaaagtacatttgcttttacttttcctccttgcctgctgagatcattgtgtgggtgtgagtgtctgagggctcgggttgataagttgcagagggaaagggagatgggggaaggccacacagcttgaataaataagtgcgtgcaaatatatggtgctctagcatgccctactgccatgtctccatcactacacaaggatgtcttcgtgtattaacttcagcatcagaattctaaaggcagggaagcaaaagtagcagctgtgggagctccctaaagtggcgccgggcatgacattctgaattctgaaattgcaaacccacagttcagtggttgcagcaacacagaatgcagatggcgtgttcctttggattgtcagggtagttctacagtgtagagaaatggcttcggttcactcctgttggctctgtcactgccttttaacacccatgtgtcaggaaagccatgctgcagtgacaatcatgtgttggtaatggggctcagaggagagtacccagggaaagtttgaaattaaccatttcagaatggaggagtcttttccacgtgttccatgttagagaaatgaaaaaaggctgcactgtatagattagggggctgcaatactcag

SEQ ID NO: 61596 - DNA, 1701 bp, Bovine  19866880459875
  misc_feature (1)..(1): n is a, c, g, or t
naagggtaggatggggtgggaggtgggaaggaggttcaagagggaggggacatatgtatacctatggctgattcatgttgctatatggcagaaaccaacacaatattgtaaagcaattatcctcctattaaaaataaattttaaaaaattagcccaatagagttgatattccaacatgggaaatagctaaagagatacaaaaaggactgaactgagaaaatactggtgtaatggcaagatttttaaatgcaaaatagaagtaataaatacatttaaaggttaatcccccccctcattaaatatagagcttagaagttatccatatttgtgtaatacattaatgagtggggtggaataaggagttggatgctactttgttacctgtctcattaaaatggaaaatccatgtgtactaatgtactactgcaaataaaatccacttctttaccttgcttttgacacagctctcaatgaatcaggataaataaccaagttcattatatgtttctacaagaattgtcaaaatatgaagaaataataaaaaccaaggatatggaggttttttgtttttttttttaagaacttggataaatgagaacacaattttctatttattggcaaacacttgctttcagtagacctataattctatgctaaatgtaaggaattctgttaatagctttaaaatgtacagagctccaattcccttaaaggtgaagtgtcatactgcaattacttgatgaaataaaatcatcgtagaccgttcctgttttagaagtgctaggaaaaccaggatcagatgtgacagtcatagaatgagattaataaataacaacaataataaaaactcagctctaaaccacagaaaaccaattttgaaacaattacaggcaactattatggtgtgcctctaaacagtttaagctaaattccctcagcacagctctgatgacgataatgtgcactgtgtatgcagttcactgcacatacttgaaaatgtactctgctgtattttgtattaatggataaggctactggcttaatataccatccttaacaatagaattgttcacaagtgtgaggatacaacaatgtttcctttgtggcttcacatccagaagaggggtaatttattgtgtgggtgttttaaagtttttactaagacctctgtggctagagttaaaccaggatacttaaactgcagcctggagtcaggagggaaactatgcaccaagagatatgaatttccttagccaagatggtgatggtgctcgtcaacaaaacatgtgtttatccaataaaacagtaggaaaaatggatcagagaaagctgaataatgctaggtcgcagctctggataaaggaaatatgcgaactcagccaggtcaggttcagaatccaatcccactctgcctaggcttttcataaactctccacttgctggggggaaatcaacattcatgaccagctctcataaaaataaaagaagaactagaatattgcaagtgtatgttgtaaaaatctactgctaacaatgaacgctatgaacaatcacctacttagaaaagtcattcacctccactaatttttatcttttttccttttagtgttttattggactttacacacatatgccaagaaaaatcaaaattcattatataaagtgatgttaccaagataatagtgaaaaagctgtccaata

SEQ ID NO: 61597 - DNA, 1264 bp, Bovine  19866880460799
  misc_feature (1)..(1): n is a, c, g, or t
nttaaatcttctgtagaatttgtaagggatagataaggttacacatacatgaattatatagagcattgcaataaaatttttctgtatggcaaaataatctactaccatgagttggtgattgactttaactcagggaaaagtgtttctcatataaaaatatatatgtcaaaagcctcccagaatttattttaccaagatcattacataaaaacaaaaaagggcatatgtccagatatctgcttatgaattttgtttgaagttcagagtttcatgccctaaactccttctgacttttggttatacgcccaatatgcaaatctatgtatgatacaatttgactgtacacagatcataaaaaatacccagattttcacatacatataacacattctctgacaccttcatttacaacaatgacaacagaaaaaaaatccattttaattctcattgtcttcctctgtgtatcagttgaagaaatgttgacacttaaagccagattgcataaagcagaagtgataggaaaagatatatgcaaaacagatcactgaaatttggccatacaagtatagttatagatggaaaaactgaggctcagtgaagttcaatgccttgctggagatcaaagtttctaagtgacagcctgaatttataagacatcggtctactactctttcaaggtttttagaaccaactgcattgcctctatcacagctaaatgttcagctttttccaggaagtcactgaatttcctgtccatgactacagttatgggtcactcacaggcttccttaagaaactttctctgagccaatttaaaaaaaaagttcatgaaatgtttctcagtatattttaagttctttatcttacacttagaaaagcaagataggccattttactgacagctagatatctctttgattctttttttaggtaaacatttctctgattcttttctaaatctctgaaaccaaaccttagagatcagagcagacagtaacagggctgactcctcgtctgcttccctatgcctaacgttcaagcaacgttggctaaatcacttcgtaatcttactcgtgaagtagttatgccagaattaataatataaatattttaagcagctaaatagatagatttttattttcttgattcctacccttagaaaaaggattagatgagttttatggtcagttggctctcccatcaagaaagcaatggtgtcaaatttgaaatgtgaaatggctgatgatctttaagaaagattcta

SEQ ID NO: 61598 - DNA, 765 bp, Bovine  19866880475301
  misc_feature (1)..(1): n is a, c, g, or t
nccagtgagtcagctctttgcatcaggtggtcaaagaattagagcttcagcttcagcatcagtccttccaatgaatattcagggttgatttcctttaggatggactggtttgatctccttgctgtccacgggactctcaagaatcttctccagtatcacagttcgaaagtgtcgattctttggcattcagtgttcttacagcccgtctctcacatccatacacaactactgtgaaaaccatagctttgactatccagactacacgggcctttgttggtaaagtgacatctctgctgttttaatatgctgtctagaagttcggaattctggccagttattagcttgaaactcaccatgcctcaccaagtatctctcagaggaggacttccttaccagaaattttgttaacaatgttgaattaacataaaggagacattcattatcaaaaaatgttttgtactaaccaaaacaatgtaactagaggcaattgcttgtatttagaaggttgctgatttgaaattgatactttttctttggctgcaagccaaaactgtgcatctccagaagacagacttgtacttcactgcttttgtgacaagttggaaatttgacctttttatataatatgtgtttagctcttccctgactgctcctgctaattactattttgccaattcttttctggcatttaggtttgtcactgaatattaaaagcaccaatgatgatatcaaatcatttttttcttacatcactgtttctcccat

SEQ ID NO: 61599 - DNA, 1882 bp, Bovine  19866880477194
  misc_feature (1)..(1): n is a, c, g, or t
ngaaaatctgggaaactgtgacaaccaagaaagcctaaatagacatgattactaaatgtcaagatgggattctggaagagagaaacgacattaggaaaaaactagaggatctgaatgaagtatgaactaattattattagttaataataatgtgtcaatattggttcattaattgtgacaaatgtaccatactaatgcaagatgttaataaactgggaatggaaatatacaggaactgcgtactatctttgcagtgattttgtaagtttaaaactttaaaaacactttttaagattacaggtttttttcttcttaaaaaaaaaataaaagcaaaaacaaacaaaaaaatcccctattgtgttctgtaacctcactccactcagaaatagaaaagaaaaaagtgattaaaaagggggaaaatatcactatttggggagattaattggggaaactatttggtaaaatgtaagttttgctgtttctcttttccttaggaatagataacatgtactaaatgctttatactatacaccatattttgtgctggagactttatattaattacctcacttaagacaaagaattataaaatgattattttctcctttcaatctatatatggaaaaaatccaaatataaaaatcaacaggatttttttggaacctgaaaatatagttgcagtgtacccctgaaagagtagaggtacaagagcagttaagaaccatttagaaagaacatcagtgagggaaattcttgtaccatcagttcgaacagtatattatataacttaattcaaagaattttttttttttttttaaatcacagcaaaattagccaagtaatgtcacagctgtttctttgccctcaggcacaacagccatcctttggttgagaatcagagacagacaacctcatcttcaacaataacacatagacacatgattcctcctttacgaaatttaagacagaaggtttcgtcaatcatctcaaatgtgaagtactccataaagatcatgcactgccttgctatgaataatttaacggcccagtattaacccgctgactgaaatgttcacagaaaaatcaagggaaaaatggaaaaaaaaaaaaaaaaggaggaagaaaaggaagcagtccatgtgttctttgttgaaacaggtagatggttccgtcaagttataacacatgaatcaatctagtgattaaccttgactgattttctcactgcctatcctggcattttggagaacaagaaaagaaaaaaaaccaaaaactaaaaaatccttcacagtagcaaggaatgaaagatagtttatccttaggacaaaccaatagctaagttagatttttagctaaaataaaataaaaatatccttttctaatttcaagacatgaagatggaaggaaaataataaatgacacagttaaactagaacaactcacaggagagcttgacatggcctgttcatagagaaatggtggcacacctgtcagttagctaaagttagacccaaacaggaatagcagaggcccgggaatttactgacagtaccttcagggatggcctcgcactgaggcagaatctatggtgtgtcagcagaattgcctccattctgcaaacagagaaggaagggaggcgagatgaagagtgagagatgagcaggctccctcactacttccttctgacttgtctgttttagaatcttgttgaaataagttaaaaaaagaaaagcccatacaggaatattttaggatctaaatcttgacaatatttactaacaacttttagagcacacagttgaataatttctcagtgtaattaatatgggttatgctattataccaccaatccatcctttatatgcaacagaccattttggat

SEQ ID NO: 61600 - DNA, 2077 bp, Bovine  19866880545638
  misc_feature (1)..(1): n is a, c, g, or t
nctgtaatcagaattttgcaaatgaagaggtcgtttctcaaagcccctgaaatgtaatatatagcaggaaaaccaagaaaaaaaaaagtgaataaagtaacatatcaaaaccaaaatacagtagcaacttcaacagctatttcttaggaaaaaaaagaaaaaaaaccagcatttactttagaagatcaaaagactagcttagaatagtaatcaggctatcaaaaaaaaaaaaaaacataaaggcgcacaatgtaactcccaaattcatgaaacactgtgctcaagaatgcatgtatttattctttactgtgaagaatcctagaatgtagattcaaatagacagatccaaatggtattttgacacataacatcagggctaaatgtgccctagtttacttcagttcctgctttactcacactagatttaatgtaggatccaaaaaactgctgaaaattctaacttgaaacaaagtgaaacgtcctaacgaatctagttgtctatcatctggctctgtgtttatcccatttgcaaaatcaacagggaagttttgtgaaaggagaattgagccaagaatcagaagacttcaacttttattgtaaaatctaccatctttgggctgtgtgtccttgggcaagttgtagaaacactatgagctgtgttttttaagaccctgcccagcctacatcagaggagttgtggtgttgttaggattaaatgagataaggttactaaaggctttgaaatatacaaagctggactcaagtgtagcacactgccacagcttgccaggtggcgccagtagtaaagaactcacctgccaatgcaggagacttaagaggttggatctctggatcaggaagatcccctggaggagggcatggcaattcagtccactattctcgcctggagaaccctatggacaaaggagcctggaggactgtctatagcgtcacacaaagttggacatgactgaagcgatgcacgcacgcatggtatagtgctaaacagggctaagttgtgacatcaacttcctaagccggagggtagtgatattctggaactggctctctcacaaaagagccttgtacatctcatgactttttcacatggccccagggaagacaaggaagcccagatggtggcagtttgctaactgaaacccaacctaaggattttgtaagagcaaatgttgatgttaaaacaaagcgtgggctacctagagaggtagtgaggagacttccagagaccacgtgatttattttctaaggtttactacataaatttctatttcctcttatctgcttcagattgaacaaaaatagatggcatttctgttctccaaagaagaataattaagcctttgtattgtgtttatccagttcttagaagaaaggtcttctttcacaaacttcgaatgtcaatatgcaaaatacaaccattttgattacatctgttaaaatcaaagtacccttcacatgcaaccaactccagtatttttgcctggaaaatctcatggacagagaagactggcaggctacagtccatggcatcacaaaggagtcagacacaactgaacacacacacgtacatcttagttcacagcattgtctaagccaaacgtttataaatttatagttctcccaagggtgatcttacctatagatttgaatgaagagcaagcttccttgtatgacttcatcattgcaagggagaaatcagtagagaggaggaaaagatatatgggtcttggaattagaaggtctcagtgggagtctaggtcagggtactcaacagttgttggacctgcttggaagtttcctgatttgcagaacaaaatactattactactctctcaaggtcacagggtctgtgctctgggagcatttgctgagtaaactagctcatgcttgactacgagtgaagaataattcgtgaatttagcatggcccaatttttgcttctttatcttctgttaaaacaaaaagtattctcagttttttcagattttaaaatagcatatgtctaccatgtaaaatttggaaaatatggacagtataaagaagaaagtaaacctct

SEQ ID NO: 61601 - DNA, 557 bp, Bovine  19866880550815
  misc_feature (1)..(1): n is a, c, g, or t
ntttttgaaggaaatacactggaatggtttattaccattcttctctgacagtaataaatcattaaaaaggaaaaaaagaaaagagaaataggcccacctgtgcactcaatatcaattgaggctgattatcagaaactggtactgtttttgtactggcacttgaattcaacaggaattacctttttatataatctgtcaatcctctataactaaagagaacagcctctcccctgtaacacctaagccttgcagacaagccttgcctgctgagttctaagccctctcgtcacccagctccagtcttactggcagccctctactttggaccctggacaacaagtaaagcaatttaagctcagagcagcttggtgatagggcctaatccaagcagtatctctgctttcaaatttctccctacagtcaccatccctatcctctgtctttaattcctggctctcactaaaacacctaataaacttgcattttcatctgacttagacctgcagatcctgttcaaactctcccatcatcctgttcctgtatcaacatgctttaag

SEQ ID NO: 61602 - DNA, 2624 bp, Bovine  19866880554193
  misc_feature (1)..(1): n is a, c, g, or t
ntgggcacttgggcagacccaaagccttagaccggtgaggagtatacctaaatatttgtatatttttatttctctgcattctatcaagttttgtttcaagcaagaaataatctgtccctccttcatttttgcacatcacagagctaagtttcccgtgttacaccaatttcaaaatgttcagcaccatttatcccttttttatagttcatataaagacatggctccaagacctcaaataacaaaaagtttatttatgtatttatttttgcatggcatgcactgatgagctagtctgctcagcgagcgtttcacagattagacgcctgagtatggtttcaggcaaggctccctcatgtttctgcgcattggctgataaacacttcaaagtaaaccgctcataaatatgaaatgaaaagccgaggagtcgttatgcacagctttgagatacaaatctctttattcccttctgaagtggggtttgattgacataatgagtcatagagcctgtccagggatacactgccttttcccctttttctctggagacagggagacttgaaagaaatccacttcagaacttggtgatagacagctcacttgaaaaaataataaagttgaatcctatattaaataacttattattttgtgttaatgccgactttgacaaccatgacatatgtcaaagtttcactccacatcctcagaaagacatgattagttacaactctaagaaaaagattgccaaatttcaaaaaagtgctattatcttttttgtcatatatactgttgctctacaggcccttcatttggtaagagaaaaatcactacttcaattaattcagagtagactaaaatcccggaagccaaaaggctacagggagtaatacgggcaactgggaataattattgtggaaaattcatttcataaataaatgtctttcaagaaggagaggctcacatagcagaactttctatgaaaaataggctgaagaacaattcaaagtggagattcagtttattcttgctcacaagtttttaataattatctgcttgcttgaaaaagataaaaatttcagtgaggtcgcacaatttcccattagattatattttgtaaatgtaaatgacttacagaaacccagtggttaatgtaagaagctaagtcaagttgtgtacagggcaataaggagtcgtggagacctgttaaaaaatgggaggaagtacaggtccctttcgatgaggcagctattattcagccagtagatttttgtcattcaagaagacagaattactgttgctaggtattgcaatttttccagaaaaccctgatatctagattttatgggctatttacctatcgataaatgatggtcaaaaatgtaatttcgaaaaagcaatccaatagaagagatgtttggcctgccagtctttcctctctgctttagactttcaggagtgacaatttaaataagttttaagaaatagggacttccctggtggtccagtggttaggactccatgctttcactgtgggccccggttcaatccctggtcagtgaagtaagatcccacaagatgcgtggccaaaaaaataacagaaggagggagagaaaatgaaaactttaaatcagaaaacaatgagagaaaaaggaatcacaagatcctcttgagtggttttaatatctctttccaggatccttgggggtctcttcccgaagtcttttcaaccagagcatttgtgctttcttatttaaataacgattgtgggccagcaaacttctgaaaacagttaattaagaccatctccttgtttgagagtaaagcaatccagttatccaccaccctctcctcaaatatttaattggcttaaggtttctgactccattaagtttcagggtcagatcaactctaatcttctgccttagaaactcatcttgagtgtcagagataattaactgtccaccaaaattagtgtctccctttccatggtacaaaactgccatagagagtggttttccagccaggacctgtcattcagtctccattgcatctaggtgagcccatgtatctagctctcatcaacctagtgaagcagaagtgatggggccatttaaaaaccagagaccttaaaaggcaaatgatcctttcccaggttcttttccccttatgatatgagtgatatgtgtgaagatggactcaagatggcagtgccactagatgaaagaagccttgttcccagagttgcacctggagggaaggaacctaggcatcagtattactgatttctgacttcacaggaatgagccattaatcctgactgaggtgggtccttcatatactttagatttccttgttccattaactagatttatctaaaataatgcagttaatattgaattgtttgaaactgtattaatagtaaatatacacaactaaatgatccaaaaaagaaacactgggttcttattgagaacttgctaatgccaataactaccattttcagatctatttatattaagtaatggaggaccaaggaaatgacatgacccaccaaagaatataaaactggtccatgtaaaagcagtattcaaacccagatgttggcagttccaaataagttctcacca

SEQ ID NO: 61603 - DNA, 2002 bp, Bovine  19866880571205
  misc_feature (1)..(1): n is a, c, g, or t
nagattccatggcagaataattcaaagttatgtgatcacattgtttttttggaattacacagacctctttttaatttcagaatatacatatttgagttatttctgggtggttcagagatctagactacattgtaatttttgcaaatataccaatttaataggagttttttcagtaatagggcaataactaatgtgcattacattttattccagaatgtttcttagagcttatcttactattttttgaattatgttaatattcatattatattttcactttaggagctacagataaatatggaaataaatatagacttatttaatcaggaaaaaaattaatttggtaaaaaaagaaattctttaaatagcttcaacttcccttctcattagaagctcaaaaatttaagaacatcaaccaaaagcacgaaagaagaagaatccctggaagttgtaatagcatacacagaaagagtctaaacattaggctgaatctcaacctgccactgttaccttctcttaattttaaagccttatttggtagttttcactataatagtgccgaagaaaatacactatactcagtagccattaaaaatgtccattcaagttctaaaccagaggagagaatgctcacagtttctggaacatggccacaatatctaatttgtagtaaaactgatgtgaaaccaattaatggcttataaattcacttgacaggcaaagaatatgagttacctgctgttaataagtttggttaacgaggggaaataaaaactaatcttatgcctattgttccatatttactcagtatttattaccaaaattcaattaatcttttggaaaatgaaaaaaacaatgtatttttttttctcttggcagagcacaagaaaacagaacttgaatcatctcaatgctatatttttagaaagtctaataaattctagatttacctgaaaacattaaggcattaattggtattgattctgtttattgacaatctaactcgagattcactatttacccaaaggaagaaactataaacttcgagactgggaagtagttgtcaaggatcatagtccatcaacccccttgacatttgctgaatataaaatttcattttctcccctcctttacaaatatttgtcaaaggtgctgaggaaatgaggggaaaaaggagtatttaaaagttaaccagaatagaaaggaaaagatgcttttcacttatgaaaagcagcaccaataattattcaatgaatttggaaatcaactccagcagagaagtgtatgagattcctgctgatgttggtcacctaagaaataatgatttattgctgtttggtatatgcttacctatgtgaatacaattttccactgtggaatcaaaataaaataagtgttccaactgcttgcaaggtttcgttaaagagacgaagagaaacaaattgtgcactaatgagtatctttagacaagctgattcactctgtaacagtgaagtgtacaaccagcacaagaaaaatacgcagtggagttgctttagccggtttgtatgttttaagtacagagaagaaatgataaaggctgaatctaaatgataatttagggtgatattagatagcattgcttttcaatctctagttgtgtcatgctgcaaaactcaaatgtttatgtaaatatagtgagcccacgccagtgatgtgctgttttatgggtgtaaagcactcactgtgtttttccagattgggaatgtcacctaaaaatatctgtggtggcaagtgggtaactgaacagggttaaagtttatatgcaggacagcttctattgcattagaatttaacttctatgtatttcctctcatccaagccattattttttctcaagcattgctatatactcaaagtttcagtttatagaaagcactgaaacatcaaaaaaaaaaaaaaattcccagaatcatttgctttagtgtaaagtagtaaggttctcatgtaaatacataaatat

SEQ ID NO: 61604 - DNA, 1647 bp, Bovine  19866880575893
  misc_feature (1)..(1): n is a, c, g, or t
nagaccaaattaactgcaaagatcctatcgagcctgatcttcctgcatcactgtatcacctgagcatggtcacccaaggctggattaggtgacaaggctgcctggctcagagttctgatactgttggctctgaagttggctcttcaaatcccttctaataagctatagagcaagttttatttgaaaaaaaaaattctattaggagaataaaaggcattaaaactagtaatggctatttattgagtgtttactatgtactaggaactgtggcatgccttgggcttatagtgtttcccattgttacactggagacttccctgatagtgcatgttggggagagaagagagggaagaagtattcatgtttcagggagagtgccgatgggagatttgaatgtgctcatagtcaggcaagccatttcccctccccgctcacatatgtgtgtctccatacacttaatatgtccaggtctgatacatattcacgtgattatgctctgggtatcactgtaagcattaagctttcatacttacttgtcacagtatagggctgcatgcaaaaaaccatgccttctctatgttagagccagcttaagggattttccagggatgattgtttctatatacgattcctattttatctcatttttgagtattgaactagggaagttgcaatgctcctataaggcactagcttacataatcctcaggacaaccttttagaatgagtgtttataccctcttttgttactttacaaaagagaaaatcagaaagcttaagaaattggctgattacctagctttcaaatgagcgaattggggttctgactcaggtctgttggaatctacaacctaggtaactgcttcttttttttttttttttaaaaaaaaacaaaaggtactgccaagtttgtgttattttaaaaggattactaaaaagcttttaaaaatgacatgttctattgaagaaaattttttgaaaaaaagagggaggagtggttgattccgcattttctggagggtgagcagagtccagcctctagagagttctatgcctctacaccttagtttctcttccaccaccaggcaaatgacaaaaaaagaagccaaagttacagatgaaaacactcaaaactaattaacttactagaacaaaaactaatttttcagcgatttttatgccacttgtcaaaatctggaataccagagttctggtaggaagatttgtccccacatctaaatctggaaagttggggtcttcttagaaaaaagatttgtgattaggttttaaatggattacagaagtctatctatagttctgaatatggtgcaacttgtgaataactgtataactccagatcagagatcagtggctttgattgaaatgcactgattcagcttgcagagaagctacatttttcggttaaacattttagccttttattcagaacattttatactcctttttttaaaaaattaaagacttcttgttttataatcatgccccaaatgttatataaattatgagacactaacgaccaatgattctcagcaaatgtaattcgttgagttctaatttgagtcattccatgcatctggccctctccctaagtatccttgctctcaaccaaggtcctctggacagaat

SEQ ID NO: 61605 - DNA, 1034 bp, Bovine  19866880610501
  misc_feature (1)..(1): n is a, c, g, or t
nctctttggaaagtacttttatgaattatcctatttctgtaaaatacttgaatgactatgggtttttcttctcatctgggcctcctcatgttctggagcctctgagggtagctcagttgtcttcggcacacagtcctacctgtgggtgtaagtgtccggaacactgattagttttctcgcttccccttctgctgcttcactggaataaccaaactgcactcctggcttgtattctggactgtcacgcttttccttcctcacatgcatcctgaatctcagatttaagctgctaagtaggatactggcagctggtaaaaggacagaattcagcccctagaaaatgatgatgttaggatcattgtgcttcccaaatgaaactcaacaggaaaatagaaaattgtagaatatgcaatctggcaattgtatctcatatccctatttggcatgaatatcagtcagggtttggttataagtaacagaaactaagtccggctgacttaagctaattaaaaaaaaaaaaatctaagtacaagacaaactaagcaatcaagcctctgaaaagacagtaatggggcaactctgagtagcaaaatttaggaatcaaaggagaatctcttcatggttctatggttgagatggagccctgccaacattttcctgcccacacatcatttaaaaagattcagatgcccaaaggagaggtcggctggcccactgagttcaggtgtctactctatgaccagagaacaagacaccttgaatgaatatcacacaaagacaatacatgttgggcaaagtgtagtttttcaaaggaaaattgaaatgctgtttccaaaagaagggggaatggatactgggcaggcaaaaacaacagatgtccattgcagcaggtctatttggtatatctttgatgagccaaaagaccagaaactatgcaaggatacaagcatctctctctcacacacacacacaattctggggtcagttcctagagaaagcccatctcatttgattcactttattcccctttgatt

SEQ ID NO: 61606 - DNA, 1467 bp, Bovine  19866880612706
  misc_feature (1)..(1): n is a, c, g, or t
ntccgtatactcaagacaaatgtcaccgcaaggttcctgtttgcttgtccagtctgaaaagctctgcctgtagcctgccagcactgctgggggttaaacatgtgggaccacacccaggcgctggtttcctctcacactggctgccctccactactatccacgtggtgacaaggattcagtcagttctctctgtggtgagtttttactgccaaccaccttgggatactcacacattccaaatgctagtcccatccttctgtttgctcagacaagtaaatttgtcacttgaaacgatcttttaattgtttcttttcctctggcttctttccagggctttgtagcaaatgttaaatgctgtttaaaaaatgttttttcttctggtggaagaggttagcatgcatgttggttaactgttgcattttgaacttcccacttggtaactgacagcctgtaattaagcagaacttgaactctgaccatgtctacatgtagttttgtagcctgtcatcaaatcactgtagaatattttctgtgaaaatggcagaaaatgcaatgctctctggctgagcagtatcttatcatggtgaggttaacacattctctgatgggttggagacctgggaattttcttaccatgtgaggaacatgttgatttcttcttgaaaacatagttttctatataatacatcaatgatatatttcccttagggacacagaagctcaaatcaggtaagagaaggtgaagggagggcatttattgaaatatttaatatgtgccaggcttcgggatatgtttttcctgactgcaggatggggcgttttacctcttacctgttcagtgctgacactcctgattgagggcttgtgaattaacaccttggtaacagcatacggctcagatttggggattcatctcagacaccactggggctcctcctggtcacctgccttagctgtgtcaaagaactgggacctgagaacccagaaccagacacaagggtacgagggcaagtgtgcatgcttagtcactcatgagtcagtcatgtctgactctttgccaccccatggactgtagcccaccaggttcctctgtccaaggaattttccaggcaagaatactagagtgagttgccatttcttactccaggtaatcttcccaacccaggaattgaacccacagctcttgcatctcaagtattggcaggcagattctttaccactgatgccacctaggaatcccactctagatgtgggggaggcttactaacaagccagctgcttccttaggggactccatcttagttattaagacactccagaggagcatggatcagcagcagttcagagttctgaaccagtagagaaataaaaagaggatgaagaagatgaggtgaaattttactgtgttgactaatgacacttatattcataatcaaaaatggaaaaacatgctctgctagaattcgg

SEQ ID NO: 61607 - DNA, 2276 bp, Bovine  19866880619202
  misc_feature (1)..(1): n is a, c, g, or t
ncggatgagtgtgtctgcctgttttcctacacattaaccatgttgagtatttacagtttttaaaaatgttcctcatctaatgagtcagaaatggttttggttataattttcatttatctgattcctagagtagctgggctcctttcatggcagtttggtttgccattagttttgctattcacgttatcttcatgaattggcagtctatttcctattgggtgtgctgcctttttacgatcaatttgtaggatatctttgtagtgggatatgttaactctttgtctccttaattctttgtatattcaaagtacgttcttccagttgtcgtttgtttggactttgttttaaaaatcatttagcaggagaggtggttaaaaatactgagggtgtttccttagaaacatccccggtttgggaaccgtgcctgcccagtgtattgatgtacacatttgtgaatcatatgcatcgttcctatttgggtcagtgtgcacaacttgagtaaatgccgtccatcctatttataggcatccgcttgaggaattcccacaacaaagcttttagcatccgtcctgcaggctgtcccccttacagcttgtgcggcacatcaacgcaggagacaagcacagggatcagaggccgggcggcccaagtgtgtggttatcaggcacttgtgagaaaatgagcttccaccagaaaacgtgagaggatcagctccactgtgccataggcatcaactcatttacccccttccacagagacttgagctcccaagttaaattttaggcttgagttatctgttgtgatagtttgtattgattaagtgatcagctgcacacaggcgcagccccacgcacccacctggcgtaccattcctctccctcccgtggtgaagctgagcgaacagacagaaacattctttcttgcactggggactcctttgtgcctctccacttttatttcctttctaacccattcattatttttccttattactggacctctctacttatttttgataattcgaagtataaaaatatttacttttcaaaacaaatcagtgtctacaaacttaacagacttcttgccaagtacactttttctttggaatgaagtgttaaaaaatataaaataatacataagaaaaagaatttttaagctaaataatatttaagcaatgggtttctgtatctagtttgtactcctcaatgataatataatgaagtggtgtggtcccaggtttatagagataattttttaaatctccaaatccctgaaagcttctttggccttggggttgttgaacttgctttttattcatctctgcatgtcaattcatgcacatgaagtccctccccgcccctccgccccccgtcacgggagatgaacaaccctgtgatatatatgtttcctaattaaagcttaaatctggttcccagcaattgagcttctgaaatgttggaaccacagagtgaaatatttttaactctttccattcatcacactggtttctaggttgctggtaatgtcagccagaaaaaatatctgaattaggagcattttttcagagacttctagatttcttaaatggataagctagtattaaagatatcactggaagttatcccaaaatataattgaatttttttattggttttagtgtacagttcttatttgttcagttcagttatgaatcataggaagtgaagaacgtggcataggttggtgtcagaacagcaatgaaattttacaaaggaatttgatcttttaggaaatcaacccctttgctgtccatttggtattttaatgaatagcttcttggatatttgaacttggcgtggcagtgctaggtaagaacatatggagtgttactttttggcaactaattcattatttcgaaaaatgaataaaaatctccttcttggatacctaatagagtttgctcttctactactttatgactatttaggcaaacctctatttcattaaaattaatagctcctcctttaatctgtccttccctaaaagaagtattacatttgttttaaatagaaacaaacgttttgattctattccttaactctttttcctttttgtgtcacacaaattttatgaaactagggctattgttttaacatgacaaccacacgaaggccatagtttttttggatgaatgattttaaaatgatacaatagcaaattataaaccaaatgttaaacttagcactgccctgggtgttttgcagaggactttataaaacattataccatttgttcct

SEQ ID NO: 61608 - DNA, 615 bp, Bovine  19866880630549
  misc_feature (1)..(1): n is a, c, g, or t
nttttcacctggggcaactctgtataaatccaagtcctgataggaaatatcccttaaatatagtgtgatgatttttcgcagtaatactagttcaaatatagtcagaatttcatgaccatagataatgcacttagaaccaggaagcaattcttttgttcctgcatttgacagaccatgaaagtggttctgaagtcagagttcaagtttaggtaatagatggttatttcaaaacttacagatagaatgtgttccttttctctgctttaattttctcagtattttacatattccaatgatatagataattcaggctctgttcctcttggggactagaaataaaaataagaaattgtccacattacctcataaattccttaaccaaataaaaagtgaggtgtgagctaccctgcagactgaggtgttacttcagtcaacttcttgctctttctttttgacaaattctttttagctcacacacacaaaaaatcaatgcgttttcacctgactaattttttgaagtttgggaatgtattatcatatagattgacagttgccccactggttccatgccacagcatggacacttacaaagccatcattaatttctcacactcg

SEQ ID NO: 61609 - DNA, 1049 bp, Bovine  19866880686227
  misc_feature (1)..(1): n is a, c, g, or t
naattcttggtattaggtacatgtaagttacagtcagagaagctaagaaattgatgagttgtagataatctctgttgctgtgtttgaagacagttcatgggtgaattctgaaatggagtcctctgttgaatagatacttactttggtagcctcagtattattgatccattgaagataaagaggaaaatgttctgatccatatgctaagaatttgctttctggggaaggtagacattctcaggcttcctaatttttcattacaattgtgaagcctgcctaggaagacagaaatgtaaattattaaagaaactgagtttttgagccttgaagcagaatttgcagtactctgcaaattttacaacatcttgtttgaaaatacacatttcccccatcatgttcagaaacagaatgaaagataattcactcaggagtgagaaaagttagccatgacactaaaactcaactgaatgttttaaagtataggttgggttttagacacttcctttaagaatcagagatttgtaatttgaacagctggcctgctgtttgctattatgtcagtcctaaaataatctgtgggaaaatttaatgttgttattaatattttaaatcttttggtatagataagctggtataataatgcttaagttttaaaatcatacatgattttttttcttaaaacatcctattttgtgttatgacatgaatcaaaacttttttaaagaaaagaataaagcttggtatatagtgtgggagaataagcattttgctttcttcttccctagatcacacactaactagtaggtaaaggtgagggttttaggacaattcaggctagaaatacattctcttgaccatttttctaactgtaaaatattgaccaactacttaatatcttcaaattatagtttttcaacctgtaaagtgggaattataatagaaaccatcttttgagcttgttataatgatttaatcaggaaatagattgtaaatggagtagtgtcggaaaagaaaataaatacatcggatgttcatttattctagcatct

SEQ ID NO: 61610 - DNA, 1264 bp, Bovine  19866880701031
  misc_feature (1)..(1): n is a, c, g, or t
nctctctagcctaacaagtgaattgtatccctattttttaaacagataaaccaaagagaaatgttaatgatatgcccaagagcagctttatataatcaagactgagctactgccttccaattctatctctagtcttagttttctggagccaagttaacaaggaaaaggttttcaggtaacctagactgccgcttttataagtgcttgttatagctgtagcgaaataaaaagaagtgctgagtgggaggaacacattatcacccataaaaatgagtaagaaaggaatcattttaggcctgcacattggataggaaagtgaaaagccccatcagaagtgcagttccagaaatttgctaattttcaggccatcacagagaaagggagttctcactcaaaggcaagatctggtttgaggtagctgcctcgggggtctctgcatctttagtggttttgaaactggctcagtaattccatttcaaagaatttatcctgcagaaatacacagacaaaagtgaaaagatgcatccaggggggtgtttaccgcagttttacttgcactggtgaataactggaagcacaccaacacagactgttaaaagtttggagtggaatactacatagtcatcaaaaactcaaccgtttttatgaaagtatgcctaattactacgtaaaaaagcaagttgcagaaccataatacataaaaatttagtatatgaacaagaaataaagtttcaaagaatatataataaaacattgataagaggacattcctggtgttccagtgactaagactccatgttaccaatgcaggaggcccaggtttgatcactggtcagaaactagattgcacctggcacaactaagagcctgcacgccacaacggaagatccatgtgagctatagtgaaggcccagtgcagccagataaatagataaatactcaaaatacgataagagctatctctgagttagacagaattacaggtaattctcatattcaaaattgtacacttttgtactaatttaacaattatgtattatattgaacattagaaacaaaaaggattttgtaaaggaccctgaaaaattatagttctagcctatttattccaaactcatttctttttttttttttttccggatgagcaatctggggtcgaggaattgactggcctgattccacaagcgaattaattgttcagaaagccacagaaattgtcaaggcccactgtaaacttcaaaagagcaaaaacctgcctggctgt

SEQ ID NO: 61611 - DNA, 1518 bp, Bovine  19866880766310
  misc_feature (1)..(1): n is a, c, g, or t
ntttctgttgaggagggtgcagctaccagcaaagaaaacactcaccatgattcaaccacggttcagttcagaagcgcagaaggcaaaggaagcaattttgacaaagaatagcaagagctatccatacaaatgtagaacaaaaacacacacaaaaaagcataaaaggtattgataattaatttcaaataccatatggaaaccgtagctaaagagagggagagaagaaagcccaacaaagacaaatggaactgccgaggccatgaaagcaaatgccccaacacttcgggctgcaattgcaacgcccaagttttttcctgtaattatggttctacttatcccatcttagattcatagaaaaatctgagtggataggggactatttcatgctgggaatacaaaagtaagtttgaacaaattgcccatttgtgattatttaaataaaacatcataattggaatatgttggtcgataaaggcaattttttttccttctttctcttttgtataagaacaatagactaaatgctatcctgattttttttactgcatttctgtaaatacagtatttaatgccaggtgccccctcaattttacattgtgatgggctacagaaaaggaggagtaaatgcactctgagttgttttccacaccacttgggctctgacaaatcattcacaacattctctgcaaggctattgtcttctatcatcattctcggcagcctgactcagtggtgctccagttaaaggggggttcacttttaccacatttattctaataatggttccttttaccacatttattccaatggatggttcccttatacagttctatttgccatcactgttttcacagaccctttcgaagtatatctgtcaaatagaagtaagtactcctttctcttttatgtccagtaaaatatattctcttttgctcccagcaaagaaaaagatagttttttattatcttgagataacagaacttcctgcatcaaaaaataaatgtttcttagatatggctaacaagatttagataccccatgtcatcaattctgtaggcacacatagtcaggtcttgaggttaaagggcctggtcttatttccccaggcaccatctatcaagcttttgatcttcaaagagtttctagttgattggacttttcagcttttatatatacatttttgaaatagtttcttatttcaacaggcatttaagcagtactgaacaagttattctttcataacatccttcaatagataagaaataaaaagtatgatttaaaggtctacattgaacaaagtttgggtctacaaactttggagaaaatctgaagatgtatacctgtggcggattcatttggatatttggcaaaactaatacaattatgtaaagtttaaaaataaaataaaattaaaaaaaaagaagaatgaaacatcacctctgccttcaaaattaaggggaagacataagatacagacctatgagtgttaccttaaaaagcagctaggatcccagatgc

SEQ ID NO: 61612 - DNA, 950 bp, Bovine  19866880877271
  misc_feature (1)..(1): n is a, c, g, or t
naaattaaaatcatattggctatatcacaaaatccaaatgaatggctgaagagaaggataggagctagagaagttcagaaatctaggtaagaaactagtagagggtatgactggtatctgattggtgaaatttgattaaaatctgtccccttctccccccattgataggggaagtgagatacttccattcaaccaatatcatctctgttgaaggacaaagtgttcatcaattacaaaattctagatgctgatatagttttgacctactctaaagctttatgtatataaacacacatgtacatatcacctgtacatgcatatgtagacatccatggtcacaacattgcgattaccaaattttcttctggtattccagcgcaagaactccctgcctgtctcaggatgattataggtgttgagcagcatgttgaaactgtgtgccacgtcagacattgttaaagtgcatagtgtccattagcctgagtggaagtctgccttccagagggagaaaattctcctttgattccctgcagctagcagccataaaaatatggctgcagtgttaccctttaagatgccttttcagattatttgatatttattctttaaaagagccttaaataatagcctggaccctgctgagttcaccacagaactgtcagagacttgtatttattggacaaacagtagttacttagaacgcagagtcctagaggaaaagccagctacataaacatctcctacccccaaatatctgcttcagtgatgggcccaaactgaaattgttattgagtattattacagtagaaaatgattgtttatttgtaatgggaagatacagttcattatttaagaaagaacccaccttcttcacgataaatttggggcattcctcatacgtacccctgaagactctatttcctttttcttcattagaaaataaaatgagt

SEQ ID NO: 61613 - DNA, 1708 bp, Bovine  19866880895976
  misc_feature (1)..(1): n is a, c, g, or t
nctatagcgcacatgagagtggatgtgagattgttgggaacacctatctgggctccccccgtcggcgtgtttaggctcacaacgaaaacaggcagattgattttccctgattaaggctgcttcagtctggtctgatgagtaaatacccaaagcagccacatgcttagctgccctccctctgcaattaccttttttttcccctacacttcaaatttgcaggtctaaatttgtaattcttcacttgtcagagtaagcaaacctatcagtcacttgatcttgtaattcccccccaccccgcccttctaagagggacattcactccctcatttttcatttattcaagtatgtttactgaatacctagtacaaagctccaggccaggtaggctttgcagatgcaaaaataaaatatcatctcagtcttcaaagtgctcttctgtgcccgaggtacagagaagagggggcagtcaggatatgctggccaaatgctataaatagtcctacatacagggcgctatgtgatcacacattggaaagccttaatgctgcctggtgcctccgagcatgccttccagagcaaggcatttttaaactgaggtgtgaggggatggaatgaactgggagattgggattgacatatatacgctactatgcataaaagagataactaatgagaacttactctagcacagggaactctactcagtgctctgtggtgacctgagtagaaaggaaattcaaaaaacaggggctatgtttatacgtatggctggttcagtgtgctgtacagtagaaactaacaccacattgcaaagcaactataccccagtaacatttttttaaagaagcatgtatgaataactagcttccttctgtcaatagatattaaaaagatttgcaaacatgaaaacaatgccactcttctcactaaattttttaattaaaatcttgtttaaattttaaaaaactataaataaataaactgagatgtgaggaataaggagctattcttcagggggccaaggagggaaaagacactcctagcagaggctgaagaatgtccacatgcttaggaatcagggtaagtgtcatagtcgtccagaagggagtttaggataggagaaggatcgagagggccttgatagtgcagtgtttgaatctgacttggtgactgcatttgtgggagcgtagcgggagacctaaggagtgaatgaacagcaactgaataaaagtcacgtacatctcaaagttaattacaaagataatctaattttatcttggtgatgccatccagccttctcatcctttgttgtttccttttttcctgccttcaattttcctagcatcagggtcttttctgactcaatggacaagagtttgtgtggactgtgggagatggtaaaggacagggaagtctggcgtgctgcagtccatggggtcacaaagaactggacacgactgagcgactgaacaacaacaaaaattttatccagtgaacctatctacagtcttaagtaactggagacaccatgatcggtcagaatttgtaggtaacttgctgattctccccaaaagtatccctttgtcttctcccaggactgagtcaatgatgtcagctaaagaatcatcattaaacccccatagatattaactctttgacaacttcccagccaagcgtttggctgagacagtcatccacgggccacagt

SEQ ID NO: 61614 - DNA, 759 bp, Bovine  19866880946813
  misc_feature (1)..(1): n is a, c, g, or t
ntcacttttcccatcaagtacctaattaccaaataggcaagttgtgaaagtgctgagtcctaagaaagcagggacaccaaaacatatctacaaatcagctttaaaaaaaaagaacaaagttgaactttgtaatcaaaggaatttggaaaaactccattttaatttcggcacatacatgaaattatgtgttttatgatttagttgttttttaattacaaatgcaagaggaagtaccaaatattttcaggttttagagccctacaaatgtcttcagctgaccttgttctgcactgaaatggaagcaaagtccctctctgagagtgtccaagtatcccaggctgtgtgctggtccaacagtgtctttgtgacccagaaggtaattagtctgagccctgaaggatgattggattacccttatcggcacatgagcttgcagctcgacagacattattaatggtcataaaattatctgatccctttttaacaccagccttagcatttgtctccctgacctcatgcaggaattattcccacgggctgaccaatgtgctgggcaaagatgaattcctttttattggtttgaaatttattgttcgttaatttcattgatcaaaaggaataaaagatcaaagaaagagtagcccattacatgaagatacaaatcattattactttctttaatatttttgacattagcattaatcactatgaattatggcggggctcctctggacataatgtgcaacttcaaacacattt

SEQ ID NO: 61615 - DNA, 2354 bp, Bovine  19866880946908
  misc_feature (1)..(1): n is a, c, g, or t
ntaaagctgggaaaggtcatggaatacagcgtcaccaaataaaagagaaatttcattaactatttattaatgtatttgtaaatgagggcagcagttcctttaacaaaactataaatggtagctgtgggtgttctttttcccccagtgacttggtactttttgttctgtgattacaatattctacttccaaaagggatgactcaatcggtaaaacaatgtcttcttacttgcagaataagattgctaacactgaaagaatggatccctgtactctgatgcctgctgtctcttaggtttccaagtgacaaaaagtatttcgtgttcccatgaaagaagaattcagatagctaaaatttatcaagtccttataagcaccaaacattgtgttaagtaccacatgcattaactaatcacacatataccacccaacctatgtgggcagacactgtctttattcatattttatagatatattaaactgacactcaagagagatgaagaaaatttctcaggataatccaggtagcaagtggcagagttggcatttaaacccaactttgtcaaacatccaggataatgtcttgtctgttctgatgtcaataaataggaaataactattgcttataacctttcactttactttgtattattttccatttatccctacccacttttgctatctcattagacctctttatcctcaccaaaggggcttcccaggtggctcagtggtaaagaatccaccagccaatgcaggaagtgcaggagacgcaaatttgatctctgggttgggaagataccctgaagtagtaaatggcaacccacttcagtattcttgtctgagaaatctcatagacagaggagcctgggttgggggcagaggggctgcaatccatgggatcgcaaagagtcggacacaactgaatgatagagcatgcactcatccccactaaagctaccacaagtgttttagaaggtcccaggcttttctaatagggcttctgaaatagtttttacagcaattgcaagccatccggatttcatttttccttttagtttcaatggtgttacaagagggtccccactgccctcactgcagacacctcttgctgccctccttggatccagccactggcttgcagatagatgttcccgttgttctaatgcctcactacacctaaagttgtatctttagaaacattgatcttgacaatttttccaactgatctcttttttcccagctttttccactttttacaattgatccctttttccaactcttttcaacccaatggattgtagccccccaggcttctctgtccttggaattcttcaggtaagaatactggagtgggtagccattcctttctctaggagatcttcccaactcagggatctaatcctggtctcttgtgctgcaggcagattctttattgtctgagccaccagcgaagctccttccctttcctagtttgatctaactgtattagctgttagagtcatgttcttccaactcttcccaatattatcttctcatcttacaagtctcctcaaagacatcttctttgatctcatcatctaaattgtatctgtactcacactcatgttcatttccatcaggtcactaattataatatattacacacatatgtatatatatgtatatacatgccttttaacttaattgtcttttcatctgcttaaatggtaagttccatgaaatggaccctctttcatctaatgcttcagtattcccagggattcacattatgcctggcatgaataaacacttgttgaatgagtgaatgagtgaacttcaccctgggtttgagccccttaagctaggtatgggataatataattgacatataaaggtggctgcatttatcccaagttatagaaaagaaatattagacattatgttttctttttagatgaacattagacatggaattaactttaataactttatataaaaattgctatgatatatccatggggcagagtgggaaacctacataatgggctgttgacagaggtcccccactcctttttcttccttgaacatattgagacatattattgctttttacatatgctttgttaaatggatttgcagaatatattgccaatttttaactaaacagattcttacagagaaactgcagattgatgatagcaaaacactaatgatagaaacataagtgagcaattgaaaatgaaagaactgacacttcctgttttagaatatcatcttcaaaagccgcaaaatgaggtaaaatacaaacacgccagtaagaccatctaatcacatttgactgaaaagttggtgcccacaaatgaatttatcaaga

SEQ ID NO: 61616 - DNA, 1405 bp, Bovine  19866880947947
  misc_feature (1)..(1): n is a, c, g, or t
ncataatcatcaggctattgtcagtttatccatttaagagtttagatcctgaggcttagggaagggcgatttttcctaaggccacttacttagctgtggtgatgcctggactcacaaccagactagagttttacatccaaagccctagctcttgactactcttaatattaagtctgcctccaagatgggaaagtggtggtttcagagcagaagctattaatattttgaccttccttttgttaaaataaatttacgtatttattttctattgtgctgggtctttgttgctgtgccagggctctctctagttgtagtactctggcttctcattgtggtggcttctcttatgttgaagcctggatttctaggcacacaggcttcaggagttgcattgcgtgggcttagttgtcccacagcatgtgggatcttccaagacaaggaattgaattcacgtcccctccgttggcagacggatccttaaacaccgggaccaccagggaagtccctgacctttcattttaatttttgctgctcgtaagagaaatccctaggaaagtctctttttatttcctgtaagaccttatctctcaaaaagtaaattggatacattcttggatttgaccaaaaatctagagcagggtctaaagatacatgattcttctcctgaccacattccttgccccaatctctgtatacaaaacatgccttaaatattcatgttaactctggaaatagatttccttctggctttttgtctgtagtgtgggacccagaattctgaagtgtgaatgtttatagcaggtagcacataacactcgtttgactgtggtacctggaagtatgatctctggactttaccttgaaatgactcttttagcatctatgtactatgcccacgaaacaattgacaaacttgaattttattattaccgtgttattgataccttttaaacccctaaattctgcttcctttctctctgcttcactatggcatctgaattgaataccaaagagaaattattcattcaagcatttcctttgcaataattattttgaatccttaaatcctgacccatacctgttgggggtcccaggtgggctaggctaccagtgtggatagttggaaggctcctctgggtactagtctttccatcacagcttatattgtctttgtaaaaatgaacaaactctgtggaatggaggaagcaaagatgattattatgaccaatagcatgttggaaccttttttttttttggtttgtgtacatcatacttgtctgcataagttaatgaataaaatgtgaagacttcctacttatcattttaatacagttttgagtttcacaggagagaatttcttatttgggtcaaggtgattttttttttttttttggtgtgtgagtgt

SEQ ID NO: 61617 - DNA, 1528 bp, Bovine  19866880953998
  misc_feature (1)..(1): n is a, c, g, or t
nattaagaggaggaaatcaaattttattaagcacttaccaaagatgtgataataatatgaatcctaaggacacgttaggcaattaaagtttatatactggctgagaggagaaggggatgagggcttgaaacttgaaaggggaggaaagcaactgacaggaagatgaaaagagcaaatatttggtaaacaaaatgtttgctggatcagagacagtgggacagaaaagactttgacaaacaggccttgctgagtttcccccagtctaccacacacttcatatgatactttagttctctatggtgatagttctctttttctggaataggccgtttatctaaattgttttaaacagataagggaggacatataatctcctcctaaacttttcgtttcatgaaagcgatcagtacccagaattctgaagctgaagagacacattttggagtggctagttttgttttccttcagtcgcatcaacattttgtaatgtcaattgatgactttgctaatacaagtatttcatgataggtttcttgtttctgacctacatgagcagcggaataaagcagatttaatttacacaatggggatgaagagaaattacgtgaagaaatgttttggattttttggtaagactgtcagaatctcaatgaaaaggttattaattcatataatttggtttcttaatgactaccttttatatatgtttatttgtatcattaggtgatactcatatgcacatgattcaacagttgtagaattcactggcaaaaggaaatatggtaatcctcatgcctcaggtatcaaagtatctaattgaaatgcactaggaggaaaagtcaagtttattacccttgcctacaacttgcagtgtgacattttgctttatagcatttggaatctctcacctccaaagaacaatgaacttcaagaacataatacaagtgggaaaattgccttaaaaatgtaattttagaaatgattatctgaaaatactgttaaatgaaaaagtttggtaaaaagatgaaactaatatttcattcatcttctgttgattcatatttaaacccaatgtaaagttcagatgtttaggggaaagaggaaaaaagaaagtgattgaataaaataagtcaggataagtccttaaagtttaactcagatattgttatttgagagtctgtggtgtgtggcttatgatttttttatttgctgttgttgtttctatgggtaaaacatcttttcaaggaaagtaatacaattattaaacctatgatttctttgggggattccattttcatttattatggacaatttacccataaacagcacacaaaaatcaaattctttcatgaaggaggggtaacctaattgagcatatgagcagtggtaatcctaactgttagtctgtgggttgcaggtggttctttcataatacagtgcttacaatagataatagttcttaacagtgccagccactaaggtctttacacacattaaatcattccatccctgcatcaatattaggaaa

SEQ ID NO: 61618 - DNA, 2737 bp, Bovine  19866880971825
  misc_feature (1)..(1): n is a, c, g, or t
ntatgtcttacctgtgagatttaagaaagcaaaaagcctaaaagagtcaagttatgccatcaaagaagtgctgcagttttagttggttactcggagttgaagagatgtgaattaatgacagacagatgtgtacctgctttagtctccaacatataaactgcaccttttggtctttgcttcccataataagtcattgatcacagcacacaactattgtttaccaagtataacacgctttgcatgtctttgtttctctccatcagtttttgccacattctttctgagggaagaattatcctgaaaagccaattcccttcccaaggcctggttgccttctattgatagctaatcctgattcaaatgttgaacttaatatccttgtgagtagtagttgctcaatgggtaaagcccacaaactccatcagcggtgccacaggacagaagatcagaggttctggcctcatttaatccagacacaatgggatttgtggagagaaggtgagtagcggggaaaggagagtctaatcttggaagaaatgaataaatagctccaagtctttctaagggaaagattgaattgaacatggcatttgcactttacaaggaagtagatatctaacccaagcaagaataagagtttagggagaattcttggtttaaaaatgaggagatgatcagaatgaggattacaactaacatgcttgcatttattagtgttctaccaacatacacacacaaatcacactcaagtttagggcctcagtacagagctcagcttcataaagaactgactaatgaaaacagagatggattgataaatacagaggggaagagaagtcttcatagtagagtgagtaaatatatttttgaccttaaaatgccgttattggtacagctgagagatgaaagtcaaattccacttcattattgtagccatatgcaggaaacaaggatttatgccaaaaccttatctcttcccaggcagtttggtgaaatgtcacatttgctttgtccaaagtaggccaaggaactgctaatactggaaactctggataatcaacatgtatcaactgcctagaggaacttgggtccagttgtaagcttctagaggccttcagttgactaaggccttagttgatggcttaggcttattgtaccctctttctaaagagtccacactcactgtctactgaagcctcagtaactgcctgttccacgccagagatgaggttattacgagctttcatgctcattgtttgtatagtggattactgttatgtctacatgttgttatctttgataataggtgaacagaagatgcagttaaatgtaaagagttggctgcaatatttcagattcaagctcttcattttctttgttttgtgacactgagtgaggaagctaggttctccaagtctcatggcttgtgatgaagaaggaaaagatgcttagtcattatttggcaatagtaagccctcaaatggtggttattactttaaggttttaaagactatattccctctttccacactatgatattatataattgagcataatgttaaggacttaggtgctctggtcctttttgtattttctgtagaaaacgttttttctttctcctaatatcttccttttgtatatatatgtacatatatatatatacatatatgtatatatgtatatatatgtaccaaatatatagtaccaccaaatatataatatatatattatgtgtatatatatttatattaagtgcccacacagaaaccttgaaggttaatatatagcaatgtattctgtatacgaaagttaatacatagcagtatgttctcttcccacccccaccccgggatgttacagccaaacctgttagtgttgtttccttacaaatcagtgacttaaaacaccatgatggcattctagtccagaggactttaccatgtcaccaataactaaatagtcttaggtatctttttggcctctatggattttgaaataacacaattttatgctaaagtaagatacctattacagtgattacaataatgattacaatgatgataggaggcacaagaatgcctctgttattgtttcatttccttctttttagaaatctatgaagaacagaagcataggggagcttatgtctctatatagttcatttctgtatggtttgtgcagccatttatggcttcttttgcttttctctttaattgattccttattcagcaaatagaagcaagatacaattaaccttgtgaatagttctttagcggggtacatattcagatttgattgggtctcagttgggtcactctcattgacctgaaggtcaaaaaaagagcatgctgactgcttttgggtaagtaatactgaattaaatctcttcagagactagtttaaagcctggaaaagtcttctggcttaaacagagagagataattggtgtgtcttgtggcattgagtgtttgagtgcaaattaatattttggtgtgattctttgctgtatgtttttaaaggattcccaatgaaagtgagtttagtatacacataaggctcacaattttctgttgagaacagttgtgagtagcagttacggcactaattactggacagccaatctttcagcatacaaagatcaggtcatgtttttatgacaccttaaacaagcatctacataagccagggtgtttcaaaagttaaatgccttctgaagacatgtagttaattgaaattt

SEQ ID NO: 61619 - DNA, 1632 bp, Bovine  19866880981729
  misc_feature (1)..(1): n is a, c, g, or t
nacattaaaacacacactcaagtctcttcatcttacactcctatctagctaacactacattaatctgctcctcagccgaactttccaggagttttctaaacttgtggtcttcaattcttttcaaagaatactttatttaactcaataccttgcagatgtcagatattcttagtgttaagatcattcccaatatatattactatcccagacatgcatacatgcatactcagtcactcagttgtgtccagctctttgcaccccatggactatagtctgccaggctcctctgtccatgggattattctggaaagaataccagaatgggttgccatttccttctccaggggatcttcccagccccatttcacttgccaaaacccggaaggatatgtggttaccagaggagataagttttgacatgaatcttgaagttgagtttaaaatgtaggcagaaggctgaaagtgaagtccccaggtcagacccatggccttgtctgagtctaaccacagagagagtgaacagaattcttattgtggagttagggtcaggaacacagaaggcagaaaaagaatcagcaaaaaagagatgagatgccagacttcctatgagaagaaacactagcagaaacttaaaagaagtattaatatttgagacattaaatctctaattatgtctaatttccttgtgtctggttctagaaaattcttcttttctaacactttatcttgtagaggtctgactgaattaccctgcaaaaaaaataatatctgtacaatgtgtcttaataaatgctgaaaattatacaaatagcatttccttcactggcagttacaaatcttactttactgtagtttgaaggctataagtacactgagctttaatgaatctttgagttaaattattgatgatcatgaatgctctcacaccgaaagccaacgagagctatacccctgcagtttcatgaacataaattgtgtctgtatattataagtcttttaggagaatcacaatttcctgctgatgagagctgtgggtacaatcgttttgcaacatggtggtcagttttcagtaacccttaggttattagatactaatcagatgcattttctgtttcatgccacttgaggcctttggtaaaaggggaacagaacccaataaatgaatactatatgcatgtagatagtaaaccatataaatgtgcatctcctcagcaattggcattgaagttgtgacaagtcaggctctatccagtgcagttccctgggggtattcaacatttatctggcactggtcactaatatcagtgtggatatgtgtctcattaagagtcatcttaaggaataatacataagggaaataatatataagggatgtcttaaggaatgcctttggttgggaagataccccctgctactgctgctgctaagtcgtttcagttgtgtctgactctgtgcgatcccatagatggcagcccaccaggctcccctgtccctggggttttccagatgggttgccatttccctatcgaatgcatgaaagttaaaagtgaaagtgaagtcgctcagtcgtgtctgactcttcgcaacccccatggactgcagcctaccaggctcctccatccatggggattt

SEQ ID NO: 61620 - DNA, 1428 bp, Bovine  19866881026250
  misc_feature (1)..(1): n is a, c, g, or t
ncaataatggccttcaactcacagggttgctgtgatagctaaatgaaataatacacactaaagcatttagaacagttactgtgtggtggtaagcactcagtcttaactattttaaaaatagccttgttgaattcttcttaatgcttgcttccctatttttctgtgcaaggaatcattttagaccagtattagtagtttttggtttcctgatgattcttgctgttgttcccgatgatgcctgataccaaatcttcagatactctcagtgcataagtttcacaatgatttttgctaatgcatcctatttttaatctatagatgtcctcaaagaacaaggagtctgcgggtgcacacatatgtacatacacatgctcatcacctatggaacttctaggaaagcagatgttaccttgctgccttaagttaggatgggcatacacatctgtaaagatggtaagctggttgattcagtaagaaagagattcatttattaatctttattaacatttagcagcacagtgaacttaaattcatttttttcttcctttaccataaaaaattccatctgccatttattaatattaaggaatttgattacaacttactcttggtacagatgaatgctaaaaaaaccccatacaatccttcgtaagtactaaaaatgaactaaggagaaaagacatatcaggaaaagaaacagcatgggggtaattctgttaagagtgccttaaaagcctgtattgtactattgccacgtaaaaagggggaggctgctgccaaacacattgctgaaatgagaattgtttaaactacaaagaagcatgacagctccatgtgaacaccttaaaggcccaaggtcacttacaagggagaaccaggtggtgaaaccttggagcgaaaaaaattacagccatatattgactctagttatcctcagttaggagatgtagcttaccattttcaaaaacagagattcttgttctgcatgtggattgatataaaattgcagaaaacagaaagctaagaattttttgttgttgttgttaatatgcctttttctaccctgattacctttctggggctttgtatcagaatgacctctgtatcagaaacattaatattgccagagttaaaataaataaatagtacaaaatcagaatattcataggcttgttccagcggggcccaatatcagggtgtttctatctcttttaaaagccagtgttctaatcacatcagttgtacaggtaagggaaattaaaggttcagaaagttagtgacaaagagaattaaaattctttggtcaactacatactacacagagagccaaaaatggagtagtgattaagagcacaggaacaaattccactgccagtaattactcctttgtttccttgcgaaagttaaccttttttttgccttaacttc

SEQ ID NO: 61621 - DNA, 858 bp, Bovine  19866881097941
  misc_feature (1)..(1): n is a, c, g, or t
nctctatttatgtagagaccagggcaattttaggaaaagggtagtgatgaagaccccccaaatggtccacaaataaataattctagtgatacggatgcatgtggcttgtgcatgcatttcaataaaagtgtctagagggcactgatttgccatgtttctatgggtctgtgtagcaagcaccgcacatgtgtgggtattacttgtggataagcactatttattctacaaataaattactatgtagcttacattgttagggtcacatgatagccctatagtttaaaagactgaaataaccatgcatttatcttgtcactacaggtacttacagtgtaattacaaggtcaacagttactatgtaattacgtagtttcaacattgtggttcttaaaaaaaaaaagtacacgattctcctagtacctgctgagaacccctatctctactccaacatcctcacttgcaaaaaattctaaatagcttcaaacaacattttcaaaggaaaacaaatcaaggaatctttattggaatgatagctaacttagaattagtatacagtggtagcagtcagacccaagatgtattttggttcaatgccctcattttattggaagaatttattttttttaatttcctacagaattgtacctaatttagaaagtaactcaagatagaaagtatggcaaataggtgtttttatttaacagtaacaattttataaatggctgctcatttatatatagtaatgagatgggtttcccatgtggctcagtggtaaagaatctgcctgccaatgcaggagatgtgggtttgattctggggtgggggaagattccatggagaagggaatggcaactcact

SEQ ID NO: 61622 - DNA, 1097 bp, Bovine  19866881114492
  misc_feature (1)..(1): n is a, c, g, or t
natcaaagcccaactggggactggaattattattgtcactgaggggcgatgagctttccctgattcccctacagagggtcgctggaggagaggaagggaacctcgacgcccatctgcacacagtggtaatgaagtgcccttccttctccttgctggtgtttgaggaggataaatgttaaatctagtttcactaccactgggggactcacagagaactcaaaggaggtagccctctccctctcaagcaggttggtatatgcagggtcctagtagggagtctgaaaccccaactctgcaaggaggcattcccaccccactccaccccaattgccccgcttgtcaaagtgagtcaagtgaggaacctgggctttcacttccacctgccagttaagcctcagggtcccattgttcccaaaggcttggtgtcagaggaggcctactgaaacaatatttaaataagatccatatttttgaaacaatacttccaatagccaggatacaataaaaaatcattcatcataccaagaatcaggaaaatctcaatgtgaatgaggaaaaataattattaataagaaattaactagaggccatttggaagattaaagaatctaaatatttttgtttttgcaaaatatggccctctgtgatcatgctgcaaaatgcaactcagaatgaaagatgaaatattgtacagtcatacagctgtgccataaaatgtatattgtgccccacacaaattattattctttatccttttgaataattatagtgcagctggaataataaattgtattaaacataaaatatactcttgataatcaatcttattttctcaagataaagtcacaataaattatatttactatttaatatgaaatattgcttctttctaaacagtgattcatttttgaagtggccttttttctaggatcatttatcctaagacaaagagaatctcttataaataaacatgggtcactcttcttgagcaaatgttagactctacattttaaagtcagggatgaatcctgactccaaatttttgtaccagatatttaagaaaagaacacaaattataataccatagttctctttat

SEQ ID NO: 61623 - DNA, 1383 bp, Bovine  19866881116593
  misc_feature (1)..(1): n is a, c, g, or t
ntagtagctgttgggacccttttttcccccccatcttccctcccctagccttcctccccctttcccctctctctccacctctgcccttcagctgatgtaagttgaattgaaaagttagcagcagtgaatttctcattcaatctgtgctcccaggaacctgcttgtttggaattcgcatccccgccctccgtcccattataaaggaggtggagtgggggaggatcgctgctggccttaattttccaagaacaggtgaaatacattctgtcgtgaataaaacaccccgagctgtaacttttgaggctctttcacatttcccccccctggcagaggctgttgtgttttgttacagcagcaggaggagttgttattagagtgttatggaaaccaggtgttagagctgattagtcactaatcttccatctctgggagcttggctccaatcttctgttcatcagaatcattctgtcgcgttaatttattcatcccggctctaagaaccttgtcaaatcaacatggtggtctccgctgggtccctaatgcactatagccccgatcacaaacctactatatgacacataattcaggataattggcagtcagagctcaaacagccctgtgattaaatgggtatggagattgaaatcgcttctcacctattagaagggagtctcgctaggccaatggcgttcttcagtggaggctactgctagaaagggctgtgttactttccccagctttatgtggttggtgattgatgagataacacttctttttcctcttaatattttacctctcaaaacacaaaatgagccacttaactttatatttccttttttagactccatctcaagtcttcattagtaaatcttaatgactgctaaaattataggaaacccttcacttagaataaaagggaaatataccattcccccccgccccattttgtgttgcttttgccaacagctcacttttgacaactgactgtttataatgccacggagggaagagtttgacaaggtttttgatttttgacaagtaatgtgaccagttctatgtggcttaaaacagttgtttctgatgaaaataatttagcacagctgggaggaatcattgcatggtagtgaaagctgcatttatattcactctgaaccttgtttcttctgtctgtgaggtctttaaaattatagaaataatatatgtttgcaaatttggaagatagagacaaataaggtgataaaaatctgtgctagctctctattcagggagaaagtatttggcatttattttctttgggtccttttgcacatgaagtaaatccaaagtgtgtgtggattagattaattagattcatgatgtttctgttctgccgaggttcctata

SEQ ID NO: 61624 - DNA, 978 bp, Bovine  19866881120324
  misc_feature (1)..(1): n is a, c, g, or t
natacaggagagtggagagaggacatcatttggttaggatgtgtccaattttgacttttttaaaaaagaaggaggtatagaaaaaaaagatagaaagagggatggagaaagaaagagctgacagtaacaacccttgggtttcagcatctcagtttccttccgtattcactcattgggaatttcctctgtactttttctcagttgctattaatttttgcatgtcttttactatctcagttttgaataaatactgtctttttgcagaagacaaagtggtaaagaaatcgaggtcacactcttttcccaacagattatgggttgtttaaaatgcagttactcttgctattgtggttagatggaaacacttagtagggaatggaccccaactgtctcctaaagtggtaaagggccttcacaacgctattcttgggataggcacaaccaaatttcagttctgtcatttttttggcaagcttttaacaggttattgaaattcttaaagaatatcatcacctctttttaaaaataacatttcaatctttaaatatgttcataatcagtagtactcgtttcttgaatacctaaatgtgtgactagacccacaagctggagtagcaattaaactttttttaatatcatctgtgttcacccacagttgattacttaaagaagttttgaaactaagaaaaaaaaaagaatttgaaatttcacaggtggctttgcaagagcgaagaatgattagtttgcctggaatacttttcccgtgctgtcatattgaaggcttgaatgatgtatatgatgtatttgattttatctcaaaattgagtagccttattttagtataataccctgaacaatgaggaaaaaaagcattttctttatccctggttacccttataaatgatatccaccttgaataattgttcagtcgaagctgagatcagtgcatagagaaaaatatatttcctctctttttta

SEQ ID NO: 61625 - DNA, 1570 bp, Bovine  19866881136084
  misc_feature (1)..(1): n is a, c, g, or t
nctgtcaatgcaggagacagaagagatgtgcattcgaaccctgggtcagtcccctggaagagggcatagcaatactactccagtattcttgcctaaagaatctcatggacggaggagcctggtgggctacagtccatagggtcacaaatagttgaacaaggctgaggtgatacagcatgcaggaatgcagaccacccttttattcactaactccatctgcattttaccaatgagcaataaaataaagaaacctggcttaagaatacataaaagcagcagaggctggataggaatccaggtatctagttttaaacctcgatttcacccacaaatgtcacctctttttgtttctatcctgtgtcctctattgtttctaaacaacaggttaaatttctacaatgtaaaaatgatctaaaattttaagcatttcgaaatgactctatttccaaccacctctcattattatctaaattttggaaaattaaactttatttccagtaagaagaaacttcaaaaacaaacgaatgattttccagccctcgtttgtgtgctaagtcacttcagtcatgtccaactctttctgaccctatggactgtagctcctctgtttatgggattctccaggcaagaatcctggagtgggttgctacttcttcctccagggttccaacccttaatcaaggttgaattccttgacctctctttcagtgttaaccccttttccattatacccaagtgttttcatgtgatttgttaaaagattaaatttaaattaaaatttactccaggggaattctgcacttctccttgagatgaggagtgacaatctgcaatctcacaatcatgataaatgatcgctgtaataaggagacactaaaaggagaggctcagctggttgaaggaggagaagagtcagacagtccaataactggggcttgacttcattcagtttctaaactttgcactcaacaagcacttactgtgcatctccaaagaattaggaactatgctgaatacagtcaatagacaacaaatcagacagggattctgttttgagcttcttgcccattccttggaaatcagaccaaagcacagatgattattgtaagtttgtcacagtgtcagagccatgagcaatacaattgatacatagtgatgatactgtatacggttgtggcgctggagtgactgaggagatatcccacatccaagggcaaaggagaagccccagcaagacggtaggaggggcgaaatcatgtttagaatcaaaccccatacctgccagagacactcagagggctcaaacaaaccttgtgtgcaccaggacccagagacgccacagagactgagacagaattgggtttcagtgtgtcctgtggaggtacgggtcagcagtggacccgcaggggcaggggctctgggtgcagcagattcaggtatggcatatgctctcttggaggaggttgccattaactccactatagagctgccagaacttacagaggactggggaaatagactcttgagggcacagacagaatcttgcgctccccaggacccaggagaaagg

SEQ ID NO: 61626 - DNA, 1263 bp, Bovine  19866881154263
  misc_feature (1)..(1): n is a, c, g, or t
ntggattctgaatattcccacatgatgcctaattttttccactggagttcattggaagcctggttaattgtgatgcattgagtagcatttggcaagactagatgaggtcattgaaacaaagattttgcacttctggacacattgtattttgttgcattggagattagggggaggtaatttttcttttcctctcttgtctttttcccttaatattgtatatgcattttatttttaattcagagggtgaggaaaaagtgtgggatctgggagaagggtgattatgatgacattattactttctgccagtgtagcatcccttcttctcagtgcctctggccaaggaggtttcaaccacatgcccttccaagcttgtgatttcttctatcccatcagccacagggtgctcagtgggcaccatgtgatgctgctgtgccctgcagactaaaccttctggtttgacaattccacagacccatgcaaagaggaaagggaaagctgccttggtattgagttgtagattggaaaaaatgggaagagacttaaatgaaaaacttatttgccagcttatctcttggtcttctcctatccccttcaacaggggaagatatcaagctgttgaaatttaaaacaataagaaaagcaagccctgcgtcttactgaataaatccagttcccctgagcttggagataataccattaaaccccagctttggtcagaaggactgagcctatttttgggagctttgaaaaagcaaaagaaatgaaaaggaaatcatctccttatttaataaaagcaaggaagtaaaccacttttcagctatagctcttccctactctgtgttatctttttgtttgggcagcaattgcagacccatatgctaagcagtggaagatatttttcagaagcatttgtctccttgggaggcttctaagcttgttttattggcaactgtgaaaccaccactgggtctgtcgtgtggctcttctccagatggtttgcatgggtggctcgtttctactggatgaaatctccctttggactccagtttggatttgagaaatttttgcactatctagtctttactttcatttggtaaaattctcatactgtttcacctgtaggccctttgtctttggagcttttgatgggtaagaaggaagtaacatggtggaagccaatgtcagtagcactgatacaaaggaacagtctctgaagcttcatcagccatcattgtcaattccagtttggatgggtgacaagtg

SEQ ID NO: 61627 - DNA, 714 bp, Bovine  19866881159979
  misc_feature (1)..(1): n is a, c, g, or t
ntctacggatccattacctcggcaggccacaggactagcacaagcaaacacccacaatcaacaagccaattccttgagcctttgactcccccccctccaaaaaaaaaaaggcattagttagcatttagatggatgacaaggcagcagacagtgaagtctgaacccggcagaaaggcatccagtgttctctggagtgtgtaagccttcatgactggctgagtagatcacagacaaaaacaactccgtgcaagataaagagaaaaacccaatagtctcagtagttttaccaaactaatgctgcaaggtgtttggggccaggtctatatatgttgcgtaagaccttccctttaaaaattataaggcttcattgaggtagaattgacctacctgtcctttctgtattattatcatgatcattttttctaaatcattgagtatattaattctcattactatcatataggtctctttaccccttgactagataccatgaataaaaactcagcgtggagtagctgagaaacactgtcagtgttcagagaacacagatctgtctggaatggattaatcacgggcttcaggatttatgaaatgggaggatgtgcaccgagactcgtaaggcggatagaatgtggacaagtggaggagagaccaaaatctcaccaggcagcagccgtgaaaacaaagaacccgagaaagtctgaaagagaatga

SEQ ID NO: 61628 - DNA, 1516 bp, Bovine  19866881164609
  misc_feature (1)..(1): n is a, c, g, or t
nacagaaccctcagggataggagactgtcaagatctcaaggatacaaaccagcctctctgttatcacttgctaaatcaagaagcttacttaaatagttgcaggatttaacttctaatacctactcataattgatttacatgtgaagggtttcttctcaacctttccaaaactcatgtgaaattattttgtaagtttcacatggtaaattatgaaggcaaaataagctatctctaggacatatcagctggagaaggcaatggcaacccactccagtactcttgcctggaaaaccccatggatggaggagcctcataggctgcagtccatggggtcactaagagtcagacatgacagagtgacttcactttcacttttcactttcatgcattggagaaggaaatggcaacccactccagtgttcttgcctggagaaaccagggacggggaagcctggtgggctgccgtctatggggtcgcacagagtcggacacgactgaagcgacttaacagcagcagcaggacatatcagaggttgaaaaatgtacagatgaacacccacttaatgccgttttgatggtaaaaagcagaatgattacctgtgtactaagctgagcaaagaagctgggaggggacctagctcggggatgaaggtcaaagatggccctattcttgtctgtgataatttcctcctacttacaagaagaatgattagatattcataaaataaaaattaaaaataatgagagtaaagaaaattgtaataaaagctacataaagaaaaacatagtatttctccattagactagggcacagttttccactttgctgatgacagatttaccaacagtttgctggaaatcaaaggacagagaaagaagaaattcttcaacctgcttagtacagagatgcatggagcaaactataaacagggacactcatactgaccttggagttactagaagtgagaaaaatgtgtattattagtagtgtactgacccatagactctgaccaagaaaggattcacactatttattccacacttttagtagccatgcatttcaacatcttttcgcattccatttgttggtgataattttcagtaagtaagaagcactgtacctttaagttttaaatataaaaaatgacactgattaacctttaaaatggtgccatttaatcaaagcgagtgaatctttaatgggttttcaatggactaataaatcatgagattctttttcaccatggaaatatacaaaatatttaggaggaaaactcttgttatacttcttggagtgtttgtgtgtgagagaatgaccaggaagaaaggcaacaggggttcacacatggttattatcaatgtgactgtgatttagaaggggaccactttgccttttcttccagtgagttcttgattagttaccttctcctctgtgtgctgtaagtggccatattggggatgttttaaggaactctgacaaatcgtgagacagctctaagaaatatagttgagcatt

SEQ ID NO: 61629 - DNA, 833 bp, Bovine  19866881172842
  misc_feature (1)..(1): n is a, c, g, or t
naatgactatttgctttcgaagcagaagaggtaccatgcttgtctgactttaaaacctttgctctttgaagaggtctccattataactagttgtatttgtgacttctctgttagatttttgtcctgtgaaggcaggcattactgttacaactgtatcttctatgtaaatattgtaatttctgagctactagaaaaagatatcaatttaataaatagggagtgataactctatcaggatggagaagaaagcagtctctgtgtgattcttatggtttgatcttggtacaggaccaaaatagtatttttaatcctgtcctctcccactttcaaggggccataggtagcttgacctaagaatttttatctgggatatggtaaagagaaactgctatgtcagagctttcacaagttcttactgttgctgaaggtgttgacccagggcagccacgttatagttaatcacattaatgatgcttttagttggaaaagtaacaaccagatgtagtccaggcaggcgatgtttagacaaaagggaaataaatttgttccacatgataaagagaaagggctcttttgttcaggttttcacctggctgccttgaagatttcatagatggtgtttgtgctggatggatagtagttgtatattaaagtatcgcttgagatataggtaaatacgtaagtcctaaaatattaaaatacagggcagtcactactgctaagggaagagctcattataccaaagttccaaacctatctctttaagtgttctccttctagaagaagagagagtctaacatgttgaatctaaaatgtcctatttaagtggcttc

SEQ ID NO: 61630 - DNA, 718 bp, Bovine  19866881175942
  misc_feature (1)..(1): n is a, c, g, or t
nttctggaaggtggctctagatataacttgctctaggtatactttttctttttctgtacttttggcagaatcatttcctttctgcatatacctacatatacctttaacaggaagcagaattaaaaattcatttatcttcttttgaggaagaaaatagtacactgggagattaaaaaattcaatatttttggagcttaaataaatataattttagagtagaataggaggcatccttttaaagtgggtttttccagacacgtccaggtgtacccaggtgtgtatactcgggagatgcactggaaagtgatctcaggggtccatttattctgaattcctcccttatgagttacatcactggcttattgcaactcaaaataggctctaagatcatgggtcagcaaaagagaagcaagaacaaccagaatctggcctgtttctagaaagaatcccataggaataaaagcctcaactcaaaagataagaattttttttgaagtagatgaacacatgattctgcagataataattaaatgattccttcttcacttcttcctcaggtattactttgcacatcaatacaagtttctgctaatttattgagaaacattttaggcacggccccgcagttttatacatccgggtcagaaacaccacctgaagggtccatgaaatcctgtacaatgagacccaccttttaggatgagaactggctttggga

SEQ ID NO: 61631 - DNA, 724 bp, Bovine  19866881350845
  misc_feature (1)..(1): n is a, c, g, or t
naacaacaaacaacgtgggtcggaaactgctgcagtacttcctgaaagcattctctgtccgtggttctttaaagactgcagaccaatccccttaatcatactttaaaatacagacaaatctcaatttttttaattgaaaaaagaaaaaaaaaaaaaaaaactgtgtggttgatgctagatggcagtgctgtgtaattaaaactcaaaaggattccattggaatctgtgactcaggccacctacttttctaaacaccatcctaaggtataattatgagtaaaatacattaggaactcacagttctttcttagaaagtcattaagaaggtatgacaaagcttttaccacttgaaggtcagtagttttcaaaaagaacttaaaatagcataaatctaagtgtatatgctatggatttttaaaatgaccatattaggcaatatcaataatttaccagggaatgcattttttagataaaacaaattctatttttctgttatgcctgacattatagatatatcatttaaggcatctttcaccaataatcttttaatgatgagaaaataatctagactacctgctgtctggatgccatattgcagcattaccaggaatcattcgttcattcgccccaagtatctatgaagaactactacatgcgctaaggatagcattaggtatgacaaaagagacaaatgcaacatctcaggtcctcatcctcaaggaga

SEQ ID NO: 61632 - DNA, 1224 bp, Bovine  19866881420924
  misc_feature (1)..(1): n is a, c, g, or t
ngaaatgcaccaggaaattccccagttgcagaggcctttcatctctcctcctgcctgttaaacacagtggtacccgtctctctgctacccctctctgctactcatgttcaagttcaatgattttctcttggcctacagaccagaggagaggcagagatggccttctttgagattcaaattgctttaaaattttgtgccatttccttcatgaaaggtaagtaatggagggaggtaatttcacaattctccatgaaaccattttttttaagtagagggaaactggtggtgagggcattgtgtttcacatgctttaacatgtgtagctgtttctgtgtgtttcccttaaaaatgaaaagaaaaaatcttctgatgataagaaaataactttttaagaaatagtagtaggatcatggtatcaacaacctctgccaaggatggaaggaggttcatattatgtctataccaatttcaaagtcaccaccaagtttctgggttattccctagtgaaagtttgtacatctttataatgccttcagaataatttatcacatagtaaagattttaaaaaatcattattcttttgatctaaaaatccttgtacttcaactttaatatgttcttttctgaagaagtttccacgtatactttactcctcggagaaatcaacagtagagcactcaagcaaggttttagaatcttccaatttcatttaaaagaaacttcttgggttttgttgttgttgttttgtctatccaccatgacacatacttttgggtctaaaatgtgaagccctctgaaacataagttggtgagttcattagaagggagattcagatattcaaactaatggttaaaagctagtttaatatttagaattacttcttccctatggcagatacattagcacagcatcagtaagctaagaagaacattgatttttgtttctgtctttaggctgctttaaactgtatttttttgtttttttcacaaccaagtatcaagggtggcagacatttcggtttagttcagcatccccaagaagcatctttgtgaaagcagtgggacgccaaccaaaaacggtagtattattctctcaatatcaaaggtattttattcaaaactaacactcatgcatacatgcacatgcacacacgtaaaatatatataagctgataaatccttctttgaggacaggaactataaacgtaatcaaatccattctcc

SEQ ID NO: 61633 - DNA, 2484 bp, Bovine  19866881479236
  misc_feature (1)..(1): n is a, c, g, or t
ncttgttgcagatcgctggctctagagcacaccagggcttcagtagttgcagcacaagggctcagtagttgtggttcaggggctctagagtgcaggctcagtagctgtggcacacgggcttagttgctccaggaatcgttgtggacagggatcaaacccatgtcccctgcattggtaggcagattcttactcactttgccaagaagtgatgtgaagtgaagttgctcagtcatgtccgactctttgcaaccccatggactgtagcctaccaggcttctcagaccatgggattttccaggcaagagtactggaatgggttgccatttccttctccaggggatcttcccgacccagggatcaaacctgggtctcccgcattgtaggcagacgctttaccctctaagccaccagggaagccaatcccgtggacaaagcatgatgagctacagtccacagggtcacaaaaagcgagacatgactgagtgactgatggtgcatgcacagatggcttcacaggtttgaaaggaaacatttcattttcaagaaaagttcttcagtagctctcattgttaaaattggattttatggttttatgtccatcattcaggggtctaccctaggtgtaaccccactggtattcactgcttcttcctcctccctctcatcttcatcggggcagcacttatcaaccatagtggcttttctgctgggtccagattgcagcaccagagcccattcaactcagtgatcccgtagagctactaccccacaggttggtgttagtaaaagacaggaataactattttgttgttgaattgcctgtctcttgaccgtgatgagtgagaaccttgagatctcaataggagaagggaattctgcacgtgcccacagctaaacaggggcagaagtagaaactgattttccagacctgtagcccagcatactggtggctcaaatgataaagaatctgcctgaagtgcagggggcctaggttcaatccctgggtcaggaaaatccactggagaagggaatgactacccactccagtattcctgcttggagatttctgtgaatggaggagcctggcgagctatagtccatggggttgtaaagagtcagatatgactgagagactaacactttcatacctttattagaaaaaaccatatataaagtatggtatgtatcatagaagtgaaataggatagtgaagaaggaaaccaattcccttttgttggttttgagccttcccaccatggctggaaaatctcaaggtattaacccttaactgagatgcaatagggaatgatgatttctgactctcttgtttgtacaaatatagagctttattcatgaaagtagtgggtggtgatgttccttgtacctgtctgacattgtggattgttgaagaaagaaaggtggacagtgttgtaggacataaatacccacagtggctgtgagggggaaggcagcaaaggcacctacaggatctatgggatctagtcctctctttgtgcaagtttgatatcagtgatggaaaacacctgcatttgaatctgcattgctgccacaacgtagaaacaccgactgagcacttttctctcaaaggagaaaatcatgctggtgaggggaggagtgtagaaaatatctaatatatcttgttcacaaaaagtgtcattttagtgtcagttcctatttcttttaaagccattaaaacccttacattgaagttggagtcaggaaagacagacatcatgatacaatttgttcctgacaccttggggtacatttgtagcattgcacccctgggaaatcactgtaggtgtgcagttcctgcgactgttaaatggaagtgtgaatctgattccccacgtacacccagcaaacttacgcagaagatacctttgttttcttaagcatttcaacttattgtaagtaaagcctgtgaattctttccttggtacatagcctggggagtatctctaccacacagctaatatcagatggaaggtgtgtggtgggggagacaagacccaaaaactttcttctcaaacatggataggacttctctatttctacataaaaattactctaaccctgggcagagtcacagacccaggagaggtatagctatttgcagatgtgggcttaacttttaaagttcagactgtcattttgagcctatttgggatgttatagatgacaatatctgtaaaaataacttttgaccttgccagtcaagatcagcagtgacaacaaagatgatggtgaaaattgccatttactgaatgtttacattattaaaatacctttcaaggaccctcacagagtatgtttatttagagcttatttgacagaaattgtgtagtgtactttacaggcatccttctttgtcctagcaatgaatgtttctgatttttttctttttggatgaggaaacaaaatcacaaaggtgagacatgtcgcccaagatgactagcatat

SEQ ID NO: 61634 - DNA, 1035 bp, Bovine  19866881861985
  misc_feature (1)..(1): n is a, c, g, or t
ntttctctttatctttctcttctctatctcaatattactctgaaccttcaaccaatatttacttcctccttgtagaagaaatatgacttcattctgtcaaaactaacaactatctgtgtgcctttgttttgacattctacatgtgtcatcatgattttactcttttaccttttatattgtctatttcccctttcttcaaaactccttctctcttgcttacaaatatacttagagctcccctctccaaatagaattttatatttttctcactgttctcctcattatcatctaatctctcttttaatcaccttttttattcttacttgccaaaatatgagtttaatattaaaaatttaaattagaattaaaacagaaaataatataaaactgctaatctcaagtgagatttagtaaataatactagttatcatacttactcaaaatactttaacagaaactaataaattataacacgaaagccctactgtgcaaaccttcccttactccctccttagaggctgtcactctcctaaggtcaatactgccattctcatgcattttaaaaattctgttttttaaaatacaaaatttttgtatttgttttgtacacacacatatttgtacacacacacatacaaaatgtaagacacaaaatacaagagtgtacacacaaaagtgtatatacaagagtgtattttgtgtctttaaaacttcacatagagtgcatggtgtatatattctttaatttgcttgtactattgctttatgtaatactggtttatcctactgaaggagtcatactgctttccctttgttactactagaaaagtgccacgcacagctccgtgaccatgtgggagggtatttggggaaagtatctagaagtgaaggtgctggttcaaagcgtttggacaattttattcatcattactaaagtgaattccaagatgactgttcaaatttacattcaaaccagactctgtatcactgcttgtttccataaatcctcaccaatacttcatgctatcagactta

SEQ ID NO: 61635 - DNA, 775 bp, Bovine  19866880381051
  misc_feature (1)..(1): n is a, c, g, or t
naccgtaacagaatgaagaagcctacagccggatggccaggactaaaaggacagcagggaacacggcggccagtatcacgagaataaacagcaccataaaaaactgctgcaggaagttctcggcgtgaaacggcagcctcacgtccagctcgtccatatccttggagaagcggttcattagcctgccagtgggcgtcctgtcaaagaagctcatggggctctccaggatctgcgggtgaccatggagagtcagcatcgaggtgcacgtttggtggccccgacccccctgccgccgacaccccgggaggcctgcccggtgcctgggatcacgaaccaggcctgagtttccctctggggtccgacatcctgggaaagggaggctgcggccaccgtggaggagtgtgacaggggagggattcagcctccatgaaggatggggggattttgtgccccagggcaataaaaagtcaaatcccactgtctctatgcgggcctccctcgtgcgctccagccagggacctccccggctgccggggaatgaggaggggatcccagggactcaagagatgctctctgggcctgcgctcaccagctccatggcagtgtcctcaggaagaaaacttcctgaccaccctcaccttcacccccagccccgtcgggcccatgacacgcctgcagctccccagagtttacctttgtggttgataattagatatgggagactcaacggtaagctcagtgaacaactgtgtctaccccagagcccagcacagtg

SEQ ID NO: 61636 - DNA, 1855 bp, Bovine  19866880393460
  misc_feature (1)..(1): n is a, c, g, or t
ntgaccccatagacggcagccaccaggctcccccgtccctgggattctccaggcaagaacactggagtgggttgccatgtccttctccaatgcatgaaagtgaaaagtgaaagtgaagtcgctcagtcgtatccgactcttagtgaccccatggactgcagcctaccaggctcctccatccatgggattttccaggcaaaagtactggagtggggtgccattgccttctccgatatatgcaataatatgcaatatttgcttttctctttctgacttacttcactctgtattacaggctctaggttcataaacctcagttcaactaactcacattcattcccctttatggctgggtaatatttcattgcatatgtgtaccacaacttctttatccattcatctgtcagcagacatctaggtttcttccatgtcctggctattgtaaatagtgctgcaatgaacattggggtacctgtatcattttgaattatcgtttttcagggtatttgcacagcaatgaggttgttggatcatacggtagttttactctgagttttttaaggaacctccatactgttctctatctgtgaggcagccccgcagttacagctaagcattcaggacctgggggctgctttgactgttttatagcataattgattaaggacttttatctttgtgagaagtcaaataagatttaagaggcaaaaatcaggcatatgctttctttttgtttagtccaatttccacttaaagtcaaaagaaaccaaagcaggtctgagcggatcagaaacagggggccttgggtaacacttatttgggagaccatgaggacaagaggtcaggggatcagtgtagtatggtggtcaggaacatgaactctggagtcagccttcctgtgttcaaaccccacactgacctttggcatttaacttcacttctctaggcttcaatttccatatttgtaaaataggacagtaatagtaatggtaacaatcttggaatgttctaggtcaggtagagatgaattgtgagaactagagcattgagggagcctctgtgactgttatgtgctaatgatgttgacccagatccttgcttcttgcagcctggcctttgttcatcatagtcctcaattgggggaatcagcttcccacctcattggccagtggaggtcttaccagtccccaacccataagatagaccattttaaccaggatccagtcaaaagtgtagaaatcacaccaggtcttccaaacagaatcaggtttattatggagaactggtgacaccggtaatgcaagagccaagaagccaaacaaaggacagtgaggtgagccagaaatcagcatcggcaagaagtcactatcgtctgaggactggaaggacatgagaaaatacagctctacagatcccagaggccaggcttccaggtaggtgctgaaaccataaggtgctgctaggatgtacctgggacactggagggagggacagtttggtggaagccatggatgcctgccaatgcaggagacgcgagttcaatccctaggtcaggaagatctcctggagaaggaaatggcaacccactctgatattcttgcctgggaaatcccatggacagaggagtctggaggactatagtccatgggatcacgaaagagccagacatgattttgagactggaaaacaacaaagcctcgaaagagacagagccactgctgtgtatgctataaaacagcatagtaaacagagggagacggggaaaaaactggattttctccccatctctttccatccagtgatcaagggagtctgggaaatgtagtttcttatgacaccaatttgggatacaaaa

SEQ ID NO: 61637 - DNA, 3001 bp, Bovine  19866880495793
  misc_feature (1)..(1): n is a, c, g, or t
nttttaggaagagggtacccagtacaatgtatattttggaaaccttactacatgagaaacagactggggctgtgcacagtaatctcagccagaaagatgacgtgggccaggctgcgggtagcagggtgccaaagggtgaagcagtcagagatattcaagagacagggttgcagtgattagtgacaaagtgatagcagagagtaggaggaagacatggcgagcaagacacctgggtttttatttgaaggttgatagatggggccaccatctgtggagatggaaatctcaaaagaaaacaagcctctgaggggaaatattgagttcaaactttaacaggccaagtttgaggaacctctgacacatccacatggaaatgtcaggaaggcagtggggtttgggggtttgagatttagaggctaggtttaggctcttccaactggagtcatgcacaaaggagggaattgaagatgtgggcacagaggaaatccaaagaagagattaaagaatgagaacagaaaagaaattggactaaacctgagttccctcaaacatttaacggccaagagaaactattaaaaaaaaaaaaaaaacagacagacataatggtcagagtgggaggaaaaaaccagcataggaagggagcatgttaaggatgacttcatgtggaggtcatggggtcctcacctgagctttgcagggagtgatgccagaagcaatagaattcgaatctgctgtcatttgtgatttccatggatatgaatgccagaagccccgtgttgcactccctgccaaatactaataaccttggtcttgacatttgaatccaagccaagctgtttgaaagaaagctggcttcatccaacctatttctcgcattctaatccagcagaagaagacagaagaatttgaatttgttgataatcttttatgttagggtcaagacaagaaacagagtaattatttgcagctgaaataaaatctcgctctcaacctaagacagcgaattcccaggtggatgcaatgtgcacccctgatgaagagtccgtttgctacaagatgaaatgtggcaaagctctgagagtgtcaccgcggcctatgacaagaccactttgtcccttcgagcatgttacaaagactcgggaaaggcttcattttgcacctgacatcaaagcgccattaaaggattctgaatacaatctcaaagccaggcaattctgagggtgacagaagtcatgaactcatcccatttctcttagagggacagaaaaaataagacgaacaaaggtctgtttaaagaacagaaaaagctcaggaatgaaagaggagggatgcaactgcccgtggaatcgcagctttaaatagcacacggtgttcctggcttcctaggaaggagctgccgccgagagagcatctgcgctcaaacaggccgtcatgtggatgcaaggcttgagccatgccttccaaaactatgtgtacagacaactgcgacctctcctggggtgggcagggggctctctgtcagtgtgctcccttcccagggtgttctgagttcccacagttctcagccagttcacacagtcatctggacagctagtgagttcatccccagtcacagaggaagtatggagctcccatggggctggtgggaggcagaggagcatgtttgtggctgctccatcttgaagaaagatgcaatggctgccgcttaagggtctactgtgggccagtgaccacacagaacacttcatataggctcatctctaatcttcacaattatcctgaaaattaggcacccggtacctccattttgggtttcctggtggctcagtggtaaagaatccacctgccaatgcaagagatgcagattcgatagctgcgtcaagaagatcccctggagaaggaactggcaaccaggtcctgtattcttgcctgggaaatctcatggaaagaggagactggcaggttacagtccatggtgtcacctagagtcagacatgactgagtgactgaacaacaaacctctattttacagatcaggaaactaagtccaggaaacattaagtgattgtccatgtctggctccaaagtccaccctccttggactacagcccagattcatatctggttgtgtgcaacatcaggaggcggcattagaaagtaaaccccatggaaggatgtccattaccgcctgctagtccagcatctattgttcctttgaggatattgcctcccacactgggttaagtcatgctggaatcgaaatctaagcacctgccctccacctggaagctgagagcttccagattcctagaatctcctcctctgttctgcaaagaccagggtttggctcctgacgaaggcttggccaaccagcgtctctctcctggagtattgtctcctgagccgaagagcaagagtggaatcaatcacagagttcattctctgacagcagaacccaggtcagatcactcagccttccttcccactccaaacccgggttccttagccattcttcatccagtgaggtctcaactgcttgcacccagtctctattgctcagagtccaagaaccctaactcaataaacttagaatgtaaaagagttctaatattttataaaacaacaaggagaattatggtaaaacatttctaagaatatattaagggagtgggggatgtatgggcccttggtgagagggtggacccagcaactgctgtgaccagtagaatctggcaaaagtgactctgggccagttctgggcattgccctcaactggcttggagttttccattcattgccttttggaacacttactcatgacacattccttcttgagatccagccaccatgctgtgaaaagccaattcacatgaagggaccccttgatgtaatccaggtaacagccccagtagagcgctcagttccgagtcatggggacactgtcctggatgtcctgctgagcttcaggtgagcgcagccctgcctcaatcggctgcaatca

SEQ ID NO: 61638 - DNA, 3806 bp, Bovine  19866880518038
  misc_feature (1)..(1): n is a, c, g, or t
ntactgttcttatattatgatgtctaaatttacaacttgcatggctctacctgattcacacaagaacacagagagacagatgcttcctatgtgataaaacttttcactatttaaagtttaaaaaatcagggccacataacttctactagatttccaccttcaattatttcctaccaacaagaaaatatctttattgctttttctgattatatgaattttatgaaaaatttaatccatatcctacaagggaatgatcctgttattctctcaatcccttaggcaacaactctttcactttggcatgtgttaaaaggagtgtaatttattgtttgatccctaagaaacactggaagtataaaatatggttacaaatttttaacagtacatagataaatatatacccatatcatacacacacacacacatgcatatatttacataaatgggttcatatactatataatctggtattccagttttttaaaattagtattgttcttttctacaaagtaaaaacagacctagaatgaactagatgttaatcagtgccagaggatgagtgcttaatccaattaagaggtctccttaccatatttaaaactaacatggattcacctgatgaaggtagctcccaattttttgttatttcaaaaccaattcagtaacaaccttttgtcagtgtagtattacttctgcaggataatttcccagacttgatagagtcaaagagaatatatattttctttcaaacataatgccaggttggtcaccctccagaaataatggaccaattacatgtacattaacagtgcagaggacatttttgtcactctcttgggtcacaatgatatttcattttaaacaactgtattcaaatattttgtggttgaccattttcctatatatttaatagctatttgtatgttctatacattttttcctttgatcaaatattttactcaatttgctcatcttcaatgttgttatgaaatgtgagaatgacagcacattaattcaaacatcatttcagcatgtggtatttcaatctaaacaattttctgctaggaaatttcacaagcacctttgatgtgctgcttgtttatgccacctacaactaaatttatttaaatgtgtcaatcacttccttaatggctttttggcactggtgttactctaagattggactttcccttccaacagttataaaatgttctaatttttcttttagtaattttatatttaatcattaaaaatatttaaatctttaacctgtctggaatttatttttgtacctgaagagaggcagaaatctaacctaaatttttttaaatgtaaaataaaaccaactgtctttacacaatctactgactatgatttgaactgatttcaagtatcaatctcaacatacacaaaattaacaccatcaccagagctctctgttcattttgtcatgatgcacacatgtatgtcagaattaggtctgtctctctccttctgcactgactatacctagagaatagcaccccctgagttggcactgtgcctggcatacaactggtgctcaaaaaatacttggtggatgaatgagaaagcaagttaacgtcctctggagccacatgtactgtgcatattaattctggaatagtagtggttttagacaaagccaactagacagaaaaagttctctataaagcattttattgtataggctgcactgaaactgcaatgcacagcacgagatggagatatccttcctttgtatttacctaggtagaaaggaaatctttaaatactacccaattacattaaaagcagcttccttaacttcctgagccacagaaggtctatgacaattaggtaatcagatgcagaatgcttgctgtattacaggatgcagataatactgttcctatgttatatacattcacaccatttaatgtgctgaaacatacagtagggacaaaccccacccagaaacccagaaatacttcattctcttgggttggccaaaacttttgttcaatttttctgtaagatgactctagtagcacttagttgtctaacttcattcaaaacaactgttggattgtattgtgacagctgtcatatcagtgtgcataaaaaaaaacaacttagcaaattggtcaatttttgtgtagccattttaatactgaggatggaaggggaaaaaaaagcaacattttcagccattatgctttattattgcaggaaaagtaaaaacacaaccgaaatgcaagaaaatgtttgtgcagtgtatagagaaggtgctatgattgattgaacgtgtcaaaagtggtttctgaagtttcatggtagagattttcactggatgatatgccacggttgggtagaccagttgaagttgatagcaatcaaactgagacatcaactgaaaacagtgttataccacacaagagacagccaacatactcaaaatatctaaatcaaacactgaaaatcattagcaccagcttggttatgttagtcattttgacatttgggttccatgtaagttaagcaaaagaaaaatcttcttgatcatatttccacatgtgattctttacttaaatgtaacaaaaatgttctgtttttaaaacaaattgtgacaggcaatgcaaagtggatataactgtacaataatgtggaaggaagagactgtggggcaagcaaaataaaaccatcaccaaccacaccaaaggccagccttcatccaaagaaggttacactgtgtatgtggtgggattggaagggagtcctctatatgagctccttcagaacaaaatgattaatttcaataaatactgatcccagtaagacaaactgaaagcagcactcgacaaaaagtgtccagaatcagtcaacagaaaatgcataatctctcataggataatggaagactgcatgcttttttgatgaccaggtaaaaattgctacaacttggctgtgaagttatgatttgctgtatttgtgacattgcaccttcagatttccatttatttttgtctttaaaaattctgttaatggaaataatttcaatttcctggaagactgtgaaaggtgcctggaaaagttctttgctcaaaaagattaaaagttttaggaagacagaattatgaagttgcctgaaaaatggcagaagatagtggaacaaaaccagtgaatatgttgttcaataaagttctcagtgaaagcgaaaaatgtcttttatttttacttaaaaacaaaaggaatgttttggccgacccagtaatggcagagaggaagaggttgagaagagatggaggagatgagggacacattgaggaatgagagccaaagcatctgggaaggtcctggcttagctaggagaggcaactcaatagaaggaagcggatgtggaaagaggtgcatctgtaggtttggtggtgggtttctaatggcttctattttatctgtgaattggaaaataagttcataagttaagatgtaggggaagaggctgggtctgaagtttgaggagagagaacgttcgggactgtccttatgcagaatgagacagtgagctgtctggagaggcactgtggtattttcagggttgagagcttggttaagcagggttgattggcctgagtccctggttttctccagtcacactcaatagccaggatgcagggaagagaagccagatagtagcaccatttggagttggagttttccagccagacaagaaggaaagacaaggggacaagtgagtttaagttaagtggacttccctggggctcagaggtaaagaatccacctgcaat

SEQ ID NO: 61639 - DNA, 1357 bp, Bovine  19866880540898
  misc_feature (1)..(1): n is a, c, g, or t
ngggagttatgtgaaggtctgtggaagggacaggcagagtctccagatttccctgctattgctaggatgcagacagtaacactccccagaaactgaatagagagcctccagatacagggacactgggcacagaggagggaaggtgtgccaggccagacctgggggattgggtgcaggattgcacctcgaacagggagatcactagccccttggccaggtgaaatcatgccattaatggtgccctaacttactcagcagtgagtcaaaatttttgaggttgtaatgttgaaaacattcaaatgttatgatataatcattttagaagtttgtgttaaagagaggcagggtgtgagagagacatctatttacttgaataggaaattgtattcaatatggaaatatttggaaagggtggtaaataaaaggcatgtagctaaaatggttaaaagtggttgcctctaggaatggagttaaaggaggatgtgttatatatgtgggggctgctgttttttccttttaagcttttaagtgctaattgactttttaatgatgtgagtgtatttctttgatgaattaaaattaaagagaaaaagggaaagcttgctcaggcacttacttgtctactacttaatttgtgtatattatgagttggatttccataaatggattttgttcaagctggccactcatggagattgcatgtcctaaacaagaattaataatcttgggaaataattgatctttagccaaagagagagcactgattcctaagaaaagagtctgggtttcagcttaaagagttaggatctctactgtgggcttcattctggtcaaaattctaagagaaaccctgtattacactctctgtgattcaatcaccatactgttggtcagagtctaactaaccatcattccaactaggaaaatgctcgtgcttgctctctgttgccatagaaacggtgcagctcaagtctctctgttgctttggtaacccacccccatttcctcacatcactaccgctggggtattttgctgccaagataatggtctctattgtggaaggaatgttaatgggacggcaacctaccccagcctaacccagtcccctcctcagcttcacatttgaagaccttgtctaagaacatctcaatgagatgatgataggcattcaaatcagatggagagagactgtggtggtttcagtggtaggggttcctcgttatagagaaataaggggtcagctccaaatcttgaaaagggaggaagggagagagcctctgtttgagggttcagctgtgtgtcaggccctgaagcaagtcttctcgatcaataacaaacgatcataaatgaagcttg

SEQ ID NO: 61640 - DNA, 1751 bp, Bovine  19866880594545
  misc_feature (1)..(1): n is a, c, g, or t
nggtggctatgagacttcccccttttcccctcacagcaataggctgaatactccttaaatgataaagcctttccatagatgaggaaactgctattcacacaaagctaatcaagaccagctgtacagtcttgctgctgctgctgctgctaaatcgcttcagtcgtgtccgagtctgtgcgaccccatagacagcagcctaccaggctcccccgaccctgggattctccaggcaagaacactggagtgggttgccatttccttctccagtgtgaaagtgcatgaaagtgaaaaatgaaagtgaagtcgctcattcatgctagaaacttcctaaattctaggtcttgactccagacccacagtagttgattaataaaatttcctctgcgttctgaagcagtaattatcaatttacctcatgccaagacacctgattttcttcctccaagggcccaaatccctgccatgattgtgttaattatgatctgagacacagttcaccatcaaagatatcagaaatatattgctgctcaagggagcagctaagactcaagatctgagtccagaagcagaacccatagagatcggaaagtagaatgtggaagtgggtgaatgaaaggattaggcaagattagaagcttgagacatcagaatctgaattgtcaaatccaggtaagagaagagaaactgcagaaatagttgggaaatactatattccagaattcacatggtgaaacaagctagatggacagaaagaagtcagtcccgaagggagaggagtctttctgaagatcttaaatgcctggttgatttcttttttctagagtaaagaagtattaatatctcttatgtcccaggcaccactataaactctttacatacaaaacttcatttaatctgcacaaaatgatctactattttctgcattttgcagatgaagaaactgaggcttaagaaaataaaatgacttgctcagggtcacatagctattgggagagaggaaagttactgggaaagggagaaagaggagacagacagagaagctgagcaggactcaaatttgacagcttcactagtgagccaacatcttaaccaacagttggtactgtgcccagataaagctttgccttcaattccttttaagatttcctgacaacatatgtatgttataaaaagtaaaagcaagtttatattcatttgactttgacagttgagcattttttttacatcctttttggtgacttgagagagcttagaattgagaaccactgctttgggcttaaaaagaccccacagatggggcagtcaggatgctcacccttgagttccccttggagaattcagtgtctctattataactccacatggtccctccagcctgctgtctatgactgtcatgccttagagtattaaaaaagggagagtgtgggcaaattagaggacatacaaggacaaatctaagcattgtaattctgataaaaaaaaaaatcaagacaccataaaattctatttctgaagatttatactccacttaaagccacgaggacttaaggtggctagaaaaatttactcggaaagcaaatagaattattggattgtgaaattgagagccataaaatttaaaacaattttatatgaaactccattttttttggtattccaaagtgaaagagttagacggtaccaagtaaatttgaatctcaaaaggcttaaggatacaggaaggaggagaggaatggaaagggttccctttg

SEQ ID NO: 61641 - DNA, 1342 bp, Bovine  19866880631268
  misc_feature (1)..(1): n is a, c, g, or t
ntcctgagatattcattggaaggactgatgctgtggctgaagccccaatattttggccacctgatgcaaagaactgactcattggaaaagaccctgatgctggcaaagattgaaggcaggaggagaaggggatgacagagggtgagatggttggatggcatcaccgactcaatggacgtgagtttgagcaagcttgggaagttggtgatggacagggaagcctggcgtgctgcactccatggggttgcaaagagttagacatgactgagtgaatgaactgaactgaatagagagtgaatgaatgagatgaacaaataatcaagagttacatccaaagtccctacccagactgtggtctctccttgagattttggcataaaatgaagtccaactacatctaatatggcttcatttgactaggcttttcctacataaaagagccttgatagcaagtttacaatatggtttgcgaataggttgattaaataaaatttgtactttagcaataatggagacaaacaaatttctttacactttttccatgaggaaatttttcagatttgaaatgaaaagcaccaaagggggaaatggagccatgctttgacacaaccttaattaaattactcccagctttttagaaaagtcaaatctatatttttgcccacggactgttcttcaagaggatagtaacgcatcactccactaattttagccttgcaaccagcagcatgcagtaatttaattagctgatgtgtcatatcagcagtttagagactgtgattctgctgtctgaaccaaccaaacaaaccaaaaacaaaaaaacaggacatttgattggaaagtggcagctgtctctacaggtcctgggcagtgaatgacatgtggagttttgctaatgacttcagatctaccccaaaaagttgacccctgaattccctaaagtccatctgttctgtaagtgctatgcctttgggaaattctagctccgaggctggagagaaaattgagaaaataatggaaagaaaggaaggaatgttataggcgagaagatcctgcctacctcccacgtttgcatatatttttcctccatctagaagcctcagcattccctcactttcttacttccctttgcctctgctcaaatggtcacccagcagttcatcctagctattttcacaccctttctcctaacctgacctcctttactcctcactccttatcagttcagttcagttcagtcgctcagtcatgtccaactctttgcaaccccatggactgcagctcaccaggcctccctgtctatcaccaactcccaaagtttactcaaactcatgtccattga

SEQ ID NO: 61642 - DNA, 3632 bp, Bovine  19866880632436
  misc_feature (1)..(1): n is a, c, g, or t
nctgacctgcctcctgagaaatctgtatgcacatcaagtaagcaacagttagaactggacatggaacaatagactggttccaaatcaggaaaggagtacgtcaaggctatgtattgtcacccagcttatttaacttatatgcagagtacatcatgagaaacgctgggctgaaagaagcacaagctggaatcaagattgctgggagaaatatcactaaccttagatatgcagatgacaccacccttatggcagaaagcgaagaaaaactaaagaacctcttgatgaaagtgaaaaagaaaagtgaaaaagttggcttaaaactcaacattcaaaaaactaagatcatggcatctagtcccatcacttcgtggcaaatagatggggcaacaatgaaacagtgaaagactttatttgggggggctcccaaatcactgtagattttgactgcagccatgaaattaaaagatgcttgctccttggaagaaaagttatgaccaaactagacagcatattacaaagcagagtttttactttgccaacagaagtttgtctagtcaaagctatggtttttccagtagtcatgtatggatgtgagagttggactataaagaaagctgctgctgctgctaagtcgtgtcagtcatgtccgactctgtgaccccatagatggcagcccatcaggctccgccgtccctgggattctccaggcaagaatgctgaagtgggttgccatttccttctccaatgcatgaaagtgaaaagtgaaagtgaagtcgctcagtcatgtccgattcttcacgaccccatggactgtagcctaccaggctcctccgtccatggattttccaggcaagagtactggagtgggttgccattgagcaccggagaattgatgcttttgaactgtggtgttggagaagactcttgagagtcccttggagtaccaggagatccaaccagtccatcctaaaggaaatcaggcctgaatattcattggaaggactgatgttgaagtggaaactccaatactttggccatctgatgcagagaactgactcatttgggaagaccctgatgctgggaaagtttgaaggtgggaggagaaggggacgacaaaggatgaaatggttggatggcatcacagactcaatggacatgagtttgagtaagctccatgagttggtgatggacagggaagcctggtgtgctatagtccatggggtcgccaagagtcagacacaactcagtgactgaactgaactgaaggattttctgtatctgtgattatatcacctgtggataaaatcctgtagtctaagtcacttacctttgtacttttaacttacgtaattaaaaaaaaaatcttttctttctcttagctcatctttgagtttctggatttcactttattgctataaactggcgttgttttatcaattccaagatgttttaatacttaaaataggcccctgagagttcatgtgtcaaaattttcttaggtgtgtcaattaggtaggacattgaattacagtttttttgttttcctcactgtaccttccacctgatcactatctccatacattaattatcctttataaaaattgaagtatagtttgtgtacaatattatatgcaacacagtgattcataatttttaaaggctctgtttcatttaaagttataaaacattggctatattccttcccattcacgtattttaaaacatttcccaaatagttactattctgtagtaaaattaatgcttacttgaaaacatttcatgtaaacagcccatagaaaatgtagatcgtgataacacgaatagcttaggatagtggttctcagatttaaagtgcattcaagcacctagagggcttgttaacaccccattcccagaaagcagtgagaattggcaagcttccaggtaatgctgttgctctgggaaccacactttaataatcactgctttaaagaaatgatgacagatcattaattttaaatgattaatggatgcttggggctggtgcactgggacgacccagagggatggtatggggagggaggaggaaggagggttcagaatggggaacacatgtatacctgtggtggattcattttgatatttggcaaaactaatacaatcatgtaaagtttaaaaataaaataaaattttaaaaaatcattaaaaaaatgattaatggaatatgcagttgctttgagaaaaagacaaaaaattgcaataagtaaactagatattagatctaaaatatttaaaggttgatatttataagatgacagtttcatatttttaatgaaatttgggtcttcccatttttcagcactattagatatctgagaggccaaagaagtatacattttattacaaagagaagaatatagcaaaaaatcagaggtatgatgatcctttgatctgtgagcataaaataatgccatttcattgggccttaatcaaagagcattcgaatgggtatattaaaccatactctgtggctagtgtgtgatatacaaaatcttttctagggctcagaattgacatgacaaaagctctattcattgatctgaatgatgatgcccagcccgatattaccatgcaaatatcatcatactacactttcttctaaacataatcatttttttcccttgagttactgaatataagtgatactggaattaagactactcccatcaatagtatgaccatttgtgtagatcatggtgaacttagaaatatttttccttggagatcactaactataaggaagaaaaattaacatagtgaaatgtcagactgaagtctattagacattattcttgggaagttgttataagtgttaataaaaatacttgcttgtgaatattcatcatataacagttattcttttatagacaaatacatcagagttataaagtattcccttttctcttctagctctgttggcttagcaaaagcagctctagaagcaattaatggattcaacctctttggcaaccaggtaaaaaaacagcagtagcaacaacaaacttcattttttgatttgcatgtttaattaacttggccatttattaaccaattcattcatcatgatcagagaatgtctgaaatttatgtagcagcccagggttgaacaaactttcctttgaatataatttgcttcttaaattttagttttctaacaaaaaagattgcttaatttaacaataaaactcttgatgaagaattttcattttccaagttcagtagcttctctctctagtcttttgttcaactttcagcatttttatatattccttgcattaggtactaaatattttacttgtcaattcccttgttggtttcaatttaatgtatatagatgtatatttcatgcagaggggaaatttggttcagatgtgcagccaaggaattggaaattgggatactagcttaaccctcaactgactgtattcatttgtctaaatctcattttctctgagataaaagggaaaccctgaggattgccttaaatttttaactgatttatgcacctaatcaagtgatcatggattgagttgtcaatggaaagaataatatgcagtaatactggttattactctggatcaagaagtagactg

SEQ ID NO: 61643 - DNA, 1106 bp, Bovine  19866880654190
  misc_feature (1)..(1): n is a, c, g, or t
ncttcctgtgtgctaatttctcaaccctgtttcattatcacctttatcaaaagtctttttagacatttttccttatttgccttccactcatccatgaaatattagtgccacacatacactgtatgtctgtttacatactacatacatctctgcttatgcctaaagagagagagagatttttttttttacccctgtcctcccaggggccaatttttacccccctgggggtgacttcaccccattgagaatgcaggctctagagagatagtactgattagcgtggcctctgcttctggtctgtacaggaaaaaacagcacatcctcagggggttattgaagaactaaaggtcatactgcaagtaacgagctcagcacatgcttggggtcagttaagcactcataactgctatcacattattactagtgttaatcataagagatttggggaatgtttactggggaattattatatgatgggattagagcttgccataaaactcagtgacttattgctcatagaaaccctgcgaattagggactgttattatcatcttacagattagaaaactgaggcacagacccattgtctgaggtcccagagcccatacttgacaaagccagcatttcattccatggagtccagactcctcaccttactgttaaccctgatgctgtgtgcattagtcgtgtgagtacaatgttagtggaaacattaggattaattaacacttaaactttttcaatgccgcaagcggcctcactggtactttgacttcaagtggttctggcccctgtggtcatctcaggactctgaaatgaactttcccgattctttccttgcaggcagagctgcctgaattcctgataaggatcagtaatttgagttcccacttcccggcctggggaatctactcaggcatccccatgaccattttcccctctttggaatcaagatggcaccgagtgtgggctgctgctgaggagatgcatgttgccatggcagcagctcatgcctccttcctaccctctcagaggtgctctgacacaggcagcagtttctatggtaacaagctgagtgggagggtccatgaagaaagaactgtgtg

SEQ ID NO: 61644 - DNA, 795 bp, Bovine  19866880670237
  misc_feature (1)..(1): n is a, c, g, or t
nctttgaactttgtgaaaatttagaagtaatttttgattgctctgcacctatctatgtcactacttgtcccccttcccagtccagtcctgtcaattctatgtcctaaatattcctgaaatgttttcacttgctccttcttcattccaaccacttctgatctttcaactgcagccctccatgaatatccttgtgcccactctcccttctgcaaaccatgtctatatagtagccattataatgtatgttaatatagataaaatgcttgggcagaatctgacctacagtaggcactatatatgtatttattactgttgttctaaaaatgtaaattacattgagtcttttcattgtttgaaactcttttagtggcttctcattccacttagatgaaagccaaatcccttgttgccttagaagccccttttgggccttaactccacccttattcctttttcttttgcttgcctgttatgctccaaatacactagtttcctcttagttcctcaaacacttcaagtcttttcttctcagggcctttgctgttcattctgcctgagtgtttgttactagatcttgttcctttttgctgttgaagccagtctcagatttaatgacatcctccaggagaattattttctgaccatcaatctaaagtaggcctatctccagttactctattgtatcaccctttacatttatccgttttattcttacagctcagatacctttttctataaagttctcctccactctctgagactaaaggagctactccctcccttgccttcaaagca

SEQ ID NO: 61645 - DNA, 1269 bp, Bovine  19866880686677
  misc_feature (1)..(1): n is a, c, g, or t
ntttgggcatagtcttgccgagctctctgaacaaggagcaagcttggcttctgctatgaacacccccgtcttagtctgctcaggctgttcaaacagaacaccacaaacgggatggcctcaacatcagaagctgatttctccccatttggcagtttggaaagctcaaggttgtgctttgtcctcatgacctcatgcaaacttgatgacctcccgaaggtcccacctccaaatgccatcatattagtggttggggcttcaacatgaaactctgaggaaggacaccaacattcagaccttcataagccctgcctgtcacgaggcggcctttcaaaaccatttttctatctgaacattctccacttcccctgaaatgaaggacactgtgggtgacaaaatctccaaagatctggcagccaaacaaatgtgccttaatttctatcactttaggaccccagagccacagaggagagaggtccaaggagccaaagtacccatgagatcatgtggaaaagcagagaaagtcaagatctgcgagggtgaagtaaatgtccattgacagaaatgcttggctcttcctccaggctcagaagtctgagaggaaggagacaaacctggccccacacctctcagcctctgctctccctcagcaaccaaaacccagcgagagatggttcatctccccaaatctcagttccctgaagcacatgcttcaaaatgctcaaagagcaaccgagaaaagcctctgggctcatatgtgtctgagctggggcctcaaggagagctcagaaagcagtagagaagccgggctctggtttctaatgacagtgggaaaatgccaggagaagggtgggcagaaggggaagacgaaagactggaagcatttctgatgaaagagcccgaatgaagtgagtgtgaggagaggtgggtgagagacacagaaagcgaaaggaatgaggcagaatgagtgcaggtcaggggagaataggtatccaacggagcagggtgacccatcaagtcacacggaggccagcttggcacagtgccacctgccagccactcccaccttagggagaggagagatgttaggttagggttagggttagggttctgccttttaaagctgaagactcagagtgggcagaagcagtgggtgcaggatttggctgatgaatggctggtccccatttctatgtcgatcctggagagcaagggttaaggacactcaccctgtcttctgctcacagcaccgattttcatatggggaccttc

SEQ ID NO: 61646 - DNA, 1096 bp, Bovine  19866880691261
  misc_feature (1)..(1): n is a, c, g, or t
ngaagaagaagcagatagactatggaaaatactgcacaagagccctttggatttcctttttttttttttccttatcaaatgttattatgaattagcagcactcactcctgagccactgggactatgtctttacagcctccgtcgtagcaaaccttaaggctggaaagaaaagccttttatttgagaaacactgtgggggtttattactgagtcaatggagaaagcaaaaggagtctgtgagaggaaatagtacaaagactagaatatcttcagcaaaataattgcaaggcaacatttcagggtagtttaatttcctactgcattttaatgaccaatatagaagatataaaaatgtcgtttacagacaaactccaacattttgtttctctggttgttctaatagatcaaatgggacgtacaatatgattttttttttaattttttcaccaaacactgtaatcaatctttcaagctacagatctgtgtagttacctcttgtcacacactcaaaatagatatgcctaggaagtgggaagaaaagtcttctttttccttctgataaccaggcaggaaacctttacaaagtacatccttaggcattctcccattctgttcgtaaccttttttggaagttacaatgttttcattcccaggctctgaggtgtactgatgagaacacaggagggatgatgagggatttaggaactgagggtcagttttctaatccatgagcttcttctgcctctgctcatcactgagagccagacccaagccctccaggaggcatgtgctgggcaaagcagggaagcaaccttcaccctggctcttcctgtgttccaggctctgggacagggcagggcagggcggagtagggggtggggatggtggaccagatctaacccctgagatgacggtccctgaccccataggcgcatctgacttgtctcacacagcctcctcttcgtctaaaatcagctgacggcatccttttggaagtcttatattcggactttgttttctgcggctagtaacatcgaaaaggcagaacctggcttctcagcaaggacttcaggcttatcaaactcgactaccttgg

SEQ ID NO: 61647 - DNA, 1697 bp, Bovine  19866880747394
  misc_feature (1)..(1): n is a, c, g, or t
nagctgcccagatgagcaggaagggcatgggcctcatggcaggcagctgtttgtgctggagctatatttttcagacctatactttcctctcgttttgtcagaagcaacgtgttattttggtaactctttcattttccgcactgcaggctctccatgcaattattgaatgcaattaggtattccatgctgcataattactcagctatctgtgcctctgaaagatatgaaaataaatgatcatgaaagtccatagtgaaaatcctccatccaaagaataagcctggattttctacctactttacaatgtgtctgaattagacaaaataaaatttaaacactctgggtttttcttccatctgctgtacacgtgcatgaatgaaatgtaacattagcatggcagaacaaaactggcttggttaacttttctctgtcatctaaatctatggcttcttattctggtttgtgcaggtatccacataaaacctctctgtggcatggaaaaaaaaggagtaatggatcaaggtctaaaaataattcataaatccagtttaaactagtgcacaggtagctggaaggtccatgccaagttcattcctttgtacaaaggcaaagagaatagccaggcatattaaaatagagtaagggctttggtttttatatacatcaatgttggctgagattcttttgcttgcaagtgacagaaaccccgttgcagacagtttaagcaaagaaggggatttagcaacaagatactggggcatctcagagaataaaaatgagctgcaggagtatctgaaactcagaaactggacctggggacttgactctaagactttgtctccctctatgcatctctttgtttattctatcttggcttcattcttttctatgccagaaaacgtttctttatttagcagcattcaacactactagaaactctgggatcacatctctgaagcttctatccagggcaaaggaatcttccttgtaagttctgttaaggaaaaaaccaaaaacaaaacagccaaagcgtctactcaacctgtattggaccagatccccggagaaattcctggcttgaggggtaggttaaggtactaagaggtaagttactaaaaggggtaaattaaggtattaacctaagggggaggttaaggtcctatacccacacctgtgcaggaaatgaaggtttataacagaagaagatgggagttataacagaagaagacagaaagttttataatgaaggtttataacagaagaagacagaagacaggagaaggcagaaagcaggtcagttgacaataacacgaaagtacccacatgtgactgcaaacttggagactgtcctcagggctcaagagaataacctgatatatatatagacatggatcattttgtatagaatcttagaattcagttttctgttcttggaacttgtattttatttatttatttattttttgtgaccaggaccctagtgaggccacatagaaatgcataaagattttaggaagaattattttcaggacaaatccaatatcaaaactctagatactggggcagggaactgtgatggtaaaggcaagtaaagtctcagggagccagttgtaggagttgtcttgtcgggttcaagttaagcaaggcagtcagaataaaaagaatgttggctgctttctcccactcagaagtttcag

SEQ ID NO: 61648 - DNA, 1018 bp, Bovine  19866880928873
  misc_feature (1)..(1): n is a, c, g, or t
ngagggcaggaggagaaggggatgacagaggatgagatggttggatggcatcattgactcaagggacatgggtttgggtggactccaggagttggtgatggacagggaggcctggcgtgctgcagttcatggggtcgcaaagagttggacatgactgagtgactgaactgaacttaactgacacccaattcctgcatcaataaagtgaggttaatgctacttctctctgaagattattttgatgattaaatgaggcagaaccatttgaaaagtaaatcagctgatggaatgctctcactcaagacctgccaaaaggttgttatgaaatttggaatagagtccaaagtctttaacgtggcgacacgatccacctccgtctccctatgtcttgatctttattgtctcacttcttgtgctccgcacacactggcctctctacctctccagcagctcaaacactttcccacctcaggatttctgtgctggctgcttcttctgactggaacactcttctttccaatagtcgcaagccttgtgttcatctcattcaggtctctgtccagggccatgtcctcagagagtcctttcctgacccacaactaaaaacttaccaccactcctatttctttaacctgctttatttctcttcatacctgtaattcctatctgacaatatgtgattttatttgcttactgtctgtccccattcacaggattggaagctctgaggcatcaggactttcgctctttcattgtggactccgcagttcctagaacagtgcccaggactcaagtatttgctgagtgaataaatgatggaagttgtctcagccagtgcttggcgtgtagtaggaactcaataaatatcaattctctttctccgcccttctcagcaagaagcttatactttacagctgaagataagacagtaggagatgggattttttctggatttagttaagccatttagatctttttatatcccaataactacacagcacagagactaacagaaagt

SEQ ID NO: 61649 - DNA, 985 bp, Bovine  19866880964954
  misc_feature (1)..(1): n is a, c, g, or t
ntgatcttgacatgtatccgacctgtgtgagcctctatttccttgcctgtgaaatcatttaaaattgcctacctcctaggataggaatagaaagaaattgtctgcccaagggctctgagctctaaaacacaactaacaggagtgagctaaccctgctatcctggttatcattattccagattctgtgtctttagagcctcacacaataaattagagttttctatgttaataacatgggaactaccaatatggtttctcactctttggggataaaatcatgtgcatttcaggtgattgggggtgggatgctcctctgatcacatggtggtggctcaaccctgattcaagggcaggctgggatggttcacacactcaacagctagaggccagtgggtcagcaggggatgggcagagatggataatcattgatttatttttctctgtttgaaaacgagatgtgtgtccctgaggctcctttacacatagaaggcgcaagctgtcctcgtgggtggccacaacatggggaaatcacgttccaggattaccagatgaaatacagagacaacacgcccattgtcctcaacggcctcagcctgacgattcacagccaggaagtggtgggcattgtgggaaggacaggctctggtgagctcagggtccagggcatgccctgtcttcaacattggatttgggtgtcagacttgtcttcagacatgtggtgactcagtgaccctacaaatagttactggggactcattttgtgctagaagaacaaaacccatagtcactgctgtcatgggatcccagtggaggcgacagatgttgacaggtcatcaaataaggaatgaggaagataattgccttggtggtgaaggccctggggaaggagaggggtgatgttaacagagccacggagttgttgggcccttgaactacagtagtctgcactctgaggccaatgtttgcgaggaagggtaacagggtg

SEQ ID NO: 61650 - DNA, 1877 bp, Bovine  19866881048265
  misc_feature (1)..(1): n is a, c, g, or t
nttgcaaagaaggtccccacaaggcactagttgttacatcgcttaggtcacggttaatctaaaacaatacccctcaccccattattcttttcatgatgttaacttgcttggggagacttaaaagattggtctttaaatctgaaatttgatgttgcttctattatactaagctgcctcaaatgtaaattttaaatgttaaagaaatacaataataaatagaaaacaactctgcctaaccttaaaattaaaagtagaattttttattttaaagagttcacagaacagtttacagtaagtgaaatgttgtaagaattaatttcataagcgactttaaaatcaaaataaaatccaaagtagtaactgtatccttgtgacttttatgtctgtattagcattttgactaaatgtagttcataatagtgaagatgaacaaataaataaattttggtggtttggtgttttaatccctaagtcatgtccaactcttgcaatcccatgaacctgtagcccatcaggctcctctgtccttgggattctccaggtgagaatactgtagtgggttgccatttccttctccagaggatcttcccgacccagggatcaaacccttctctcctgcatcacaggcagattctctaccaactgagctatgaggaagtcctaataaattctagtgtttggcaataatataagtttagtccaatttttcttttcagctgattagagaagtgcaaattgtacatcttaactctgtcacaagttctgttgcacgtatcagaaaactcacaaacatgtattttgttgtttgtaaataccttgtcatctttactgttcttaccaaagagcaagtattaaatattggtcatgtactgtcagtggtaatagtatgtattttacattattatgtcctattcttgagtatttcttcatggctatataatctatctcagcatccaactggcctgctagttaaatgcctaacttccagaaatggcaacaatgaagaatagtgaagaggataggaaaaagaggcgagagttgccttatcagaaggattggagcagtcacagagcagggacacactgctttgtctcctgtggcctggctaagtgggcagggcgatatgcttggttgatattacttactattcaacctggaaactgttacatttttcctaccattttcttccactgagagacattaaagtcactccataaggatgccagcagtattgttttgcaagccagccttggcagaaagacaaagactttaatttttggttatttccgtctaactttttcatctctatacctgtgataagccttgtaggcagtctttcaaaggagtgcatcaagagaaagatactgaaatattcgggtgcagtagcttccctgtgttaagtcttcattgctgtaactagtgtttctgcctgtgcactggctgtacagcccctcttttgagacaaaacctgagtaaatagagacacattctttccagatgctaagctttcctgtccctgtctgttattcagttttcgccagaggatttaaggataaagtataggattctgctgtgtaaaactaattccctagcttttcctaatggtgtgtagagttttgattccctaaggcacagtgttatttccagagttttcttcaatttgcataactggtttatctgacttctttcctcagaataacagaaatgaaatgagataacactataaaaatactaaaagcttctcaaattaaagagtaaaattatttacacataaaatgatgaaatattttgggcatatccaggcatataactaccaggcacacaaacagtgctcaataaatactttcctaaataatcatataaaagctggttctgta

SEQ ID NO: 61651 - DNA, 1658 bp, Bovine  19866881075496
  misc_feature (1)..(1): n is a, c, g, or t
ntctgattataaattataaaattattctttttttatcattagctattgttgctaacctcttattatgcttaatttatacattagactttatcatagctatgtatagagaaaaacatagtacatagagcatttggtactacccatggtttcaggtatcacaggcgagtgggtcatagaatgcatactcatggataaggggaggggggctattatttattaaaaacacaagctcaagtctggaggtcaggcttttttttcaaggctaaacaactgatatgttagtttctctttaaaaaatattgagtaagaaaatatattacagttaaataatggttttggggaagttttaaagttatcattaactgtatgttatcttacattattctagtttaacctcaaaaaattttcaatctaaagatcatgattttcaaatgactcttatgtgataaatattcttaaggttatttatgcaaaaaaactcaaaaaagtacatggctttctacagactcatatgaacattttctaaactttcaaatgtaaacaaaaattaaaggtataactaatgattattttattctaagacaagtcaaatgttatatctgaaataccattttatttggtttaaaacaacatgtttgtggttcatttacctatttcatggcaaacattgattttctaaaagtctaaaaataaaaaaaattactgtaataattaactattttctaagaacacagtgggtagttcaggtcttgggccaggaaatagcataatgagtctttctgctctaacagtgaaataaaagtcacgtagctttgttgtatattattcattaaggtatgtgtgtgttagttgcttagtcgtgtccaactctctgcaaccccatggactgtagcccaccaggcccctccatccatgggattctccaagcaagaacactggagtgggttgccatttccctctccaaaaggaactaaagaaagaaagaaagtgaagtcactcagtcgtgtctgactctttgcgaacacatggactgtagcctaccagactcctccattcatggaattttccaggcaagagtactagagtgggttgccatttccttctccatcattaaggtatacatagagcaaaatattaaatttcatctgaattagtgaaggccatatattatagaatatttttaaaggttttaaaggtttatgttctattatttccataattccaattaattgcccacaaaatattgttaagcagatatccaactgagggtcctttaatgaataaataagactttgttcgtaaatgtggtggctgggatcttaacatccatagaaactggatggttcttagcgagggcacggggaggggcaagaatacaacagtcaagagcaactaaatgattcaatcttctgagatcttattcattttaaccactgagttgttaaccagatgacacagagctaggtcagagtgctaattaatatgcagcatctctttttttttagcaggagataagaatgtggtttcgtagtttgcaacaccacttttgcaggttctctactgcctttttagaagtacagcaggaaaaagagaaattgactatttctttaaagattttctttttcaaaatggtcatgaaacagagataaaggcatgac

SEQ ID NO: 61652 - DNA, 884 bp, Bovine  19866881143664
  misc_feature (1)..(1): n is a, c, g, or t
ncgtccattgaatttgctttcctggagtctgggcacaggacaacttttcatattcagggcctgtgtgtcccagaccagcacaggctgttttgcatcagtacttatacgtgatttctagaagtcctctgggcactctgctgggctgtgcaggggaggcacccaattagggctgaggttccagcatcctcccaggctgtgtatcagggttggggtgtgaagctgcggctgtcacctcacagggccagcagtgacccattggcccctgcctggcctggccagcacaatttgcggatgaccctctaagagctgggagactgacgggtcttttttctgtttttctgataggggaagatcttgggcatctgcgggaatgtcgggagtgggaagagctcccttatcgcagctctgctaggacaggtgagctgcgtgcgcagcgcggtgacggtgcagtggttccctgcccgccttgtccagggtcctggcctcagccgcacgggatgctgtcctcagagtgaacagtgagtcccaggcagtccatgcgtttggcagctccaggcctgaggggccggaccttccacactctctctgctttgcccactgagttaagcagtgagagctttcttgcctggagctccatcttggtcaaagggagagacgggtcattaaacccacggttttctcatgacatgcttggcctgcgctgattagaaaggccagccaggtggcttggcagggaagcacctgagaacctgcaaatcacgggaactttagatccacctccatttcccccgcgtctgcccagaggaggtgctggtccttggaggaggggctgaatgaatgcacaaaccaaagcacacctcgggtaggaatggggggctcttgtc

SEQ ID NO: 61653 - DNA, 1664 bp, Bovine  19866881191936
  misc_feature (1)..(1): n is a, c, g, or t
nctgtgtggtgcagagaccatcgaggagggacgtagagagccccgtccttccacctcctccacctgggctcgcgggcacctcagaccatctctggggaggagggggttttctgcactcgggtccacacgtcccactggaacctgcctgaagccccgatgggagcaaggacatcctgaacacactgagtgctccatcacatgtaggaagggctaggcgggcgggcagcgaggttttgacttttcaagatgggatcatcagcaaagaaatcaccccaaaaggaggatggctggcttgctgagaggtcttcgtgcagacagctgcctgcctcccagcaggtccccaaccccacacagtcctcctgctaagagatcgcccactaggtcaggaggcaggggagatctcatattctcagggagcacacactcttcccctgcttcttagtggattttgaaagccccaatcctattttccaggtgctcactctcccagcctcccttacagcaaggaacaggcatatcatgcacctaagccaagggagatgtaagcaggagacttcagggagacttctgggcaggcttttctctcctcctaagaagtatagatacaagaggagagttccctggtgcttctcctccctcttttctctgccctggaatgtagacgtgattcctcactagcggcagccatcttgcaactgtgcggtataggcataaggttgaaaagctttcacggtcagaagataaaaagcatctggatttctgagggcattactgagctgccagactaaccttgagactatttaaacctagaattcttattgacatcttgacagatatcctgatgcttcagatcatgctgttggattttccgtcacttgtagctgtaaatacccaaactgatctgtcgtttataagttctacgcatcaagtgctactgctgatacagggaggtatcagtggagacctccagggggtcaagaactcctgtccccgccctgcagtagccaggatccctgcccccaggggtcaatggaagtcaggtagggaacctggatttcttcccacctggaagtaatgaggcaatgcctccacctcccttgcaaaagcagcatcacaggaaatcagctaaaagagaagatttaaataagatccagggtttcataacataatacacaaagaatccagataagctgaaagtcgtttgtcataccaagagccaggaaatctcaaactgaagaaaacaagaaaatcaaaacattccaacaattagatgacagagatatcagaattatctgacaaagatttcaaagcagccatcatgaaaatactttcataagcaattaaaaatatgcttgaagtaaataaaaaactacaagttttcagaaaataaactagaaagtccctacaatgaaatagatgatgtaaagaaaactcaacagaaattttagaacttaaaatgactaaattttaaagaatttaaaaagaacaatggatgggcccaagcagaagaatgggggagacagaagaaaaataagtgaactggaaaagagaatatagagatcacccaatctgaataacagaacatttaactaaaagtaataataacagaattgcaaggaccggtgggactctaaaaagattgaggacttgtgccatcggagcct

SEQ ID NO: 61654 - DNA, 2515 bp, Bovine  19866881213880
  misc_feature (1)..(1): n is a, c, g, or t
ntttatttacttacctctgtgcaggttttcttcagttgcagtggccgggggttgctctttgttgtggtgtacaagcttctcattgcagtggctttgcttgctgcagagcactggtctagagcgtgggcttagtagtagtggtgtatgggcttagttgctctgaggcgtgtggcatctttccagacccagtattgaaccggtgtcccctacattgacaggcatattcttaaccactggaccgccagggaggtcccaatatacccttctaaatcatatattttagtatacttgcagagttgtacaatcttcatcacaactctgaagcatcattatcatccccattttacaaatgaggaccctgagactcagagagtttatatgtaacttgcctacagtcccagagcaataggtggaagacgggcagccctggagtccaggcaaactgacactctggagcctctgcctttaagtcgtgctctacgttgccttccctggatatccttcagtctgcatcctgtacatcattcagagcttgaggatgtcttcatcaagcccccaccatggcgtgcagagccttgtgacctgggttgcttttgctctcacaggtgtcccactgccctatgtgcttctttgacacaacccccactggccggctcctgaactgctttgcaggggacatgggatgagttgggatcagttcttgcccataatgattgaacagtctgtgctcctggttttggcggtgatcatcatcctgttgataatcagtttcatgtctccctatatcctgctgatgggagtcgtcatcctctctgcttgcctcatttattttaggtgagtgggttctttttgcttgtgaatgaggtttgagtctaggaccgacctagaactggagggtgtcagaggtggatggcccaggtcgctccctcccgttctcaatgcaggatgttcaagaaagccatcaacgtgttcaagagactgaagaactacagctgctcccctttgttttcgcacatccttcaccaccctgcagggcctgagctccatccatgtctatggaaaaactgaagaattcatcaatgagtgagtccttctgctctctgagggtgatggggaatgtggcaatggtggggaacaggaaggaaacagagcacctgggaacagcaccatcgtcagaagactcagagcgatcattgttttattccatttatttcactgcacctccagaaccccatctggaagatggtacttataagaataaaaaatgtaagggatatgaaaaatgtctgtcagttttaaagacctgtgctgttatatacatattttaatacaatgaatggtcagatgtattgccatgttagtactgaatgcatttctttctttctttcacttgcaaacagatatctaaatataataaaataataaagaacaatagttttcgaaatagcagaattttcttcactattcacacccatagatttgccttctaaatgtttgttgaaacaatcaaatcctatgattgttgctgaggtttaactgtgtaacataaacttatctacttgtaagcatcagtcaaacatggtctgcactgaactacaaaaagtttgcagtctaatggaagacaggggacacagatgtatatttttgtaataagacaagtgttgaatacaatgcaatagggagaaacgcaggtagaatgacttggggtttcagaggagaaagtgataacccgcagcttgggatcagggaaggctttggggaggaggcaacatctgaggtggccttgaagccagggaagatttgggcatgggagatggtgtgtgctctgttaactgaaatattgaatgaaccatggtgccagctctcccgttggcactagagagacccaaagactgtgcagagactaggactaagggatcattcagtcaacattgagaccctcccaggtgctcagcacccagtggggatacagctgtgagcaaggtgaacagatacgaagaagggattgctttccttcattcactcacaaatctgggcctttattcattcttgttggcccagtagagtaacttacccatcctgaatcaattatcgaggcgaggagaagagaacttctaataggcctaaatcggtccgagctcactcctagatctggggtcaggtgaactccatggctgagaaaggagtagaaaggaatcctctccaattttcttcgttggttctttggtgagactggggagctggatgctggagaaagcaaccagtgttaggaaaccctgggtcagacagacacatgtgactttcatgttgtcctttctttgtcaggtttaaaaagctgacagatgtacagaataactacctgctgatgtttatgtcttccacgcgatgggtggccttgagactggagctcatgaccaacctggtgaccttggtggtagccctgtttttggtttttggcctttcctctgtcccccattcctataaagccaggctttcagcctgtccgcaggtaagg

SEQ ID NO: 61655 - DNA, 1505 bp, Bovine  19866881216916
  misc_feature (1)..(1): n is a, c, g, or t
ngtagagatctataaatatttccctcgcttaggctagtaagacaaaattatcttaaaaacactgtctaaacagtaagtcgtaaaggtttcccagtaattccttgcctttccttactctccttcccaatacaactggatatgagatgtctcttattttagggttacaatggaaatatctggccttcttgatcatctctcaagaaaaggtaaaacagttaaatttagaatttgattaaaagagtctttaacctttcattcaggtatatttgcttgctcaggctgccataacaaagtaccaacacccccagtggcttaaacaacagaaatgtattgtctcacagttctgggctctagaagttttgaggtcaagttgtaggcaggatagtttcctctgagacctctctccttgacttgtagatggctttctttccactgtgtcttctctctgtttgtatctgcatccaaatttccccttcctatatggacataggtcatattgatatagtactcaccctaatgagcttattttaatttaatcacctctttatggaccttatcctcaaatacggtcacattctgggggactgggggggggttatgacttcaacatatgacacaattccgcctacatcagggtagagtttatttccttggatatttgtgggcagaaatgaaagacacacaggcatagacccattgactgcttatcttcaagagtgaaaaaggacatgacacctgtccgttcaacgtgggatgctctccagcagaacatcccaagatgggcagagcagtggtttgattcttctatggtttgaatggtcctctttccatcagagtaggaacaaaatagctatagacattggtttcccctttcccttccatttccaaagaactgggatactgagagcagaggtagatgtcagggatgggtgcagggtggacacatcgagtccattccaggggttagaagcccctgttattagtgcaaagctttgctcatggtgagggtaatgggttgtttctctgagggaaagtagagtgaaaagtgaacttttggaggttgcagatcacatctgctctgactttgattaagcatgcagctgactgcttttaggagataaacaatgtttaataggatagcctaaacatcccatcactcttcctcaagacttggagatttttctgagcagatgagaaagcccactagcaccaatgtcacttaccttcatttgcaggagcaagaaggcttggaaagaaataccggagatgtccacacgtgtccctgtagtggacactaatttttccttgtgtcctctctcatttccactttacatgttcagatcagctggattgtcctttagggaaaattcttgatatccctgctactgaaaatttaccatagttcctagcttttagaaaggtttttctttcagaattaccttggattctatgagctatttatatttcctgcccaaactttgctctcagattccactcacaaacca

SEQ ID NO: 61656 - DNA, 1592 bp, Bovine  19866881284549
  misc_feature (1)..(1): n is a, c, g, or t
ngccttctagaaatggagtttggggaaggaaatggcaacccactccagtgttcttgcctggagaatcccagggacggggaagcctggtgggctgccgtctgtggggtcgcacagagtcggacacaactgaagcaacttagcagcagtagcagcagcagaaatggagtactgtatctgtttatagtgttgaaacatcagccaaattatttgtaataaaggtctttatcagtgtattctttttttattgaagtatagttgatatacaatgtgagtttcaggtatacaacatagtgattcaatatttctatagattatattccatttaaagttattataaaatatcagctatattccctgttctgtagcatatttatttattttatgcatagtttgtgcctcttagtctcccacacctatcttgccctctactcttccctcaccccactggtaactactagtttgatctctgtagctgtgaaaataaaatactcttaaaacacacacctatactcattttgtttatgtgtacatagggtatttctgaaagaacccacaagaaatcgatagcattcttttgcctttggggaaagggactctggtctatggtacagcttgggcttttcactgataatcctttttaacctttcagatttttgaactttgtgaatctattatttttttctaaaaatgaataagaactttttaaaagtattttttatgctgttcacagactgttgattggttttgttggttgtcagtataggtgctccagtccttcccaaggtgctctctgtgaccattgtatggagcgcctctgtctcctgtgggcagggacccacttcaactgttcgtgtcctgctgcttctactaggcctgtgtctgagcacagtggactgttgcaaccttctgttgcttctttcccagcctccgctaatgcctaccagactttcttttaattatctgatcgcctggtctctccttgctgacaacgtgttaagtatttttaagtgccaggctcttttctaagtgctcctttaatccttacagctgtcttttgtggtaggtactgtattagtactgtttgacagatgaggagactaaaacacagctcagtggttttcccgaagtcgtacatccaaggaagcacatgacctagtgtgaccctcttcccagcagtttggcttctgagccttttctcttaacttctcctgctacactttccacttctttcagagactggaaaaataaggtagcctgatagctcttctctagatttaattatcatattgcatactagctatgctgacttttcaaatgagatatattaaaaggacattgatgtgaacccatgaaaagatcttcctttccttctgtaaccccattaatctcattgctagacatctaaacagttataattgcaggcatatctcaaatagtgcaagtttggttccagatgatcacagtaaagcaaattacataattttttctggttatccagtgcatattaaagttatgtatacactatactgtagtctgctaggcatgcaatagtgttatatctaagaaaacaatgtacataccttatttaaaag

SEQ ID NO: 61657 - DNA, 1616 bp, Bovine  19866881336818
  misc_feature (1)..(1): n is a, c, g, or t
ngagtcccttggactgccggagatccaccgtcctcctaaaggagatcagtcctgggtgttcattggaaggactgatgttgaagctgaaactccaatactctagccacctgatgcaaagagcgactcattggaaaagactctgatgctggagaagattgagggcaggaggagaaggggacaacagagggtgagatggttggatggcatcactgactcaatggacatgagtttgggtaaactctgggagttgctgatgtacagggaggcctagcgtgctgcggttcatggggtcacaaagaatcggacacaactgagcgactgaactgaattgaactgatgggactggatgcgatcttcattttttgaatgttttaaaccaactttttcactcccctcttttactttctgcaagaggctctttagttcttctttgctttctgccataagggtggtgtcatctgcatatctgaggttattggtatttctcttggcaatcttgattccagcttgtgctttatccaggcagcatcttgcatgatgtattctgcatataagttaaataagctgggtgacaatatacaaccttgacatactcctttcccagtttggaaccagtcattgttccatgtccggttctaactgttgcttcttgacctgcatacaggtttctcaggagacaggtaaggtggtctggtattcccatgtctttaagaattttccacaggtttttgtgatccacatggtcataggctttagtatagtcaatgaagcagaagtagatgtttttctggaattctcttgctttttctatgatccaaataattgaattatattaattattaaaattaaatttgaaaaagaagaggggaagggaaaccattagggtacattcacatttaagtttctctatatactctttgaaagttgtattttactattttatttataactcctagctgaaaatctagccttgttactttctttgatctgatttgggtaatttgaaaactagaatctagacagatgtatgtgcagtgttttaattaccatagtttaaaattttgagcaagatgggttgcagtattaatatagatagtgcccagctcatgggcaaggtatgctataaaagtttctcttctactgtatgcttaaaactgataaagatagtaaattttatgttatgtgggcaagaatactggagtgggttgccgtatccttttctagggagatcttccctacccggggatcgaatccacatctcctgcattgataggcagattctttaccactcagccaccaggaaagctcatacattccttaattgcttattaaaaatatgtgtgcatttagttaggattctttcccttagttagagatatcctgtttaaatttgcaaatatttatttttatgctgaggggaagatttttgtattgctaataaaaatgtaacaatatttattttaaaaatattcttccagattaccaaatagctgccaactgccttctttaggtataaggtgctgagtacatgctaagtgagaaaagagcatgagagggtcctcaaaggtgcactctgtagtgatacagaccactcataagcttgcagaaagccctgg

SEQ ID NO: 61658 - DNA, 901 bp, Bovine  19866881397297
  misc_feature (1)..(1): n is a, c, g, or t
naaatagctcattagcaatccagggagtctggccaaggagagcaggccttggacaatcccactgctatggagccaacaagccatgggggacagagtggtttggttccacccacatcaccccctccccagggcaggaggcatgtcctgaggacaaactgccagtgacatgcaaggctcacattcaccagccggcaacaagcaggctgcccgcccaccggaagctctctccccggcacgtggtagaagggaagtcaagtttcctctggcacacccgtttccactgcatgtctctttgctcctgcaatgggtcagtctgaggtgatctgcacagcaggatcatttaggaaatgatgagactgctctgtgcagagagcatgcttggcttggcaactgaagtggtcatcatggtgcttcaacactaatcaaattcctcagtgttctctgatgtagggattttagagccaagtgtcctcattctcagtgaaggcaacatgttactatctggactgacaaagtggaggacatggtgtgaagtgagaaaaatgagcctggaccctggccttctaggaaacgctgttggtgacttgcctggatccctctggtcaggggatgctccagccagctcttgctttcccagggctctaccatttcctcttctcccgaggactaccctgggctgctggagtcactgagttcacaaaaggaaatgcagaagaacctggaagtttacagtcttccaggttaaaggaggccagccccctagtctcaggctggggctctttggaagtgaaactcacactggcagggtcccatgcgggatcagggagtctgcccaggacatggccagaatctgacctctcctcttcgttgtcctgctttccctctgcccttacagatgttc

SEQ ID NO: 61659 - DNA, 754 bp, Bovine  19866881416886
  misc_feature (1)..(1): n is a, c, g, or t
nttgatttgagagtcttctgttttctgggagttggtgatggacagggaggcctggcatgctgcgattcatggggtcacaaaaagtcggacatgactgagcgactgatctgatctgatctgatactatactcctcttgcatgcttttgattacttggctctttttcatctgttgtcttaatgtgaaatataacattgatttgagagtcttctgttttaatatatacatttacagctatgaattcccctttgagcattgctttacctaaatcccctacagtttggtatgttgtgtcttctttttcaatcatcatcagaaagtatattagaaagtatttcctactttctcttttccaacccattggttatttaggaatgtattatttaattttagtttgtgaacttctcagacttctttctggtattgatttctaatttcattctattgtggttgaagtatatactttgtatgatttaaatcctgtatatttactgaagcttattttatggtctggtatgtgaaagatgttgcttgcatattgagaaggacatatattctgctcttgtttaatggagtgttctataaacacctgttaggtctagttggtttatagtgttgtatagatacattgttgatctagtaatttcccttcttttttttcagctgatgaattaattagtcctaaagacattgatcctgttcagcgttttgtccctctacagaatcaacgaaatgtgagcatgaggttttccaat

SEQ ID NO: 61660 - DNA, 780 bp, Bovine  19866881486926
  misc_feature (1)..(1): n is a, c, g, or t
ntgggctgtgtgctaaaagtcaagactgcctttggggagcaaccaagcatcttccttttaaatgccattttgctgattacagccctagaggaaatgtaaaccagaggtggtggctgatggatgcacatccataaaagcaagagcatccctggggagctaatcgaccaaaggaccagcttgaagaggaggcttcactgtgctgtgggctgtgtccacggtgtctgggggtggagccaacacatgggtaggccgtcatggctgctgcccagctagcatagcacagacctactggggaggcttcagtctggctaacaccctgggttctccaaggaaagggctcttcaggagcaagcaaggatctgggggaatgttccagaggtgcctctctttctgcaaagtgcaggccatccccctgagactggtctcagggagctgtgctgaactccaggagagaaatcccatcctctcctctgcctgtgtcttcccaaggcctccccactttggttgtcatagcaacagaactataccaaaatgtaatcttggaggatggggaggcaacctcacagcatttcctgggggctccaggaaagctttgaaaccatgggccaaaagctgggagagtttccagcaggcctgagggagagtagacttatcagtcctcaagaggggcctggcctggatcaagtttgggaggcaggaagaggcctgcaggggccctgcagcagatccaggttgactttcttttttttttttttaattttattttatttttaaacttta

SEQ ID NO: 61661 - DNA, 1897 bp, Bovine  19866881957551
  misc_feature (1)..(1): n is a, c, g, or t
nttgaccaggcttccctgtctgcgggatttccaaggcaagaatacaggagtgggttcccattttcttcttcaatatatcatttgtgtaaagcttaaatcgggaatctggactttgaaatattttcccctagtggaatgtaaaaaaagaaaccaagatgattactcttacagcaccaagaaattcaggttttaggcagtaatgctaagaacagcagagacaataacagtgtttcacgcagtaagcatttcttctggtgcaggtgtttacaatcagcctgcttcacagactgtttgccataaaagaattctgactaatatgataacctttttaatggaaacactaataatgttaaacattttatcaaggaatggcacaggcagatgcataaagcctttctgtgttcattaaattaaccttcatttcaatgtgtccaaagatgcttaggctaaagttttaggacaagctgaaaaataattcttcaaaagattatgaataatggccccattatgcctcccccttactgagtaaactgccaacatgtatttattggaaagaagagaactttgatatacctgatttcttttgcaaagtggatgatagagctatgaccaagcatggttgttatactaagtcagaattgtattacatttacaaaagagactacaagtttccatagccttctgctaggaacctatacagtaagctaaatgcagcgcctaaatgatcatagtggtacccacacacctatttgattttcttcccagaaaatgtccatcatcattcagtgcaatagacatattaatatacttttacacgataagaaactccaagatgaaaactcccaaactcattctataaggccaccgtcccttgataccaaaaccagacaaagatttcaccaaaaaaagaaaattacatgccaatatcactgatgaccatacatacaaaaatcctcaacaaagttctagcaaacagaatccaacaacacattaaaagaatcatacaccatgatcaagtggggttgacctccagggatataaggattcttcaatatgtgtaactcaatcaatgtgataaatcacattaacaaattaaaagattaaaaaccatatgatcatctcaatagatgcagagaaacctttcaacaaaattgaagatccatatacaataaaaactctccagaaaattggcatagaaggaacctacctcaacttaataaaggctatatacaataaacccacagcaaacattattctccctgttgaaaaagtgaaagggttaatctctaagatcaggaacaagacaagggtgcccattctcaccactattattcaatatagttttggaagtcctagccaaggcactcagcaaagaaaaagatataaaaggagcacagagtggaaaagaagaagtaaaactctcactggttgcagatgacaaacatctatacatagattttttaatgtattttttatacatgtatagatgtttttctatacatagaaaaccctaaaaaatgtcaccaaaaaaactactagagctaatcaatgaatttagtaaagtttcaggatatacaattaatacatggaaatcccttgcgttcctatacattaacaatgaaaagtcagaaagagaaattcaggaaataatcccattcaccactgcaacaaaaagaatcaaatgcctacaataaacctaccaagggagacaaaaaagctgcatataggacactataagacaataatgaaagaaatcaaggacaacacaaatagatggagagatatactatattcttgaactggaagaatcgatattgtcaaaatgactatgctgctcaaagcaatctacaaattcaatgtaatccctatcaaaccaccaatggtatttttcacggaa

SEQ ID NO: 61662 - DNA, 1017 bp, Bovine  19866880590840
  misc_feature (1)..(1): n is a, c, g, or t
natagcttgaaagaaggtatcttcagattttcacccataaaagtggaatactttgattccaaggtaacattccaatttctaaaaaatgtctactgttgacacttggtatgtgccagcttcttaacaacagacattagttacctttgatttatccctattcattctgaatgtctgttatttgaactactttagttactagggaagcagagtgtaactttgagactcctcatgtcagatgatcctaactggctatgcctctaaaatcagagtgatcctcactgacagaaggaaataaaatatagtgtacttgtgtcgaattttgaaggtccatttcctagtcagacaaaatacaacggatgtcaaaaacagaaaatgtttattatcacacgctgctggaaactccaagttagacaggcatggactcagtctgtgctttgctctttgggtactgtcaccttcatcatcttcactaccaccaccaaccctcttccatactcactgatgggactttccgtattatttcatccattttcaaaagcagcctcagagaacagagcaggcactttcctccttctaggccaggtgagtaaatggagcccaagagggtaactatcccaaggtcgcagagatgttagcaatagtgtccagatctttggcagagtgcctgtgggtctccatgaataacaatctaaccctgatccgtggttcgacagcatcactgactcaatgggcaagaatctgtgcgagctccaggagatggtgaaggagaggggagcccggcgtgctgtagtccacggggttgcaaagagttggacacgacttaagagacaacaacaacaactgatccacgacctccaccaacacctagaaagtaaccagcacaagtcacaccactgtcgcgtcacggtacggaattctcgttacactccagcacagtcccggaaaactgagtgttgtgaggctggaacagtagtaaggccttgcagatttaaacatacagcagggagcaaggaacga

SEQ ID NO: 61663 - DNA, 2882 bp, Bovine  19866880727321
  misc_feature (1)..(1): n is a, c, g, or t
ncccatcaggctcccccgtccctgggattctccaggcaagaacactggagtgggttgccatttccttctccaatgcatgaaagtgaaaagtgaaagtgaagttgctcagtcgcgtccgactcccagcgaccccatggactgcagcccaccaggctcctccgcccatgggattctccaggcaagagtactggagtggggtgtcattgccttctctggctttctgattagcggtctattttacacacagtcatggtatatgtcaatgctactctctcaattcgtcccactctctccttcaccagcttaattcacaactccattctccaatctgtgcctctcttcctgctctgcagatgggtgcgtcggtgccatttttctagattccatttatatgtgttaatatatgatatttgtttttctctttttgacttacttcactctgtataacaggctctaagttccaacctacttcactatgacctcatcttaattatctctacaatgactctatttccaaataaatcatattctgaggtcctctaagttaggacttcaaatatatcctttgggaaggggggaaggacacaattcaacccattatgattactaatagtgatagtaaccacatctgcatatgatctacataccgatctcacttaacctaataactatcattctcccttatttgaagagtgagaatctttcattacaagtcccttgccccagcttacagagctgataaaggtggagtcaagatttaaataaaaactctagagactgacccctttactatcaaatgttatcaaaggatgtggtttataccatcaataagccttccatattagctgggattaactgttaataggcttaactgtaagaatgatacattagatgggaacatagggtgatctttaaataccaatatctgttttgttggagaacagtcaacaccctttagtcctcagactctagggtttgagataccacagtttgaaacagctcttgtgcccgtgatataacctgaaacaaaagattttgaagatgccagattacttgaatagtgcatatgtacccttgagctttaaaatgttcacctacacattttacaagccaagaaaaaaaaagttgctaaaatttcctatatagcacaggaggagaaaggtacaatctgtttgcaggatgtatattaagttaaattaaaaatgcatcccaatatatagcgggtgcccacaaacactgtttgattccacttacacgaggtacctgtgtgtgtgttagtcactcagtcgtgtccaactctgcgaccccacggactatagctctccagactactctgtccgagggattctccaggcaagaatactggagagggttgccatgcccttctccaggggatcttccccacccaggaatcaaaccccagtctcctgcattgcaggcagattctttaccatgtaagccaccagggaagcccattatgcactaggcatggatccaaagactgagtgtacagcaatgacgttatattattatatttaaacttatatgtgagttgtatttgaccccactttccctttttctccatcttagcttctagtcaggaagtgaggacaagtattgagcaaataaccagttattgggaagaacaggatactttggtcacttagagcagaagactaacttaattttataaaatttgtattggagtatagttgctttccaatgttgtattagttgctgctgtacaccaaagtgaatccaatatatgtatacatataccctctctttcttggaatttcctttccatttaggtcaccacaaagcattgattagggttccctgtaaattctcatttataagaaacactgacttaatcctgagattggaagagatctcctttcaggagtgacctccaggtggtaactgagaatgaattttctgttttagaattttctggatagaaaggaaagaaacaactcttgaaacaaagcagagtggaagagatgattaaaggtttttttaaagaagggtctgatgccaaagggcaaggggaaaccaggcactaagccaggaccctgtgtaacacgttctgtttgtgctattagatttaatcccgatgaccacaaggaaaatgttattaccacattttcttaaatgaagattaaggttttttaggtggaattagcaaatgctcaaagcatcataagctaaaattctggctccatattttctaaataacttaatcacaaaaatccttttttaaaagacatctagaaatgttccattagaatgtgataacagcttttcatttcagaaagagtttataattgttttaatgagaaagagaagaaaactgaggtccctggtagaatagaaattctctttctataatttcaaaatattccaagtcgacatgaaaagagtagggcaatctgtgcttgaagttcttcatagattttgaatgatcattgtaacagactgttggaaattcttttttcgtgtgtctgatgcattcaacaggagatacagctgaatcggtcagaggcacaatcttcagaacttttacatgacactcagccccgcgtaaaggctgcttcagtgcaaacagaaacaaggaagggctcctcgctctccagtaggatgtacttccaaagcactttcccacatctgttaccaccacttagtcacctctaaaaccttttcagtcatttcaccgtttcaggaaaccgttagtgccatcctatggatgagagaccagagacacaaggctgcacaggacagtgagcacctacagttgagcacagggaactctactgtgtggtggcctaaacgcgaaggaaatcccaaaaagaggggacatatgtatatatacagctgattca

SEQ ID NO: 61664 - DNA, 833 bp, Bovine  19866880841335
  misc_feature (1)..(1): n is a, c, g, or t
nataatacaggaaactatattcaatatccagtaataatatataatggaaaagaccctgaaaaagaatatatacacatacatatataactgaatcactttgcataagaaactgataaaacattgtaaatcaactgtacttcaattaaaaaagagtgcttggcataagtgttagccatagtaataattgttgttatattattaataattttatagtaattattagttatttatgaataatatgttttttttagatattttagctatctagcatattatagtaaaaaggtggctttgtagaagagtaagattccataattatctagtgaaattggggccataaatcattgaacatcttgctccatttttgtgtgaattatttggattgactaagtgctcttgttaccgggctgggttaccatctgctgtgttttgcctccataggtcaggcttgtcctcctagggaatgaggaggtggaaagaaaggccaataagcgaactccagaatgtatcctaactgtcttgttcacatttataggacagttttattgctataggtaagacggataactgggcattattccaacatcttggcagttttcctttttcaaggtactaatattaggattagcatgttgttttaaagacattgcctttctgcaccttataattgcttgttcttgggggaggcttggacggtttgaattagggtcttcctgccaaatatgcaagagcgtgtctattttgtttgaacactttgcttgatttttgaagttgtgattcattttgccggtagaacaaacgagaggccgggggggggggggcgtgctgcacgt

SEQ ID NO: 61665 - DNA, 1014 bp, Bovine  19866880969374
  misc_feature (1)..(1): n is a, c, g, or t
ntttggtattttctctccaggcaatgattctcaatcttggcctgtatgttagaattacctgggggagatttttttaatcataatgcttaagccactccccagaccaattaatttagaagctcctgggatgggacaaaggcatcagttttaaaaaacagtgggcagccaaggttgagaagcactctagctccagcacgttgatcttgtaggtagaaaccagcagttaggcttgtttagtatcttggtgaaaaactgaaatcataaaggacctctccacggccaaagagaagtctttcctagctcttcagtctcattggtacctacctccatagcacttggcctgcccttgaaattctttcctctggttgctgagactatacactgccttggcctttgtctaaccatctgtactgctcctctctctccctccccccgccatgaaaaccctgaagtcaattgctctccaatattcacagtctatggttctttctctccaagaaccttgccagcaaatacatttataaaactacatctccagccctagtccctctcacaagttccttctcttatatacctccacatggatgtcttgttggcatctcaaatttcacataaatgtgtaaaatagaacacacaattcctgcataaatcagctcccccttacgacttccttccataaatccagccacggttttcagggttatctttagttcttcctcctacagtctatttccaaagtggcgttggacttttctgtgcagtatcacttttacgttcttatttccatctttaaagttcacatcctaagagtttcctgtctagactactgaatcagccttttgtctaatcttccttcttctgatactccctaccacaaagtaatcaataccccacagtcagattattgaatacaggatacagctccaatcatgtcactcacaacccattgctcaaacccattaataactcatcacctgctcacattcgagtataaacctcctggcaaccaattcc

SEQ ID NO: 61666 - DNA, 1228 bp, Bovine  19866881337765
  misc_feature (1)..(1): n is a, c, g, or t
naaatcccatttaaaagaaaatcatgattagctggtcaatagttctaaaattatctaaatacagaagaaaaatataaagtggctcagaatttttaaaaacatcttctagaacacttttaagtgagtgaagcctaaagtcaccacagtatactgagaagacagagtcctaattccattttaaaggattacaaatgttatatattacactcttgtaatgcaattaccttctctacttaactacctcagtaaaatttagaaatgtgattttctattcttttaatgttaatgtggattaaagttgaagggagaaaacagaacatttatttaagtgagcagggaagatgttacagggtatattgctgcttttataaaaaagggtatacattgactttgacttccctacaaattctaccttggccgtggtcaatgaaagtagtgtctccctctgggatcctatggcatttgaaactctcatgatactttttatattctgcctgatattaattcatgtgtactctgctttaagttaggcaagttataagatcactcagaacatgagtttttgtttataaaactgaaataagctactcttaagaatctaaaaagattaaaatatacttgtgaaagcaccctagaagttccatgaaaaacagttataatcacattctgctttaaaggcgccaagcagggtggccacgtgcagcactgcacacacacctccagggggcgccaggcagtgaccctggcaccacctggaagctaaccatctttcccagaacagacttttcacacacatttactactcagtaatggtttctgaaaccaaagtgaattctaaaaatgtaaaagaaaaccagatcgttgagattagccacaaaactagcagaggctgcctgttaatacaaaaatctgatgagtgacagggatcaacagcagggtgtttcttaccctttctttgttcaattcaaaaatactctggcctgatatcttaattgaaggtaattttttcccgacgcatacttgtactttgattatgttcagatccttcaaaaggaaaaagatgttctgaagcactaggtcacctttatatttctttcccaaacaatatcttgtcctttcactgaactttagaggcaagtgactgactcaatccatcagccctgtgttctggggttaaccataatcggttaaaacttggaaactcaactaacacaacctgtaaaaacgg

SEQ ID NO: 61667 - DNA, 1159 bp, Bovine  19866881371506
  misc_feature (1)..(1): n is a, c, g, or t
natggaagaaagatgcgggtcgctccaggttggtaggtggccggtgtaattagcaggggaacttacacaggaggcttttcttggccagatgcaagatgagcacatttctgcacttgctcgccagaatcttaatagtttatgtagagtccttaatggggttcagtccaaacaactcatggtcaacttgtgctcacatcctctccatgacctctgctgccgacagagctgtgcgtttacataacacgcggttccagtggtcttaggagatggaagaggcattattaggagttggatgtgactcctgcatgatgaccaacttgtttctggatttagggaccatgagaactttcataaagtggaagttggagcaataagtggcatggacaagctacattttaagttattttaaaaatactttactcacactagaattattataacctgtcaaaatgtgactaaagatgtcaacaaaattcttgaaatttttcagattggtaggtgctaatgtacttgaattaacgtgacgaaatgtgatgatttagtaactttattttaatgaacaatgtgattgattttaacctttaagaaaagaaaggtaatatgggcatgtgtatttactttactgtggagaaagttctcctttaaattcttaatacagtaataggccttaaaacatcaaatcttcatttggacagtttgcgtttcatagctgaggacctagttgtggttaatttaatatcttattcatttgcatttattaatacaatgctgggaaattatgctgcattcttcttacagtggtgtttttgctgattgattttgtctctgaaaagataacaagacactaaagccactattatagttcttgaatgaggatgtgaaatacagggcaaattgtgggaaaaaagtgctgtcctggaaaattaatccttttaaagtcagagagattaaacaattcggaatttgaaaaaaaatcacactgaaagataaaggtatataagctcacttaactattaatgatacaaattaatctgcagagaattaaaagcagctttgttgatggtagaagacacatgtagttaataaggacattacatctcatttggggttaggttggcctctcatttattaatatctggttaaactacaaatagaaaga

SEQ ID NO: 61668 - DNA, 1766 bp, Bovine  19866881418212
  misc_feature (1)..(1): n is a, c, g, or t
ncaactgtctcaattaccttagctttatctttcaaatcaggggatttgatatcatctctgaggtactttagcaaatttgagaaatgtaaaaacaattattaagtcagagccaaaaaaaaaaccaacaacttataaatttataatacaaagcactgactagccctaaggcataacggtgccactgtatccagtttccatttatctgctgaactgagacactctagggctttggtattcttcctggacttttctggctcagaacacatgtatatctcctctacagttaagtagcagcaatccccctgatgacataaataaagaacctgagaagatctaggtaggtgtcatttcccaactactaaagcaaagtgtttaaaatatgctacaggaatataagggatgcgctgcagtgactaaataattctgaaaagcaggaaattaagggcttcatattcttcttctctccttcaccaggggatcaaacattccctttagtgctcctaagaatcttctaatccctccatcttcccctctcctaaagagccttcccaacacacacacacacacacacacacacacacacacacacgcacatattttcctacagattctctagccaatgtaagtaagggcgctgctatcctaggaatgtctccagggttcaccagaccctgtcaaactctgaccttcataaaatcaaatcattattcctatctaatcagcccagtgtggataaagtgctgtaacatacagcctgtctatacaagcactgagtcacttaaataaaaagcaatatgtttcgcttcttcagctatataaatatagacttgtatatataaaaacaagcatcatcccacatccacatatatatggcatgggcatgtgagaaggatcgatgatgtttataaatgtctatatgtatttatatagagatatacataggctcccaagcaaaatgttccttgtttttaaattctctgattttggttggtaacagttatttcttgttaaccacatagtaaatatgagactatcacattctgtaaaccatgaaaggctgattgagttacattttccccccctgcaaatcatattctgtgaatttataaagggagacacaagttttgaacagagacacactgctttagttttaagtaaagaattggttaaagaaaatctgatcatacagaaaaagcaacagggaggttccctggtgcctcagcggtaaagaatccgcccgacaatgaaggagacacaggttccatctccaggtcaggaagatcctctggagaaggaaagggcaacccactcttgcctggaaagtcccatggacggaggcgcctggagggctacagtccacagtcacaaaagagtcggacacaacttagtgactaaataacaactgttaagaacagtaacagaagcaagcctgccatttattagatccaaaatcaaacataatttttggagattgctctgagttgtattcctactactaattaaccaaaaaattcatgtaaaaaagatttcactctgaaatcactgtgctccttaagcgactatagagttgtggcatttcttcattcagtctgtccttcataatcccaagtctaataatccagtttgggaaatatctaggctttggtatccttttctttgctcacatttcttctttggcttctgcactatgtcacagcgacaaggcagagagggtcagaaaaactggtgacatttctaccagtcagccttgctctgaactaggaatt

SEQ ID NO: 61669 - DNA, 1021 bp, Bovine  19866881700704
  misc_feature (1)..(1): n is a, c, g, or t
ntgagcaagccgggtggggaactgtgccctgtgttagaccctcccgtatgttttgttttgatgcagcacctccaagaatgggctccatcaggggggtgttctgctggctgttgactcggtctcagcttcccccagtgacagcctgtctcaacactgtcgatacctcttcattgttgacgacgagcagacctgacggcaggttgttctcgtctgttcacttaacgacttcgctgatgacatgcaggtgtgcactggtggtgtacctagtcttgaaacttccatgttctcctgggtagaaggagggctggctccattagcttctagccttgtgagaatacagaaaactgttctgggcacttgccagctcaagatgagccatgtatggtcataatgaatccccgactcataattttcaagctagcattatgaaaatgttaggtcacttcgtctaacagaccgaaatgcatcgagaatgtgctttcagttggaggcatttgaggaagttattctacgcctgacacatgacaagtataagattgttcagcctttaaagcaagttatctgcacatgattccaaacattcagtaatacgttggcttcagttttactcatccttctagagagagagagaccataaacctgagggtttatgcatatgagccctgcaaataagctgtcctgatttcaaacctagcttagagcaaggtcctaacttcactgtgactcagttccctcatatataccattggaacacttaatattacctcccttttagagctaacattaatatcaaaccatgtctggcacatagtaggtgctcagtaaggtgagctgttattaatggggctgaaagcaaaaggaagtgaaattatttttctttagactagagaaagggtctgagacctacctggtaattcaaaacaggccttgagctcacctcttcacagctgtatccaacagataatatcccccagacagtgccagctatcagtggtgattgagtgatgatcctttatagcca

SEQ ID NO: 61670 - DNA, 1099 bp, Bovine  19866881761592
  misc_feature (1)..(1): n is a, c, g, or t
ngaggaagggcgggacggaggtgagtaggggcaaggaagagcgaggaggggaagagaagaggggggcagagagccaggacggggctccagaaatcatccccagggcctctggggttgtttaacttcatcctttggcctaacctttctccagacatcaaacagatcatatcaacgtaagtcatctctcttcttctctgaaagatgatggtcaataacagctttatgaatcgtggtgatggagttaagtgagagcaatctgtgattgactagagttcagataatagacacctattcacccaattttttgagaaaaagcaaaggtgaagttttagttctaataagaatacagtatctcatgaacttatggagaagactttgaggttaccagttcaagtatggcctgcctgtttttaacttgtcaaatggaaaggtgtctacagagtcttttatgacttggatgaagccttccccatggacttaattgctgggactctctcatcaggcttcttgctgatattccgtggaatattcccacctgttttgagatcagtctggctcatccatcacccgtcagggatgctgtcgaaaacagggccacatttggcattgtggcaaccactctaatgcaactggagatttttgatccacctctgattttattgtctcaggccaggctggtccaggcctttgtctcattcactatacatcttgatagttcaactgtgtttaaaagttttcctccatccctggtggagtctaactccaaacagtggagaagggaaccatgagacctggaacagactcatctactatggatcctcccaagcaattggaactctgagtaaacatggaaccaatttcagggacagatggagcatgcgtgtgtgcacacacacatacacacaaacacacacgcacattccctcctcttggtgtctgtctctctttctctctgtttgtgtctattttctcttctcatactttgcccagattttgaaataaattctgttttttccttacttctttcacacaacttgaatcctcagatgctatgaaccttatatttctcattctatgatctaccaagtcactgatgtca

SEQ ID NO: 61671 - DNA, 915 bp, Bovine  19866880359190
  misc_feature (1)..(1): n is a, c, g, or t
nttatacattttacctcagacttcctttctatggcctaatgaactctaagatgatatagaatggttactttccttcaagattcttttagctgccattttccacaaacagatttttatagggagccagaaataagccaatgcagtaagttcctcattgcttctttctcttttgtgagattaaatttccaacaaggcaattcaataatttttccgatgttttgcctttagtggagtgggattttcatctgaagtctataaaggcttacattgctgctctatcttgcccgtccatattaaccatctggttacgaggtctctgatgtaatcccaggataacacttctgttctcctttcacactctcctgcagctgcttcctgcatgctttaccttcaggtatgtggatttccatgcatgtgcacatctttttgacatatactgcttctcctctagctgttcgattagacctatttatttcaaacaagatacacctttccatcatcatattccagtcaggaatcacatttcaaaatatcctcgcaagacttaagagatgatttttaccaaaaaattattttcgtgtgttttaaagttctgtttgatgatttttcatctcctacttgtctgtatacagacaattgagaatgtgagtacctcctgcccatttctctggtatcttctgaaaattgctggggaagtcctgcagtatttttctttctgcgccatcccttttatgcttcatagtatataatatggccttacagttttctctgagtacttttctccttcccctcacaactcaattgaaataataaaccactcgatcaggctgactggtctcctgccaacactgtcttgccagtcttatgagatgcagtccatctcctactagaagcagcaggaagaagagatgaaaa

SEQ ID NO: 61672 - DNA, 1939 bp, Bovine  19866880360164
  misc_feature (1)..(1): n is a, c, g, or t
ntgggaagccccctcacctaaatcatgctgctactgctaagttgctcagtcgtgtccgactctgtttggcctcatagacagcagcccaccaggctcccccgtccctgggattctccaggcaagaacactggagtgggttgccatttccttctccaatagttctattcaaatgtaaggggacacagttattgtccctttcatgcaagccccccgccccttccccattaattcccactccatctggatgacattgaatgaatagtcacattccctttaagagtcgttttatctctgcctgggagtcagacactgcttccccgtgcttttgttgtttcactgtaccgcacttaccccggcacacctcgttcttccctctgctgcttcatcattgccttcatgttttctctacagtgtttcttctatgcttgacataaccatttttccttcttccctttttcctgaggctgtgggttatctattttcatgcttaatattttttctgtcccacccatctgtttattttagcttgtttgttctctcctctgctggcctctttatagattcctctgttcaatagtttaaactccatgacaatgctttgtttatcctctcagctagcacagtatattattccccatctgctatagagagggccccagtgccccacaaagttaactaagcccctcttgtctgaacaagtttttcagccatgcattcaagtttctaatctacccccatcttccctggttatgagtgtgacaatattatttctaagcaagccatgctcaatggatctcatcttttgttcttctttttctttcaaatacctcagataagaagtaatggtctgctgctacagacgtaggcagtttcaatatcagtcactcagtaaatatttattgagtatttgctatgtgactggcagtgtgctaaggactgggtctatttccagagacatacaaggtacacagtccaaggcaccacaattttcctgatctcggaggacatgtagtgctaacatatatttattatgcagtcgctgcaatccaggaattgtgctagaaactgggaatacaacatgaattttaaaaagaaagatatctatctttatggagctcatagtctaacaagggagaaagacacatgttaaaaattatttacagttcattcaaatatgtacaaaatgctctgggaacagagaggagtgaaagggattagttctgcctcgggtaattgtggaaagcttcacagagatggtgatatttaacatggagtttaataaattagtgttaattaagcagagaattaataataaaagctaatatttattgagtacttatgaggtttcagtcactgttctgcatgcctgtgaattaactcatttaagcctcaccatagccctatcaggtacccatgttttccttagtttactgattaagtaattaataaacagagaggttaaataacttatctaaggtcacacagctagaaagatgtcaaaaccaagatttgattccaaaatctggctctagaacttgagcccttaatcactatcttctactgtctctcatgaaagggagaaaaaaaaaaaagaaaagtggcattttaagcatatgagtatgttggcaaagcatagtattaatacataattagaataatttgcagccatgggatcttaaatccaatacaactcattcttttgttcaataaaacttatagaaaggaccaaactagaggtaataatgaggaaaataatccagttttctccattggtcttaatataatgtgaaagggcaagggagatgtactgattacacatctaagaatttcagctggagtaccaggagttacacagtgacctaagagtccctaagaacttagaagtctttgctagccaacatggtatccaggttctctttgcatccttggaagctaaaaa

SEQ ID NO: 61673 - DNA, 1719 bp, Bovine  19866880371174
  misc_feature (1)..(1): n is a, c, g, or t
ncaaatcaattctgctcactctttggtatattttatttatttgatgaatatctaattagcagttgtttaaaaaaccttggtttaatagacattttgtactttacatagttaaaatagaacccttgtgcttttagtatgtcagcctgctcttctatcacattttttccactttagttagtggtttcacccaataaacttgatactcaagcaaaggtaaaaagaccttctagtttgggtggcatatagtccaaagagtcagagttatattacaacatgaattttttttcccatcttttcttcagttcattgcaatcctctgaagtaggatgagtttccattccatttaacaaattaaaaaagaagaaacaaaaaaacctgaccttccatgtttcccaggtcacaaatctgtcagtggctaccaggcctgagctttagttagcatgcaagcctgaatatagggaaggcacagagaacagttcccaagaaatcagtattcgaatgttaatataaatattatcattattaacttaaaattaagagcaggattaagctctaaaatcccaaacaaacctgaacattctatgtaagtgttctgtctctcgggaatgagggagctgtgatgtcttgacaataaaatttaaagtcgtctacatgcaatctatgtaaactttctgtgacaacatattactttataaaggtacttgaactgtaataaattctataaagtgaagatgaaatgacacctctttgaagtcttcttttctaaaatgctaagtgtccataggacattaagtaaataattcttcttctgtccttttagaattatgctgaatatttttacttcaacttcatagaacctcctaacctagattcacacaggagctgaaaaggccttgaatagctttctattgttattgtgtttgttttaaattattaccaacattttaaaaacaggtggctgacaaaaaaaaaaaaaatctacttctttcatctcttgaaataaagaaggtatggccacacttgacctataactagaacttcgttaggctcctttaaccctctatgtggtacacataaacagcagcagacatttgaccaaggataagtgttcactcaatatggattttatcagtatgtacctctctgattcaaccttaaaatattgaaaccaagccttcccaggattttgctaattttctgggttcttgacattgaagattctctagattgccttcttcagccagcagtacttttaattcttagaccctccatcagctaccaaaagaaaaatagtagggagtagagtgtggcgtatgggataagttgccttgtcttcctaccttcctattttatcttccacatagcaaaaaagaagagcaggaggcaacatgttccacaggactttgtaatactagttacataactccttaagatgattttttgtgcttgccatcagaaagcatgtatttttaaagctttttcttatttttcataccagctgttttcttctttgccttgagtcaatgatgtggcacagactctcagaattgaaaggaaccttgaagatttcccagttcaacctccttatttagaggacaggaatttgggactgggaagtgatctaaatagccttagtctgagctaaccaactagcagagcccagcgcctggaatgcccttgtcattgacccccgtctagtgtgctgaccagtattttcta

SEQ ID NO: 61674 - DNA, 2514 bp, Bovine  19866880373796
  misc_feature (1)..(1): n is a, c, g, or t
ntttgtggtgatttacttaaaattgtatatttagttatggctcttggattctaagattgggggaaagtgtcttaatataagaaatgaacacatttatatattgaaaaaactatgtgtgcaataagtgtttagatgaattattaaacagcttagaaatcaacataaaatggtatattaatttaataattgtcattgttactataatcatacctcaaatactttaaatttaatatacttttgtactgttcaactgcagggttttgtatcatgttttatgactcaaaattgttgccttatctctgcttaacaccttccaagaccttcccaattcaaactcagccaggataaatacaatatggttagattgtgactttgaatttcaggcagggcttctgcttctagttaggagacagaaagccaggagagattatactcccaccctaaaaccagaacaaatcagataatcagcaatattggatttgtttaaaacccatccagattaaccccaatgaactaaattccagaaagcaataagctcttttggggagagaagagactcttgactgcttttcttcttagaggaatggtgggagggggaggaaatcacaatagagaaaccaataaagatttaaagaatatttagtggatgtgtctggagtggtatgatgtttgagaacctcaaagagcccaggcagagaacctgtcagctattagcaaccaaatctttgccatgtcattttgataccattcacctcagatcccactccagtactctcgcctggaaaatcccatggacggaggagcctggtgggctgcagtccatggggtttcgaagagtcagacatgactgagcaacttcactttcactttcacttttcactttgctgcattggagaaggaaatggcaacccactccagtgttcttgcctggagaaccccagggacggggaagcctggtgggctgctgtctatggggtcacacagagttggacacaactgaagcgacttggcagcagcagcatgcagaatgcatcatgagaaatgctgggctggaggacgcacaagctggaatcaagattgccaggagaaatatcaataacctcagatatgcaggtgacaccacccttatggcagaaagtgaagaggaactcaaaagcctcttgatgaaagtgaaagtggagagtgaaaaagttggcttaaagctcaacattcagaaaatgaagatcatgacatctggtcccatcacttcatgggaaatagatggggaaacagtggaaacagttactgactttatttttctgggctccaaaatcactgcagatggtgattgcagccatgaaattaaaagacactccttggaaggaaagttatgaccaacctagacagcatattaaaaagcagagacatcactttgtcaacaaaggtccatccgtctagtgaaggctgtggtttttccagtggtcatgtatggatgtgagaattggactataaagaaagctgagcaccaaagaattgatgcttttgaactgtggtgttggagaagactcttgagagatccttggactgcaaggagatccaaccagtccatcctaaaggagatcagtcctgggtattcattggaaggactgatgttgaagctgaaactccaatactttagccacctgatgtgaagagctgactcatttgaaaggaccctgatgctgggaaagattgagggcaggaggagaaggggacaacagaggatgagatggttggatggagtcaccgactcaatggacatgggtttgggtagacttcgggagttggtgatggacagggaggcctggcatgctgtggttcatggggtctcaaagagtcggacacaactgcgtgactgaactgaactgagtgaggtacatccatgttgctgcaaatggcattatttcattcttattaatggctgagcaatattccattgcatatatgtaccccatcttctttatccattcctctgttgatggacatttagggttacttccatgtcttggctgttgtagacagtgctgcagtgaacattggggtgcatgtatcttttcagggagggctctttattgttaatatcaacttgagtctaatctattcttcctattcacattccatctccctgcccccctaagacatctcttctttctctactgtgtggttttgtcatattgagcatattcacgtaatgcagttagaacaatgcctagcacttagaacattgctttttaaaaattagctttgctcttcctccttttcttccttttcctcatggtcggcttctattcctcatttctctgattcctgttctagtctaggttgagttacatttctgaaaatttcagatcagcatctcaacagcagttcccagttgagctctacctattgtccagaccatagactctaccctttctctccttttttgcctcctgatgtttcctatctattttaagccttagaagtcttaacttatactgcagcagggaaagaggc

SEQ ID NO: 61675 - DNA, 2293 bp, Bovine  19866880376076
  misc_feature (1)..(1): n is a, c, g, or t
ntaaaattgttggacatggtaaaggactggatgaaaacagggaagacaaaaagtggagaagtaactattttgacttttgaaattgagtttgaaatgcttaaatacagaaagtggtcagatacgtggatagaagtccaacctggaggtatagacgttagcatcatctgtacagaaggggtgatcaatcagcatggaggagagggaagaagtctcaaggacatcttcattagatctgaactagttgatgatggacagggaggcctggtgtgctgcaattcatggggtcacaaagagtcggacatgactgagtgactgaactgaactgaactttattatatgtattactgaatgtgaatggaatttacaacagagttaaccccaaactactctacctcagaatctaaatggttgacatgcaattgtatttgcagaagagatagcaaatgaccatgttgtttaaaatgctttataaaattttatttaatattatttgatcatacagattttgtggtaaatgtgcatttctaaaagtgcataatcaaacatttatttttctcttgatcttgcatttgtcatagaaaggtgctatggatgattacatgaagatttactacttatggattcatattaaaatatgccacaaagaagagataaacaagtttataagatgctatttgctgattttaaaaatcgaggaatataaaaaatattatttggcagtaacagaaaaataccatttcttttttaatcactttcgaaattcaacatggacactaaaataaagagttggtaaagtggtatcacccaatataatatatattacccatactggatttctcattcttgaataaagaagcacatgaccccacttctgtataatctgtgctgtgttcaaacattaattgctaggatcacgaaagggactatattagaagcagatagaacagatctgtgcacagcaaaagagtggctttaaccagagttccatcctaatgtcttactttgttaggaacatagtttaaatatttaaacaggaatgtcatgttgattcattggtagcatttggacacacatctcaggcctgagcggtgaatagcatagcttgatacaaatggttactgaacactctcgccttcagtatccagttatttcagtgaagagaccttaaggaaagtttcccaaaccctcattggctttcttttgctaccacagtaaataattatttgacttcatctgagctttatggagctaattacttttgcttagaaacagagttaaaattaaatgtaatttttaattataaaatgtttccttggaaacatttgttgtaagttaaattgtactttgttctaaaatacttaatttcccttacaattagaaatgaaagacagaactcagcatagggcaatttgaaaagtgtagcattaattgctacaaaaaagttaattttttcataatggacaactgatggtgaacatccaattaactgttccatagttatattgaacaattctgctcagaaaagaattattctattttatgaccattaattgaatgatcactggaagcagacatttttaaaatttagaaatttctttagaaataatctttttttaaatttagaaattatatgtttgaatttagaaaaagctgagcataatgatcactattgaaaagatcagcataagtaggtgaccctcgaagttcactgcaactgtttcacaaatcaccttaacacacaggattcacagccaagggcaagcctctctttggttcataaggtgttgtcctggaaaccattttgatgcagtcgataatagggcagacggagagacacagggtacagcctgtacaagtgtcagtaacggtgggcaggtgggtttcaggatcaaactggatagcctgcaaacagaaataaagagtcttgctgtcactgcccacaaagggcaagaacgcccctattttagcatcaacgtttttctccactgcaggagagctgcacttggagacagctacgcccagactgtggtgcagctatagcaacagttgagctgctagagaagaggggggaaaaaaagacaggaaaaaaaaaaaatccttttaaattagaaacacgatgtttaaaattccttagaggtatttttctttctttgtgtgaggaaaatatttcataacatagtaactctctagtttcctgcattgtgagcagactgtgggtcctgccggtctgaccatgacctggtgggtcggctgcctgaggcgggcagggcgcttccacaccttgtccttttca

SEQ ID NO: 61676 - DNA, 1209 bp, Bovine  19866880694564
  misc_feature (1)..(1): n is a, c, g, or t
ntaaagatggcaagttaatacctccttgaccattatttaattttgcatacatcaaaagaggcctaggacatggtagtgctaatgcttatgaaactgctaaagcaatatcatgtatctactttaagataacagattttgagaatatcctgagacaaatttttaatgtatatgaagaatttaataccaaatttaatttctttgtattttttctatttctcatatgctttctaccccaaatatacacaaactgcaatcacacttggtttctatgaagtcaatgaagattgacatttagagcttttctcaaatatgtatattgtttattgggctttgactcttgggtggaatttgaaaataacataatttgtctattggtaaaaggcctcactgtcaggcatgtcagcatgtatatatccaaagctgtggtctaatcctcaagtaatttttgaaagaggagggaactagagaacaatataaagttttctcaccatttaatggcaaatataaattactacctaggccagttagatttaacaagaatttttacatggttaataacaaagaaccatataattcgatccataaatgttttaatctactaagtgaagaatcactacccaatagatgctgcagtgacaagcacatcccacttaactaatcagaggttttcatactttagtgtgcatcaaaataacctggaggggcttattcaacacagcttactggggccccatcccagtttctgatttggtaggtgtggggtgggcctgagaatttgcatttttaacaagttctctggtgatgctgaagctgctgatccactgctctaatgtatcattgatctagtttcccactgtctaattagagctataagcagtgtgctgttttggggcattttccatcttagttaaggaagcattaatgctacagaatataaggtttgatgaaacgaagatgtggaggcatcatcagcatattgatgtaattctgattccaaatgtctttcagtctcccctgtggcctcacacacatgctaaataggatgctactgaaaaactagcacttcgcagccaagggtccttagggaaaccagccaatcattcagcactatcctctaagaagatgagggaaaatctgttaataattccctccagaactttctgcaagcttaaatagggagattaaatttcagaggataacagaatcccc

SEQ ID NO: 61677 - DNA, 1235 bp, Bovine  19866880875691
  misc_feature (1)..(1): n is a, c, g, or t
ntatggggtcgcacggagttggacacgactgaagtgatttagcaaccagtaaaccaggccatatatatatatacatatacatatatatatatatatacacacggacagcttaatctttaccttaacagaaggaataggtttttttgggataaaatggtttctttcaagtggtagaacggtcacattttcttttttcagtctcaacttttcctctgctatgattttcttgcgcttctcaagataaggtccaaagcttggcagtttctaataggaaaacacacaaataagaaagcatgttacttcacagaatagaaaaatgtgagaatataaacacataaatattatgaacaaacaaaatgtgtgtttggagattggttcaggtaaactgcaacaaggtcttcattcttggaccattagtcttctaggtattagatttcattaattattaaaaagaacacaatatcacaatacctttaccaaatatgtatgtgttagatatacaaatgttaatttaaaatacatctctaaaaacagaataaaattcacaatggtaaaatcagaccactcacttaaaacaatagctcttagttagacaatttgtttagttcatatagacagaaggtgaaacctattgatggtttttttccttttcatcaggtttttagcacagtatagacacagcccagtctctgacaaatgcttttgtcaatagcaaagatactttgccaaagttctaatctgtatctctattttattatgttcaaattcttactacatctctttaaagattgtaactaacgtttattgcagtctactggaatagctgaaaaacagaatggtaaaaatattgatttctctgtacagaaaataaactttatttgcatgaaggtggcaaaaatagaaacaaaaagcaggagaaatatcacattgcttaaacaaactccatcagtattcaaaatcacattatgtagctttaaatctcaaggttatccaattgtactttacaaagttcatttagaaagatacctgggtgtcatggaaaaatgctaagtggtttcaagttaacatgaatatgccctcctattattcattatcctgtaattatttcctcttcactttgtccttctcttctagaacctttgatcttcacttttactgacatatactgctgatgatgggcaccattgaattccaaatgttacgtgtttgcttggaaccctggaactgctaggcct

SEQ ID NO: 61678 - DNA, 2252 bp, Bovine  19866880891744
  misc_feature (1)..(1): n is a, c, g, or t
nataaagattgccatgacttgcataaaaattatttctggacctccaccatttataatgcaaagtaaagttcacttaatatgtaaaaaggcatcaaacttgtcaactgaaaggattaatgtgtctctggtgcctgcaaagtggtgcctgatggcatctacgctttggctgtggcacgcatcttctgccaagaatgttctgggtttcaaggcacatttctgaatattgtgcagttctatattgtgtggataattcttctagttctcacatggattgcaatattattaaaaggattattaacaaaaacaaaagttatataatataacaaaatgcgggataatctgagatgtgttaatttgaggcacatgtgtctgtgtgagtgtgtgcaggaataggtgaggaaataaacagcttccatgagattttctcagctctgtgcctgcgtgcttagtcgcttcagttgtacccaactctttgcaactctatggactgtagcccaccaggctcctctgtccatgggattctccaggcaagaacactggagtgctttgccatttcctcctccaaggactctttccaacccaggaattgaacccgcatctcgtgcattgcaggcagattctttacccactgagccacctgagaagcccttccttagctctaaataataattcaaactgaatcaaggaagtttggatcagatgaaggaagaatttcctgacaccacagtttggttaacaccagagaaattttacaaaaaaatttccttccaagtctgaggaacctagaaactttgggaaatctttcatctaatgataatgatagaaatgcttatagttccatgttcactgaagtgatacagtctctcatctttttgtggctttatactgaagtaactaacctcttgaatctcacaggtgaattttagtttttcaaaaattatagttatacagctttggacaatagaccaaggaagtagacatatatgtgtaattcaacttgcatttcttaatttatgtagttttaaatacacaaagcattgctttgaaactcttacaaatgttgctacctcaatattagaaaggaaataatgtgggcaaactttgcaagatttttcttgtttcaaaacaaaaatgaaaagcaaacagcaaaacacataacaaaaaaagcaatacacacaaaactttttcaaatgagaggtataacttttcataaaatgtatattttatttcatcaacaaaaatactactaatgtataggcagataagatacaacctttagttgtaatttgttatggttagtttggtcactaagttgtgtccaactctttgcaaccccatgaactacagcacaccagccttctctgtccatcatactctccctgagttagctcaaactcatgtccattgagtcagtgatgccatccaaccatcttatcctctgtcatccccttctcttcccgccttcaattttttgcaacatcagggtcttttccaagtgtcagctcttcacatcaggtggccaatgtattggagcttcagcttcagtatcagtctattcaatgaatattcacatttgatttctttaggattgactgatttgatctccttactgtccaagggactctcaggactcttctccaataccacagtttgaaagcatcaattcttcaattctcagccttctctatgatccaactctcacatacatatatgactactggaaaaaccagagctttgaccacacagacctttgctggcaaagtgatatctctgctttttaatacactttccaggtttgtcatagctattcttccaaggagcaagcatcttttcattttgtggctgcagtcactatccacattgatttaggatgccagaaaaatgaaatctgacactgtttcctcattatcctcatctatttgccatgaagtgatagaactggatgccacataataggcagtcctttttcatgttgtacatacagggcaatatttttgttttgtttttgtgactttttaccatagtgtggtgttatagcaacccagtctgtttgacctcataatatactcaagccttcattttctgaaatttgatagcttcttcccctctgcactattgctcaaggaacttaagcatcttaaatttcagccctcatcacaaggttaattcctcccaaatccaaattgcaacctccagattcagatttccaagagacttcaagacatttggaagtggatactttgttgttaatt

SEQ ID NO: 61679 - DNA, 1167 bp, Bovine  19866880898951
  misc_feature (1)..(1): n is a, c, g, or t
nctaaagagtaggatgctgcttcttaccatgttttcatgctatagggaaacaagagaagatgcagacgcttttaaaaagccccgctagaagtagctggcttctttagacaggaaaaaaatttgtttggaaagtataattgttactctacttaatctttcactcagaggtcaggctagaataaattagagtagaaatttagaagaaaccaattacagtgcagtgtttgaagatggaggaaaatgagacttgagccatggaaacaaggatttggccaaattagtcatgttatctttcaagtaattagtatatttaatatattctccctaatgcatgcctcacgtattaattgattaaacttcccaagcaatgtttcttcatgtgactttggaagagcaagaagtcaggcatttatagtttgctctggtcttatggtgcaagttgtataaatttgtgcctgcaagcatgagagtagattccataggaagggcagtcatagctcttctacaccacaaagctgttatctcaaactcatggtgcttgaataccatgtggcatacatctgacagtgtagattccccggctccactcctagagatcctgatttaactggtcaaaggtgcgtccaggaatctgcattttaacatcctgattctgatggaagaacacaaagatccatgttgccaagaggactgaagtgaatagcaactgatgtacagtcagagactgagaagatagtgatggacataacacagcttcttttgtaggagaaagctggtaagaaatgattttgagctggaagagaaatgacatagagaatagggagaggaaatccagagaagcagcacactgggttctgaatgaccagtggttgaacatgcccattgaggaaccagggagttagttcagttgttggatcaaagacacgtaagcaagaagaattgtaacgcagagacagttgtcaaaggcatgacatccagagtccatgcctgacttcttgctcttccaaagtcacatgaagaaacattgcttgggaagtttaatcaattaatacatgaggcatgcattagggagaatatattaaatacactaattacttgaaagctaacataactaatgtggccaaatccttgtttccaggctcaagtctcattttcctccacagtcag

SEQ ID NO: 61680 - DNA, 1661 bp, Bovine  19866880968643
  misc_feature (1)..(1): n is a, c, g, or t
ntaggtatgcagtgctattcaaaatcaggatttcactatcatccaagactactgcactggcctcaaagccttgctttatctgaaaagcattgaagaactacaggactgggatgggcagagtccagccacgaagagtcaccagaaagggaaaccagtcccttgtattgctgaacttgtgggaaaggtacgtggtcacctctcttgggttgtccttgaggactctggctttttcattttccatttcgggtcttgtttgccctcccactgtcctactaacaggggaaacacagatgccccgttggatgtgactgcatagtagaattgttctgaaggagccttgattacaactatatgacaggtctctgagctacatttttatgaaacctgtataacacaaggtcacataaaggaaaaagattgaagtttatagtataaaatgcctccaaattcttgcttactgtggtgatgactggcattctttccagtgggaggctggagatttctttattctttaaccagctctggaaattataacattacctttctattttcagacaatcaaatcactggagccctgaataatatgatgaagtttttaaaattaaaatctaatcagtatcttttgtaactgcttctgctatgtgtgtggttaaatctgggctcaaaaggttatgtcccaactttctctctaactgctattttcagagaaatatacactacatttacattttgtataatacagtgattttagcaaatcttttctgaaacaacattcagtattttgcctttgtatttcctttgtattattctaaatagacaaccattgtcagaagacgtttcttgagtcctgaatgaggggaggaaaaaattataattcttagtcttttcagcttgtcactacatcaataattaactttaaaaaaagagaggcaagtataaaaagattctttaaggaagcatttaataattcaaatgaatcttaacttgaaacaggtcacatgaaaaagaatggaaaacaaaaaccctgggttctgtgctttcgatggcatggttagggactcagaaagaataagagaaacatcatataatgatttacattgagatagccaaaaataagagcttcttatagattaatgtgtatgaatgactgcaagtccagtgatcaaaaataaaaggggggggggaataaaatcttgctggtttccaggaaaatatcgtgatgaatgactccatgaatggcaatcaaacagaaaggctgggtgacattaatatttataatattataattagcaagactgtgcccaagcagtattattagtgtaactaatcatattactataaactgagtctgagagtatttagacagtgagtgctcatgcctttatcaatgaccatcaatatcccaaggttgttcataactaaaaaaaatttacaaataactttatgctcatgcaatgtaaacatatccagttaattgtttctgacgtgggtgggttttgatagtttatgaccatctataaaagcattgtctcaaatatatgcagtcatcgtgagagctgaaatggaaaaggctgcattgcactgcgtcattttgtctctaaaggacttccacactcatttcaaaacttacatattcaaataaaagataggtaatgatggat

SEQ ID NO: 61681 - DNA, 1955 bp, Bovine  19866881038335
  misc_feature (1)..(1): n is a, c, g, or t
natggtattagatgctgtcatgcaagcaaataggaaccatagtaaaatgttggtttcagcaaatgaaacccacatccatgatgattttactaggaatgagctagaaaactatcgtgctctcccatgctgcccatatgcctattttcttcaactcgagggtggagttgaacatcactgaattcttgatttcattcaactctgtaggtaaccacacattcacactgtaagctctttttcttgtctagttcatcatctggcctagtgggaggaggggtatgattatggctaagtggggtgggtgaaaagaaagaagcaacttcttttgttcctttcctttcagacctgatattatcctgaagaagagagtacaaaatgacattgcagccctcctgctggggagagtgcagaattggtcatgggcaattgtgagccctgagctgacatagtaccctggtgacccgagtgagttaatgtattgtccagaagctctaatttacaaccaggaagaatttggggtattgagaggcagattgaataggtccattttggcccattgtgatttcagtgacaggtccagtttgctctagtctaaaccgactcaccaaatcatgcattcagacaattaaatcaccagccctttgacatactgtaggatttctgcaatgtgacacagccctgtcactttgggttccagcttaatgtaccctttactttccagtccttttctctttccaggcattttgcactgaaaatcttctttgacactgattttaaaacaagatatacatagtgttgcttatcattctattagcctatgaatacaaaatcttgtctataagtctgtaataaaaccagatacacaaccagaaatacagctgctcatcttgattctaagatttgtgcctttttaattaatgaacactatatcatatctgtttggtcttttcctgtgaaattttcttagtacataataaatatcacatttaattttatctactgatgataagagataattccaaaaaaatatatagtcaaaaagaattaaaaaaatacttccaaagtggttcataaaactaataagaatcacatctggaaaacatttaatatttttttttaatcaaaatacctatggaaaagtagtccctataataaagggtattccatggttacatgggaacacttcagaacttttgctagggtggtttattcagaagcagccatcacattgctggaaggaggcaggatggaaatatgtctttcatcacatgggtagaaaaaacaactgagagtgttagaatactattggcaaagaaaacacagacatgtggctcagagaagaaagaaaactgtcatgtggaaataagaccggctagatttgtgaaagcaagatcctttggccctactggttaaactgtatcaccagaactacagtaagggggaaatgaacattgattatgaaactatttatcaattattatttgttatgcaaatacttatagtgaagttcttcacaagcattaccgaatttaggctcagtaatgcttccaagatccttctgtcactttcgtaagatcaatttgaaaagagtcttcctcttctccagacactgatattagtatatgatctagtgtgcccttgagtattatatatctcatgccacagtgaataaaacacttttccacatgctgttttaattaaggttaaacttctcttagagttttctaaaatatacaaaccaagcaagtaagagttcttagttggccagtcccagtttcccaattctttattctaatatgttccaaaggcattgactaactggattcagtttttcagatttaaaatttttcttgtattaaaaatgtataaagttataaaaatagaatcacatttattgaatatagattcagatttaaggcagatgagtctgccttaaaaattttagggcatatcatgac

SEQ ID NO: 61682 - DNA, 651 bp, Bovine  19866881047620
  misc_feature (1)..(1): n is a, c, g, or t
ngtccattttacacatgtatttacctaattgaccgtgaaattttccacagagcccaggtttggcatgagttttgccaatttaaagctgactatgatgaatggctttatcacactacttgctcttctgccttctgtagaataaaatactgaaagtatttttgtcaataataagccttaatttttaaataagccaattttacttttaaaaagtcaaaagcttttatatatgtataaagatacagcttaaagatacattccatatttctcacactctatatctaattctttaactgaggttttattcaatattattttgtagcttctcattagcaatcaatcaaagtaaaaggggaaggaagaaaaaaaggaaaatatgtttgagagaaagaaaaggaaaaagatatgccttccattcagtcaaaatagtctgttagatctctcaacagaagagcaatttgtatatcaaggagttcaatcttgaagtgtgtcgattaaaaaaagttccctctaatctttgaaatatggaccagctcagggcataacacaggaaggaactatccccaggtcttcatatttccctggagggaagcaataggcaggatggttccaccatagctcatatggtaggcacccaataaagctttgtagagt

SEQ ID NO: 61683 - DNA, 798 bp, Bovine  19866881052367
  misc_feature (1)..(1): n is a, c, g, or t
naatgattagcttcctttaaaaaaaatcactagaaaaatggtatggatgaacccgttggcatggcatgaatagagatgcagatgtagaaaacagaggtgtggacatggggtgaggggaaagaggaggtgggatgaattgggagactgggattgacatatctatactaccctgtgtcaaacagagagttagtgggagcctactctatagcttagggagttcagctcagtgttctctcatgatctagatgggtgagataggggaggtgtgagcaaggtccatgagggaggggatatatgtacatataaactgattcactttgttgtagaacaaaaattaacccgacattgcaaagcaactgttactccaatgataaaggaaaatcaccactgtgctatgaatgtgagaggatggaatgctatgtcactgctgagaagtgacatttggcatgtctggtctgaatcccatacttcacaacaaaagatgctttttgctacaaaagccagaagaaacatgcctcacagcaccctaattacagcatgattcttacctggtagccagagtcattacaggtcatgtagcatttgccacagttgatacacatctcttcatcgatcacagccacaacctgctctgtgttgttcagttcaccatatgttccaaggtactgcagagcttttccaatcacatcctaaaagataggcgccggattacttacggggctcattttaaaacattatcgtgttatgactaatatcggtccaaatctccctgtttttatagaatgttgcattatctaa

SEQ ID NO: 61684 - DNA, 1769 bp, Bovine  19866881079676
  misc_feature (1)..(1): n is a, c, g, or t
ntctttttagtatagctgaagatatgtttttacaagtatgtgtgtgtgtattctttccatgcatcctcctgtccactgtgttcacctttttcaatgattaaaacattcagactaagaagaagtcactgctaaatattttaaaatagaaatagggttctgatgttcagtttctaaatggccctaactttctgccttgtatttaaatgtcagttatggaattccgaagtttcagcattgaatgttcttgcctaagaatactaatatccagaggaagatatttttaggtttgggagcaccaagtagtcatttccacaaacattttggtgttgaatgcaaaagcattagttacacataaatccagtttcatctgaaatgaagaagatgaaaagaaaaccaccgattttatttttttaattgttattttttttttatttatttctgtttacttactaactcttggctatgctgggtcttcattgatgtgagggcttgtctctagttgcagtgactaagggctgccctgtagttgtgtgcagacttattgcagcacacgggctcagtagttgtggctcctaggctctagtgcacaggctcagtagttatggcacacgagcttagttgctcctcggcatgtgggatcttcctggatcgaggatagaactcatgtctcctgcattggctggtagattctttaccactgagcgaccaaggaagcccaaccactgattttaatgaaagctctttgtgcttccttaatgggaacaccaaataaatacatactgagaatactggtaaagatgctggtgaaggtggacaggatgccaaaggactcaccaccaaagacttgtttttacctttcactttagttgtttgtggaggtctggttgaggcaatgccacattcttgcacaaaagaaactacttttacttcagagaatgcctttaagggaccattgacttatgagtgtacatcagaaatattaaactacatagctatattgtgagaacattaatttactccagattgtgttaacccttgagagtctaagcagccttataaagtgtaatcatgtgaaatatgacctaaaaaatgatgtcttctgtccatccctgcagcttttattacacttagcaaataatgtattggtgatgtttggttaaataatgtataaaaaatcaagtatacaatctctaattactgaattctagtcaattctctttaacttggttaaaaatttctaacatatgaaaaattagattaggctcactgtgtttcgtcagatttgggaaaatacatgtaaagtgcaatatggaatctgtaagttcatcagcaccttacttgttttgcagtatctcgattcacaccagctgctttatacttcgtggaaacataacagagctgtatgtctatttatgcactgtatgtggttgtttttcttttacaaaatctgccattccttgttctttctcaaacagatgcttgagtgttccatacaatcttttacacagtactatatatcaaactgtagtatgtatgtattttatgcaggagtttgcattgctctacccacttgcataacattcctgcatgcaataatagcatcaaagtccttaaaataagaatatatccatttataaattaacatactttgaaacatagcaatgtttctattttgcatactcatatatcttaagcagagatgaaattgaattttgtctagtacaacactgccatcacacagtagtgttataaggcggtatgctcaagtg

SEQ ID NO: 61685 - DNA, 1284 bp, Bovine  19866881108074
  misc_feature (1)..(1): n is a, c, g, or t
nagaacatattaatggtaaattagaaaataggagtgcttctgatagcaaaagtttagatttattaaaaagtggaagaagggatttatatattaaattcttttttcttttcagagaatattcatgaaaattttatatttatcaaaagttttagtgctgatcaaaagttaaaattttcttgccataggaaaaacatggtaaatacttctgcagaatatcttcctcatattcatacactccttggatttatttagttttagacttaaaaattaaaacccatatcactccatttcctgtaagttgccacttcttgacactgtacaattcttggacataattactctgagtctctagagtaagatcagtaagcaactaatgaaagattcctggcagaaggagatagaatgagacaacgactacataactgagatcaaatgatatccatggggaatatggtgctctctatattccataaaagtctacagtaaaagctcactaatttggatgaattgtgtgaagagttcttttgaattggtgaaaagtctgaattatagattattgagaaagaaatacacatccactggaaaaaattgctaacaaatgctcatttaaaacagcacattcattgttggttttcataagaattttgatagcatacttgaaagctgttaattatcttaagtaggttaaacagtttctggaaatgtgtttatactgataatttatttaacaaggcagtattttttatatcaaatagcataaaggtatactacagctactaatgaataaacatcctgcatttcagttatatctaaactttacaactgtggtgttgaagactcttgagagtcccttggacagaaaggagatccaaccagtccatcctaaaggaaatcatccctgaatattcattggaaggactgatgctaaagctgaaactccaatactttggccacctgatgcgaagagctgactcatttgaaaagaccctgatgctgggaaagattgaaggtgggaggagaaggggatgacaggatgagatggttggatggcatcactgactcaatggacatgagtctgagtaagctccgggagttggtgatggacagggaagtctggcatgctgcagtccatggggtcgcaaagagttggacacaattaagcaactgaactgaattgaactgaaaatttacaagtttgtagttttccattattagtttctgaaaaaatttgaggtctttctttcagaagtccactactcttatttaatattcataaatacataa

SEQ ID NO: 61686 - DNA, 849 bp, Bovine  19866881115940
  misc_feature (1)..(1): n is a, c, g, or t
ntacagtatcacctataaagccaaaataaatggggtgagataagagttctcagtcttgggttatagtgtcaatgcaagacttgagctgtgttaattcaacaagcttgatcttgattgccaaagcatgcttgtcaatatttagctcccagggggcatgtcaggggcctttacagaaactagcttaaatacaaaatactataccaggatttgtgatcctttttctaagactcagattaaactgctgattttttttcttttagctttttaaaccaggaacgtgttttccatatttctatagtaacaagaagaggaaaaattgcaaagaagaattgtaaatgctattattaggatttcttgaaacccagataaaattctgtcacatagaatcactataaggcttttatctgaggtttgaaatagcatttccccaccatgattataatacagaaaaaagtttggaaaaaatgttaatccatactgagaaataagtgtaaaacagatgagattatgggtagtgattcctacaaacttaaaaacaaatagtttgcaattttaataactctatacttagaaccttcttcaatgatactatgaaatttctaagcctctgtagccattatcctttacatttaagaaaatatagtgaggatcagtcttataatgaagaaaacctatacccactctggcgattaagattaaatcatgataagaaaattagtattttgtgatagactaatacatttctatttcccatctgacttttctggtttaatagatataggttagcaatctacatatcctttttattgagcctgacaaagcatttatgaaattcagtatgatgaagat

SEQ ID NO: 61687 - DNA, 1116 bp, Bovine  19866881122046
  misc_feature (1)..(1): n is a, c, g, or t
ntgaaagaaatatactctattctatttcaaactgtagttactccatgcatgctcggtcgctcagcagtgtctgacgctttgtgaccccatggactgtatccagccaaacttctctatccatgggattttctaaggaggaatactgaagtgggttgcaatttcctcctccaggggatcttcctgacccagggattgaatatgtgtctcctgcactggcacatggattctttatcactgaaccacctgagcccctgtagttactaaaaatgtagacagtagttagtggtaatttagctgaacacttaatatttgtgccctgtatcctatataaaatacacttcatacaaaaaataaaaaatatgtaaatatatataagaggtagcaaaaagtgtccatcttaaaagtaaacatctcccagctggatccacgtctaagaagttttagatggttagatcactcaaagacttcattttacaaaatatgagagcatccttcccattagtgggcagaagctacatctgagagaaaatgaatcttacattttaaaagtaaacaggactaaagatcatatctgcagtacattacggaagagaaatatggagaacaagacgacccatcagaagtactttttaagatgttcttggcctcttcaatgtttgtaatcttcataaaatattcttgaaagcaatgcttttaaagatgccatatacatcctatgtaagcatgtacacgaacaaatacacaccatcagtgatgttactgattgttaagaataaaaatgaatggagtaccaaagtgatgtaaatataaagacaggttttatggccaggctatagatctaaagcacagcccctgaattttccaggcatgctaagcactgcttcatgtacaaagacacaactccagtaagctgcaaaggctgtttggctttttgctgactgttgtactgagtaagactccagagccaaatttcaaaaatgtcatcaactgatcataaatattgttaacatataataagagtttctgtttctgcactttatgtccaaattgctatttaagtatatctttacctctccaaaacaagacagcgagtggtcgagggtgttattcctatta

SEQ ID NO: 61688 - DNA, 3612 bp, Bovine  19866881148133
  misc_feature (1)..(1): n is a, c, g, or t
nctatggtttttccggtagtccgtatggatgtgagagttggactgtgaagaaggctgagtgccgaagaattcatgctttgaactgtggtgttggagaagactcttgagagtcccttggactgcaaggagatccacccagtccattctgaaggagatcagccctgggtgttctttggaaagaatgatgctaaagctgaaactccaatactttgtccacttcatgtgaagagttgactcattggaaaagattggttgatgaaattgctatccccctacaatgacaaaccacagaattgttgttgattttcattcaacagtttgttctcaccttgcaagtttttaatattcatccttaatatgatattaccgcccactttgatgttctggattttcactagcactcctataccagaggtgtctcttctctttcagattgatctccctgcttgcactgtgtcttatcctacccaacccatagacgtatatggaattatatttcaaaaacatggatttaactgtatggcttttcatattttctgattgcttaaaggataaggcacagacactttaggaagctgactctaaactctcattgaacagtttagtcatatctcctctctgttcccttcaaaagcaataatttagatgaattttttctatttcccatcacaccatgcattcctatgctttagaggcttcctaggtattctttatccatgtgtttctccagaggccctactctagttgttgccacattgtgaatccttcaagactccagtctttcccctcaaccccaaaggcatacactttagaagtaaataaaagtaatcactctgccactaatgtcccaccttttttgtacacacttcaaaaggaaggaaaattgtttggagttctttttatgtctgtttcttattccaaaatgagaccattcataaagtcttcatggttagctgcagggtgattgcaaatgttcagaaaggtttatattctatagttttttaattcccacaaacactgtattgagcagggaaaggaaaacgtaagaataagactattgcatttgtgattccaactgccccatgttaaaatctaggaatattagcaactggaaatgcataagtaaagtctttttgtaatgctgaattctgtccttgcccaatattctagaaagctaattatttgctgcagcatgtgaatgttaattgtatgatccagtaaggtttaccacacttatttttaagtgaaaaaatgcaaagtagaaactatctaaatttagcagtcctttgggtactttacatttgttgaatattacaaaagtaaatacttatctctttttaatactaatatgattttgtgcatcaagcaacttgaagatttttccctcatgcaaggttcatcagctgttttatcaactgtgtaggctgcaggcaccttagtaaagttgagttgggataaatgaaagatccttgtcgaattggtaatcatgcaggtattcagagtgaaagggagatcctattttaatttaatttcagtacttcaagatattttttcttatgggctgtattaccagtctctgtttacatatctatcttttaagaaatcatagctactcttaatacatttcaaatcaagcttccctatacctaggtgatatgtattacttctttctgcaagggcctctttaataatatgatatcttgcttattatgacatattcaaatgctaaatcatttatagacacataatgacatataataatcccaaagggcatttatatattctcttgtctttgaccaatttttagtgccctaagtgattctgattgtacttgaggacaaattaataccttattttttaaaataatttcacaattcatggaaagttttaggttaattattggggattaaataaaaatattatttatttatactatataatccatgaagctaaggacctgccccacccaaagctcctttctaaagtaaaattatcaaagacaatatcttgctgtcagaaaagtatgtgtgctagatatcttgaccacgattcattggaatagattttgtatcctgagcaaaaaagtgaccacctacagactaaagaaagagaatagcaggctatcagggagtctggtgtcaaaggcaataaggcactctatatttggtgctggctaactatcatttagaactcttaattgtaagaaacagaaaccgattctggtctcagaagtgaaaaggaaatttattggaagtatacaagatgtctaagagaaccagagaaggcaggaacgccaggcttagaagagggacagaaaccaatggatccagaaaatgggcagcaagggttttccccataatgcagcctctaccagggctgatatcagccaccggtgcctttgttgggcactgtcaggagatgctgcaccacacactacacaaagacacgtcagccagttttctgattatgagattggaaatttgggctggaacagaacagcagttggccatgcgtaaaaccgtattattgtttattagttgacagagaacagggacagaaaaattctctcttcagtgggttccatattggtgatactttctgtgtcccaccaaaacttcatgcaatgaggatttaacaaaataaatgggaagggtgcgaagtaggaggaatggccaaaaaaaaagaattattctgcttgtatctgagaatcttctgtgtgggtttggttttgaaatatatagattctgcggcagatcatagcaaaattgaattggagaaccaaaaaggcaatataggaaaaaaaagaaagggagtagaagtagaaatgaaaaaatagatactgaaaagtaagagcaaattcattaatatcacagaatttctaatcctaaaaaccatagacaccaactcttaaaggaaaacaagagagtaagagctgctttttgtcactgatttcaccaaagtgtcatcagagctgctgtgtgtcctacagacatgaaagatcccagaccccagaggcctggctcttcctttgtcaaaaatatttcctttaccttcttacttccccatatatacttgtaagaagcctccataatggggtgggagggggtaggctcactatggttcctttcctttacacttgaaagactttaaaataaagaatcttctttttacacacataagttcatacatacacacacacacacacacagcccttgtgatgtatactcttataaaccatgagtatgaatagataaatttataaaaattaaattgcattcagattgctcaaaatttgggagaaaatataaaatccatgaatttcaagagtttgtgaaaaaccacacttcctacaggtcacgttctaaatcttccccatcccatatttttacacaaaaacttttgaataaagtcacccttcttttagttatctcaaaatctttttcagctcgtagagtgaaatcagtctactgtactggcaagacaaagacctagctaggtacctcttcctagctctcatagcagcagtaggaagaaatcccttaaggaactgtaccaacttgttatggatgcattcccttagctgaaaccattcatgccaagggatgcagtttt
